United States Patent Application Publication US 2025/0297208 A1 - sequence listing, part 5

SEQ ID NO: 668 - DNA, 19328 bp, Xanthophyllomyces dendrorhous
agagagagagagagagagagagagagagaggagtcagccgcgggatcgaagggtcaatctatggtaaagatcgtccaaatgacgaccgaagtttatccataaacatacttttgtctccgagaaaagtctcggcttgccattctcggggcgagccgtctttgccgacacccatgtctatattcgcacctctgtggatctgctcagcctctgttctgccatttccacgtctttgggagctcacgatacctccttggaagtcggtctgatatgtgggtacgcagcttgctgtctttgaccctttattctcctttcggagttcactgatgagctcctgaagttccttggtatggtccaagagagcttggtttttcgattgaagcgcctgattattactctgcaaagattcaatcatgtttgtttgccgtgctgatggccgagtatgacgttataaacagaagctttagtgtggagaggatggctggtatcaattaacacattacattcgcttacctctgtattttcgctatacgcagttgcaaaagaatccacatcaattcgtgatgagaattatctttaaggagaaggaaatctaacgagaaaaaggatacagcaagaataactggaactcacttgtttcagtcgattctgcaaatggacccagtgggtaaattggttttatttttttattttttaaatttaaacaacaggtagccagtaagcctatctatcgctctcgtgcgcaggtgagtcttcaaagagtctaaagaagagatgaaaggtggcaagaagaggccatatggttgataaaacgaagacgcaaagaaagaattaccttctcccttttatctgcaaccttagtcgaaccctgcgccttagcctttgacttgatcgaaaatgagtgggggaagtactctggagaatcttcgtcatctgaaggaccatcgcacgcatattgagaattcagtatggccgctttctggtgaccgtgttgagctgagagaagagttcgagaggatcccatctgaaggtttacgttatggatttaaatgttcgacacaagattggtaagaagatgaccgctgtagagcttgaagtgatcaagttgaggagagcgaggtagatggaagagaaaggaaagaaagatatggtaagagagaaacgaacggactaagaacccaagagaagaagagatcaggatgccgagaagcataaacagatacagaaaccccattctcatagacactatgatctggctagagcgaacggcatgaacgaggcgcacgaagtcggatcgaccgtttcatactctgacccttcaatctttaatttgtccagagcatgtgtatgtgtagctcctctcctgcaccgaacgatatatacatacagaatggagcaaatatagtttgagcattaaaatccgccgccgacaatggctcctcaacccccccgctcagcatttcaaatccttggtcatccatcgagacacgcgaaacactcgtccagtaattctccgggtgaatttccatcaggaaaccagctcgtcggattcttgcttgacccgaacaaccgtttcactggaatcacatccaccctgtctgtcgagtatgagaccaaacacgcttcctccggtttcgttctgctcgttaccctgcctctccatgttcttgcatccacctctatttgtccgttctttcttcattttcctgcggttcaggtctttctttactctatttccctgcggtccagctcgttctttccgtctgcttcactttatgtaatatctaaatccgtcagtttagtaaaagagagcaagaacatacatgaggcattgacaagaccgaggacattgtatttaccctcatcgaggaagacgatcatgtatctccctgattttggctattcatcatttatcgggggtcgatgttattctggttcaatttagatcctttctcttcccccaagaatcacggagcaggataaaattttaacatggtagcgaccgatccgcttatctcaagcagtacgtcagtccgccgagtcgtctcgactcgacagagaatgaaccaatagtgctaaaccatccctgccttccagaatgtattgacccgagtacggtcgatatctctcatgagatcattgcgatggctgctcgagacccgagtaggaccagaggagaacattaaatgttctgccggcgctgaattcaaaaaaaaatgcaaaggcttggagttcactcctacttcatggatccttggcctatctgtgatgacctttatccttactcggcacgttctgtctacatatatgtccgcatctcattctcgaccgtcggcctcgggttggaccgtacgttttcaaaacatggaagtgataaacaattagtacgggatcataaaacagctgtagcttatgtcgttcagtccagttgcctcaaatgggtcaacgcataagaactagcttcaaagggagtctgaagattaggtcgctcaatatatccgatcgaggtgcatgacacgttggttctattgatatcgtggaaccaccacccggagcattgcgttttcgtttgattgctctcgaagccggcgacgtgggtattctatatcatccgcccccgaaaagaatatagagagcgccggatagaaaataatagagatggcggcgagaaaacgtggggcaacttgaaacggctctgcatccacccgtccaatttcaatcttcctgatagcatatcccttgcgagaaggtaagttctcttgaatcaatttgtctacttcatatctctcatgcggacttgagttccttcatctgatcatccatccatccaatcaatctctagttctattttggtttttacctgatggatcgaagcctttgacaaccagagttcaagaggctgaaaattaatcaacctaatgaaagagagaaatgtgtgtgtgacataaagtcagtgaacagcttttttcaatcagagtttacaacatgttgggagaccaaatttgaagagctatcagagacagaatgaagggaaaagagaccgtccctctgaatatcactttgctcaggatgaagatcttgatgaggttcgcccttttccgtccttccatatcattcgctgattctttgtttcttttttttgtcttccgttgtttatctgaccaatggctgattctacctcagctctgtcggtcgtttatggttcgactgcggtttcataaaagagttaataagtctgatttaaacgcagaacagactcatctccatcatttaacattatccttatttctcttcttgattctcacatcatatcttctttgtgttgctcttggtagtcgtctgtctgtcgatgcctattcgtcttctagctttatatcgtcgaaagtgttgtcataattctttttcttttgtttcgttttctctttttttttgtgttaaggaacgcacgtcgttcattacaaacgccatgatattcaagatctaccgaagaaaacggagaagacagaacctgacatgtaccatatgagatgatagcaatgcagattcacatgataacataagcgagaaagcatagacaggcggagggagaggtcattctgttaagttctccttctttgtaaagtatatgtgtgggggtggaggaaaagttaattagggcattggacaaaacgcgagagtagtttatcacaacgaccactactacagatagcaggacgtaaaccagaagaaagaaaaacctgtaagagaaaacatccagaatagcagacatccctctctctgtaatgtagacctattaagtccaccgggaaagagcggaagtgatcgatcgaacgggtcgaccttgttctaatttcgcagcaaaaagcaaacaatccctcgcctttatttcttcttcttccagatctccctgtccttgtgcccgcccaggtgattcctcttgggtctgctgaacttgggcctgggcctggatgactttgcataaaaagtaccaagcctccgtacaatcccatccttcaccttgagtcagtccatcgagtaacgcccgggcgacattgagtgccggaacggacggtctgacaaggtataaccttgcaagatggacagtggctgacgtatgagtcggtgcgtaaagaagagatttcgtgaaagccgaaacagccgactctgattcggattgaacgtcatagtacaacccaagttggacccaaacctctgggtttgtagggtccaacagttctgcctcttggatcgcagcaagcgcctcgtccagctttcctgatcgtctgcaggttgcagccgtcaatagccaaagttgaccgagcagttcgatctcttgtgagacttgacagaccgagggcccggtcgttagaggaagatcctcgataggcgacggaggtcggcttggtagaggagtcgagtttcgatgtgttctaaacgatcgagcaggggatccaccggaaggggtttgtatctggaccgatagagcgtgagagacagatcgttgtgttccgtcgatgttggcgttgagggatgctcggcctagttttttgttcattcgcgagatgtcatcagactatctgcaaggcgtgtgatgagagaaagaaagaaagaaagagaagaacaaactcactgccaaaggcgcttggatgccttagcgaatgtaatttggtcaaagaagctgtccttgtcaacttctttcccccctttgatcctttgacgttgagatgttttggcatgaaacttcgatgacggaaacgttcagacgatccgctgatcgaggttgacggagaaggcgagccagacgaagggggcgaagataagggatcatctgcaagcatttgatgattgtgaccgtttggcgaaggaggatcgactaaatagaagaaggcatcatcagaatcatagaaaagatgtgaatttttaacagataccgaggtagctcactgttaatcgtcgtcactcccgaattcaagtgttcctcttcgtcatcatcgtcgtcatctccgtttgcagggaatgaagcattcatctcgtccctcactgaccaaccttctggcaactgtaacacagagggagcggtcaattgggttctcactgtcggtgcaaagatcgaggacctcctatcggtttcctccattgcatagaatggtgccggtcgaccacatgtatcggcatagaacgaaaacagatccagttcgagttcagcagcgacagaaggaccttcgagtcgttcacagataaacacgttggtaattcgaagttgaaaaacaacctgaagcatatcggtgtaggatcggctaggccgttcagaggcaggcacaagatcggtcggagatggtatcgaggcggctgagagtagaggtggaggagcagagataaatcgagaggatttggtccgagacggaacagacggggtaatttctatagggacggctgcgaagtctacactggttgttttaggaatgcttgtttctccctcttgttcctccttcacgtcctcgttcagaacggttcctgccttcttctcttgttcatcttgctcgacgaaaatatcccagctcttcagtccttcttctacagcatctaacgcttctttccactgttctttcgcggtgaggagcagaacgagaagatgccagctctgaatgttcagccgatcgagcttcaacgaagtacggatggaggtgagagcggaatcaatctcgcgagattctgcttgaacgtatgccaggctgtaaaaagtggaagcagacgaaggattaagttcgacagctgttagaagagtcttcagcgcggacgcttggaacgatggacgggttgtcgggtcttgggcttttatttggagaacagagaagggacaacatatgtgaacatgacatcttcgtatcaacaaatggaaagtaaccgcctgatagaaacgtactcttttcagccaagctcatttccagtccagcctttaccactaatgctctcgctcttgccttgactcgttcatcatctcgtagactaccatctcccttattgtcccagattcttagagctagatcaaccatttctgtggcctcctcgagttctatcacatccgagtacttgcccagtaagccggctccattcagcaacgtctctccaaacgttcgatcatcttcaaactcttcgtcagccgacggatgctcgatcaaccggctgtcctgatccggcccagaaggagcgactgtcatgccaagagcatttgaggaattcactcgggaagcagtaggccggatggatgaatcgcctaaagaagtttccctagctttgttgttcagttggacgtagagtcggaatgttcgcttggcatctgtgaggagagcagcggcttgaagaatccgggtgagatgtcggaggattggttgtgaattaaatgtttgggatgtagcccaccacaagatctgtccgacgagaaggcaaaataggaaaagtaaaaggatcgaattagatatgaatgtcctggcgatatccaatagaaacaaacgaattatacctggagtaagccgttggtatcctctcgtttttctcctccaagctcccacaaaacgacacatgcagtcgcaaagtcttcgatttccgttcgtttctctcccgccttggggaacggtgtgccggctgaatcgaatgagtcgaaagccctctgtctgacctgggtggtttcttcttcccaagaaagcttgcctgctgaaggcgataaggactcctcccactgacggactaacaacctggtatctttatcttggtcttgggtgatctcgacccgatcaggcgcgatcaaggcgagtgctctaaggtaaagcatatagacagccgctcgtcgacgaggtcggaatgagccgggccaacagcgttcgaacacgaaccatgttctgagccatctgaggccgtgtgctggggaagaagatccggcagaagcaagaatagaacccctgtaaagtgcgcgctcggcccatcggtgaagttctcgatgagcgatgaatgatggggaagagaatgtggaggggagtttggtgtaggatggatgggtgctgagaagcgcgatgctttgcgcgtatgcattgagagcgttagagtttgccccgttagatggctctagaaattcatatgccaggcctattttgaatgcgaaaagaggagaaagaggaataagggacgcattcaggtttttggaagagacatcaggttagattgaattgccaagtagatgacagaccttcgatcacacgtcctctaactcgggcgatatggtccgacatcaagagttcactctgttctactgacgaagaaaacgcgagctgcgatacttggatacattcagagtattgaccaagggctagatgaaagtatgcctgggtcaacaacgcgttctattttttgttatcatcccgtttcaaagagagaaccagagccaagccaaatcaatcgagaggcgtcagactaagtctagactactggtagctcaaatatgaagaaggagatcgaacctgtctttctattgggttcaacgcccctcctttttcgcctacgataccgacgatctcgctcaacccggttgttacaacctgggttctatcggatccagccaaagaagcttcccaacccgaccgaccgagtgctaccctcctcgcatcctcggccgagtcagcatctccatcgagatcttgagcggtgatcttggacgtagtcagcgtggtggcagtatgggaatgaagatggtatggcgacgagacggagagctcccgaggagtgattgtttgctggagtataggagatgggatcagataaagcgagagagatctaagatgagatgccagcagggttgtgactaggaatatggtggagtaaagtaggtcccaatccaagagtgattacgtgacgattccgaagagacatagaagaaatggggacaaatgagaaaggaagggaagaggaacgtcagcctggctgagagccttttctccagaaagatgaacaggaccacaaccagaaatctagcgtaaaggaacggtagctgaaggatagatacaaagcaaagttcaagcacatactcgaagtcgtcccgccatgggcgtgcttgtcccactttctggttagttcggtccacggaaggacgtcctgctttggcgacaccgcaacattctcatctgcccacgcgcctctagagagggcctgatcgagctgagcgtagtaatgaacggcttttggattggaagccggcttactcgaggccattgtgcgagatagaatacgactgacactagacgagccagagataaaagaagagagacgagatgagtggtacttgagtgagagtgtttgaggactaaaggaatggagatggaaggagcggaaacttgcttagtcatccagaactgtgagcccagctcagttggccacccagtcgagaactggtgtatcgaaaggtgtatccacagaacacatcaagacaaacattaaaagagaagaagaagaagaaggataagatagcgcacagtatagaagatagctatacccctcagagaatataaagggcgaggaagagcacatagaacacactgtccgtcacttagagaccatcctctcggtttgctttgtactaccaaggcatacggctaggcagttgactctctctgccttcaagacaaaatccattctgtccgcatggtctctctccatatgtgtggatgtatacacatgttgacacaatgcccattcatctacatacacattccaggatttatccttcgcagactatacaatagatgacactctgcctagggctcatagggtgactaaccgggctgaagatctgctgaaccgacccggcgattgcaccatttttccgaaatcgtttaaaacgagaaaaacactcgagtttttttctttccttttccttgaacatcctctggaccatcactcgtacacctcttcttcttcgaggcatatcctatttgcaatcatggctctcaggtcgtcctccgctaggctctttgctactgcatcgtaattattctcgtttcttttttcgaaggacaacagcgcgttttccatcagattgctgacgatcgctctactgttcggaccgttctggttctgctgctcgtcaactgtacatatctgattgcgctatagatctcctttatctggaaaccaccacaaggtcgttgtcgttggagctggtgcggctggtctcaggtgagcctagtttgctctcttattccgatgttcatttcgatcgctcatacgaaaccctgctatgtcctatcaagtgtggcaaacatgctctacaaccggttcgctgacgcaggcaagactttggctgatggagatgttgccatcgtcgacgtgagttcctatttctctcgctctccttgtatttgaccgcgctctttgaaatgttcaatatccgctgagacttctctcatctttagggatctaaactccaccactaccaacctggatggactctcgtcggtagcggtttggcccaaaagcaagatctagccaagccggtctcgtctttgattccttcttatattcaccaccacgctcaccacgcctctacgttctctccttccaccaactcggtcactttggcttccggtgggccaacacttacttatgattatcttgtcgtctgccctggtttgcagactaactttaaggctgtcgccggactggaggatgcgttgagcgttggaactaaggagagcaaggtcggaagtatctatggctatgagtactgtgatcaggtctgggattctatcgagagctttgatggaaagaaggcaatctttactcagcctaagggaatcatcaagtcagtatttctttgtcttgcgcaccgttgcgagaagaatcacgttaacatgatgtcgtttggtcgctaaaccaggtgcgccggagctcctcagaaagtaatgtggatggcccgatctcaatgggcccggcaaggaaagaacgtcgacgtgaatttcatcagtggaatggtacgtctttagcctgtcttcaaacttcggaaagatatgcaaaccacaagcttatcctcgacctcattacctttttttagccaacgatgtttgccgttcctaaatactctcaagcgcttgtcaagttggccgaggagcgaggtgtcaacgtttccaacaacttggaccttgtctcgctctctcacaccaacaggacggctacgttcaagaacgctgatggagagagcgttaccaaagactttgactttttacatgtcgtgcctcctcaaggccctcttgataccctcaaggtttgccctgtctttcagtacttcttcgtcggaatctacgtgctcacctctttgcgcgccttcggtcttcttcgcacatagaactctccattgacagatgtttctggctacgtcaccgtttcaagctcgagccttcaacacaccgagtttcctaacgtgtttgccctaggtgacgcttcgtctttgcctacttccaagacagaggcggctatcacttcccagacaccagttgttgtcgaaaacttgttggccgagatggaaggcaaaaagggattggctgtctacggcgggtacagtacgcccttctctatctttgcgctactgcccgtttttctgttgtcaatccctgacttgacacgatcgttctcttttgacagcctcgtgtccgcttcttacgggacacaacgaacttctgcttgcggagttcaagtatggcggaattcctgacgagacgttcgccaaatttggaattgaccaggcaaagcccaataagttgttttatcacctcaagaaggatgtaagctttcatttcccttcttcattataaagacagtaatccaaacctggttcctgattttctttatcctcgaaacatcctttcttgtgcgatgcgtcaatagatcttcccatatagtcactataactttatggtcaagggcaagtggttcggtcgatcaggattgttcgctcctcgatttgatgctcctgtagagaagcagtaaagtgacgttcgttagccgatctcatctctttcctttcttcatctctcttctccttctttttgagcctgcgccgggttatttgtgctcttttctctgtttcatccattctcttcgaaaggagtccatgttggataaagctggatagaagtttataagaaaaataaaattgatctcctgttcatccctatatatggttgtatctcttcgttcccctcttcctttgtctttcgtgtcttccgttcgtttttctctatcgctttgttttacttctcgaatagaggtattcgaatagatttgctttttcttttcttcccctctcgttgatctacgtcgaagtcgttaagttctgatagcagttgtgtcatacgaaatgtgtttttaagaagcagcaagtttagttacaacaatagaaacagagagcacaataggaataaaaagactgcaatgaagcaaaaggttgaataatatcaagaaataaagaaatcaagagggaagaggagatggagaagaaaggaagatggattagattagaatcctgatggagcacctgtgttccagacaaactatcgataaacgcaaccaaaatgacatcaagaaagattcagaacaacggagatatcataaaacgagagagcatggattcataacatacgttgatatccgtcgctgtaaggttcggtaggcttaggaaaaataagaagaagcactcatcaacgtgtattcgctgcctccatagagagcataccaaaggtaatgcgagcagagcgcaacttgaaataaagatttgaagagataagaaaagaaagatctcactcgaaagggaaaaatagactctccgatcctcccacaggcaatcccaaattgaccacaccatcatcagttagccaaggcacgtcaaaatcaggcatcgtcggcatatccagccaatcgaaatcgggcaaatcccaatcgacttcattctctacgtcattgtgagaatgagaatgggatcgggatctatttgaaggctgagaggctttcgatccacctggatggtcaccaccagaagatgagttgaggagcgcgtgagctagagacgagggcgtaggcggacgagtcatattatatcggcgtttaaaagtgctgatttgaagaccgagcgtcaaagagtatctactcatccgtatttgaagagcgtagtagtttgaaaagcccgatcaaaagtttgtcagaacgaaaaagactcaatgtggatgacgcttcaatatatactacttttttctttacctttctgcagaaatttctgatagtaatccggctaattgactgacgatcgagacgatctgtctccggtccacatcatttggaaacaagatcgcaaccttaatgagataacatgccgaaaatgttgcctgtattaagatttcgtatctcagcgcacatctaaccatcagaatcatcaagagaaatgagagttgtgtatataagtgtacaaaccatcaccaggtattcatgaattgcaaaacagagagccgccctaaatgaagaagaacagacttagtgggctggctgtatgtttgtacagaggttcataaagtgtcatacttacctcagttggttgttgttgagatagacttcaagacaacgcattgcagactctttggcttcgactttagagaggaagaggttagggtcatcaaatatcaatattgaacgacaggtccaagaagtttgagaaaatcacagaaaacatacgagctatttctttctagaggttaaaagaagaaaaagggaaggaacggtactcagaatagcctcttctcaaaaaggcactacaataggcatacgaacctgctcatatggcatcttgtcccaactggctcctctcagagccacacaaacgagccaaagcttcgcataatgaagctccacaaggacttattatagaagattggacgatattcccggtagtatgagggtgtcagctcttgatcgacgaatgagaatgccaattgaaccaggagatgagacatacgcatgttccgcatcaccgactcttcggagtatgtctgcttatgcatgtcatcccactcagtgtaccacctagccagatgcatcccatgggggggggagcaggaatatattattaggcttggacttttcgcttaggtgagaatgtttagtaatggcgcacctattgagatcctcggaaacacggctgatatacgagagtgtaggcttcgtgacctgtcctttgatggtctgaagatgatcataggcccgggctgcaaatcgttcgttccagtttactgaaatcagtctgctaactcaacacttggaacagatgagattcgacgaaacagtttaagatatacttttgagaacaaccaattcgacctctgctacaagtctgacatccgtagggctagacatagggtgcgatagaaagtgtcgagcattgataacccctgtatcgtcctccctatgatcatacgtgataccagaaaacggatgatagcaagttagtatgcagttgtcttgccgaagtacgaaggtgaacgaacctgatcatcgtcggtttcccactacttagcgtctgcacccgatcataccagaagcaggtaagccagatcctcgtactgaccactgtatagcgtagaccccatagtcttaaacgtcagatagataacaaagatgaagaataacaatagatccaagacaacgaacctaagtctcgctcttcagcatcagaacgtatccgttcaccctgtcctgcggcctgcagcaatttgctgagctatacattgttcccaatcccaaatatggacatcatcaacgacaaactctcatttgaagatgagtgcgcaaaaaattgaactaacagctctgtggagaccgatgtctagtgacatcctgacagcatggcctgatggaagatacccgttttgcgagtagcatgctaatagtaatgaagctaaatattacccgctcatgacagggactagttagcaaacggttcatcttcctcagaaaataccgatagtaaagcttaccttgaacagcttcttttcgaacgactgtttgtatttgtgtttcaccagaaatcagaatgtcaacagaccgtattgccaggagagcaaggaaagaaactcaccaggtccaaacaaagtgcttctggcgattccatgagcttcatccgatgcagcccgaaatgaaggtcctaacggccctacagagaatcaaggtaagcttgggagcaatagcgggaacgagatgagaaagcttggatttatggggaagtatatatactcaccgtttccacctctgatttttgcagcgacagcaaggatcacgtcaaccgctgccagccatcatcaaaaggaataagttcagacgcgacgggcttctgacagagaatctgacttataaaggaagcttttggatcttgacacgtactgaatggagttctgtcgcgtaaactttcgaacgtatcatacgcagggtcgaacaaagggacaaaaaggttggaaccagaaaagaatctataagaccacagcaagggaagaacgaattcagaaccaacgcgcgaagataccaaatggtttaatcgcaaccattttctgtttatataattttctgttcgagagatgatgaaccaatcagataattaaacatggacaaacatattgtacagctctcttgcttcggcctccgagaccatacccttagtgacgacgtccggaaatggattgggtgggggcgggactcgcttcttcttgacaactctgtccaatcatgttatagaacaaaagactcaagttagcacaggcagtgagatgacaagatgcctttcaacgcacctagacgagttaagcgtcccgttcgcagcatcagcagccgcgtttgctaacccttgcaaggctagcccgggggtcatcattgctgccctcggtagagtgttttcagactcatcatcagacgacacagcagttgagggaacgatctcgtaaggggcaaatctgatattaaagaatcataaagtaaccgagtagacgtattaaaacactggcagtcgagagcacgagatgattttcacctgcggagaaaagattagaaacacatgggacgaaccggtgggtcggagggggtgcgaaccccggcagagctggaaaagattcttgttctccggtgttttctattccagctcctgctatgtttgtcccttcggctgattctatcctagacctactccttcctggatttctgtttttcggttcgcttcttccccgttcgccgctatcatcgtttgccatctcttctgttttgcctctcctgtcgctttcccttctggatcttcgatgttcttcaactccgtcctcctcaataacatcgaacactgtgtttctcgaatgggaaagtggtagccccggaagcggatgatcggtccctgctcttcctgctccgtatcctgcgcttgttgatgtcggtggccattgggaagacgatggtgctgttggattgtcagcataagtacctcgcccaggagacgcccggagcgtgttccaaggagcttgattgacatttcctaattgtgggcctgatagcggagaattgaatgtattgcgagcactcgatatattggaaagtgtaccaaatggattggcactgctcaattcggggcccggatcgctttgtagatacatggaattatttgctcctcgactggaaaaaatggtaaggctatcttgatcagtgttgattatagggggaggatgaataagggaagcggaatgacccctttgggtatagtatggcagggtatcagatgttgaggttgctggggaatctatcgaggctccttgccgattgtttgttagaacggaaaggatttgggatagagtggattgcatggatcctctgcagtcaaatgaggaagatattgaatcacttgaagtcagcatgggtagaacataattagttgcaagcagaatgacgcactgagcttcagaaattttggagacctcatcttctaacttgctaactctcctgatatttttgagtaatcagattgtaagagaagtaagagagaacggatcaaacatgacacaaccccaatctatcataaaggagaaactatgcatactcttcccgctccccaatatcttctcctatcgtagttgtggccgtttttttctttttctttggcggtttttcgaatacacagggcacacctgccagctcgcagcgtctacagggcggctcgatcgtgttgtctgcattaagctatcagatatcgaaggtatgacttgtgagcgtttatccggctaaccagagatacatccgtcagatgatagaaagtgatgagcttaccagtccttcacatcggttctttccctgagagatatgaagattaggcaatcacacgatcagtcaattttctgaagatatacatattcatccacccttaaacccatctggagaacatgcaccaataccaatcaagggaacttctcaatggataaatagccgaagccaactctttacactccttctgaatctagtccgagtgctcttggcatccaaacttcaaaccgacacgctgctgcggtcacaaatggtgggctccccttctgatgaagcctggctattgattgagaggagaaacacatccaaaacttactttcctgcaagctacacatgctcgagcccctctgaaagcaaacaaaagaacaaacaagcgcaaatatcggtttgttatattcggatagaaagatagttgattgatgtaataagatcggcttaccgttctgtacagcaagaataacgttcaaagcagtcgttgagaatatatccagcaagagcaaagaaaacaaagcgaaacagatctaggatcagcatctgtcatacccatattcgacccaattcgctgttctccagaccaataagaaatggtcaagtattcctctatcctatcctttaaaattctcctttggagaatccagcatacttacttagtcctggataagaagccaatgacagcatggcttgtccagcttcatgtgtgtttgccaatcctgctgagattgatgacgcgttattcactgttgtaggattcaaagatggttgtggatgctgagatgctgaagaggctaagtcgtcttcgtgtggttggtccaaaggagagcccatccagttcagattcgttgcttatcagtgtgagcaaatagacttcaagcgttttacgtgtggataattgcgacacttggaccgcgtgagaaacagacaatgtgctactcgtcgtatatttgcgagagagagggtggggagaattagtcggagatgataggatgctgtgtggaaagatggatggatggcggattgagtaaaatgaagccgatcgagatgagaaacaaattagcatgaagaaaccacagtcgggagacagagattctcaccgatcgtctaatcttgcatcggctattccaccaagaaagatggagaggtataagaaaggagggaactcaagatggaaatgatgaggatacgagaacagctaagggaaatgcccggcaattcacggcccggcccgccgctcattatcccttgattctccgacccagtcagacattcatcgactcctcctcagaagaaagcacgcacaccctgtcctatcagtgcaatccagactgtactcaatccgaccacatggtgacaacagaccgaccaggtcgataagtatgctaaagacgccgaagagctaagaaacttgctttccacatgcgtaggctcacttctttaaagttcaagcagaacattcttcactgctctcgatcgacatctcacacctatacgcaaaacagcgctcagcactctacatgatacacagtttacataatttcgtccccagcccagtaatcgctaatcttaaaaccaaaacccctactaagtacgacggcttcatcgaatgtgattccggtcttgaacatgacaccatccaacttatcagccggacttgttcgttgtaggaggtggagagatgtgagcatcgcaatctatttgcaaatatgttagaaaataatcagtcaatatttctccttcttttgttgtcttgtctctatcaaactgcttcagaaaagtgcagaggaagaaacagacagcacataccagattttttacagtaaccgaacacatcgtctcacccactgtactcgaaagttcatctctcgataaggaatgaaccacatcatcgtactccgctgtcagacttccaaaaatcgcgatcagtctatccatcggaaaggcctttggtcccaacaacgactgagggatctttgctcccaaacccttcttcatcgtcggtttcttccttctttttgaatcgccttcccatctggctcgaccgaaattcgtcaggtccttcgtagtaggacaaaacgaggccagaaacgaggcaatcaggagaagttgagctttttccggaagcgacggcatcgtagaagatcgatccgctaaagcagacgaatttggaggcgccttgacctgaaacggagaatttggagtggatgcgatggttggttgagtgaatcgagctagactccctggcaaagcggtcggatcgtttagagcaactcgaagcgcctcattcatctttcctgcgagctcgaacgttatccgtgacgtagtctcgacgtattctcctctaagtctgacagcctctttgagttcagccattgaaggcagacgagatagaagaggcaatatccagattggccagagagcgtgggccatgtggagcaaggtgagaggatcaggatgatttgtaaacgctgtggggagaaagtattggacgaacggctcccagtgatacgtgagaggatgagtgggtgatatgggagggtgtgaaagcatatagtcgaatgtttctgatgaacgaatgtcaagaccatagaggttaatggcttggctatagcgaacagaatacgtcgagagatgaggccgatggctgatggtggtgacgacaactcactcactttgttgactgaaagcaggttgatacatgtatatcggatccgaaaatgtacatggttgaggtcgtagatagtcccaaggaacaggactcataaagatgacagtgaccggacaagaagtcttacaaccataaatattaccatcatacgtcgttaattattcttgttctcttcgagaaattcagaaacacaatgaacaagagaatctaacgaaccattgctgctaaattcatgaacagggagcccaacccacccgctccgaagcccataccagccttcaacctctctgccctatcg

SEQ ID NO: 669 - DNA, 9161 bp, Xanthophyllomyces dendrorhous
atccttcagtccattcaatagaccaagaaagttctcccatccggtgtaccgaagaccgttctttccaggactaccaagatcccattgagtcatcagatcttccataaacatcttgacggtcgatcctgactctatggcgtcgataaatgccgttgtgtatggaccaacggtcggactggatgattgtgtgacgtatgaagaaagcagtaaactaggaacagattgggaaagcaaagagtggattgcaggatgagcttgaaagaatatttggatgggcaagtaaggccgggtgatataagggcttaggatttggtagaaagaaggtggtatctgttttgggttgagcatgatcttgtgaaagaacaaggattggtctcaagatggctagagagatagctagcagtgagagaacatagagatgaggctgcggtagaaggagttttgctgaagggacgcgtcgaggacgcgttcagattagggttaaactaaagctttcgaagaacagtgcatatacatccatctgacatcgataggttgatgcacaaggtttgtagtaaatgagattgaaactctacatagactcctaggttgtgcaccggactgtatacctgctagagacagatcaagctattcgcaagaacattctctaaacttacagaagaagagcaatacgttaggcagacaatgatatcgaggcgtccttatactccatggttcattcactgtcagtcgtttccgactgcctttgagcaagaataatatggagatgtgaacgtatggcccatccaaatgtataccgatattggaaagagaaggaaaaaaaggaagactagaatatgggtatatgcaacaacagaagagaaagctatggaacagaggataactcgccaccaggcgaaatgtaaggatacgtgatggtaacccggagcaccaggattccgaccctagtagatagatcggacagaggagagtgatgatgagtttagtgggccagttgtgaggaatgtgtgtttaaacctataatgagaacgagaacaaccccatgagtacgtgttctgaacagactacttgatagaaaaacacttaaacgaacaaggttcaactccaaagtccatactctcctggcccaaactttcacggtcttattctcagcatccacacgtgtttcgatgtcgactccgtcccaccaacattttctctgcaaggatgaagtcgtataggtgattagaacttcatgccaaacactgaaactcgaaacggaagcagacgaacagctggttttctccagaagagtagcaacttttgcgaagtcgtcatctgagcatgatcgatcgtagccacttggtcaggttttgtaggatgctgaataccggttttaagaaggacgagagcaattgatgtgatagaacatcttgatggctcgacatctcggtgtccccattcgtcctgtcgatcgaacccactgatcacgagaagatgaagaaggtaaagaaacaaaagttagtatttcactttgatgaagttgccacgctgatctatgaagaagagaatgaacctcatgcaaagcatatcaatcaaatgttgttcggctacgttgttctccttattgacgttcctctgcagagccgtgaagatttgccttctatctaaaagagcctttccagcgagtctcttcagctctatcaactcttcattcgcgtttccttccgcatcggtctgagctacacctcctttgggtggtatgacgaaatactcaagctcttctcgaagaacaataatgccttgtttctgaagcaaggggaggttggcataatcctcagagatgttggaatcgatcaacggactggtggataaatcagtggaagacagaagagattgttgagagtggaaaagaccgggagatgagggggtgccatagaaggccgtaatggcctcctcaaagaagtcaagtacaaatgaaaaggctccgggatcgaactaacatggagaaatacaaagtggtataagcaagggtgtgattccaacctttcgtcacctcgtgaacctgggataaacaaggaaggatactgacatcgacagtgtaaacgtcaccctggtcatcagaggacggattaatcgtacgactcagaaccagtccatttggaaagaggcacagcagcacactctcgggaagactcatgagccgctctctctcgacaacgaaccgttgacctcgaacatcgaggtctagtctggtcagaagttgattcgaatgcgacggatatggctggtaagactgaggttgtatagagctgatgggtgagttggtgggaggggcaaccgaactgataggtgagttggaaggaatagttgctccagctgtcgacataatagctctagcctttctgtgtgcgtgcttcttgtatggatgtctcgatgaatgttgtggatggacaagtgacggctgaagggtaggatgaggataagtttgcgaaaagataagattcaatgcgccgcttaacaccgtgtatcaactcgaccgtctccatccactcccccttcccaccaccctcctccctcctttcctccgttaatcattccatagtttattgagagccttgccataaaaccatatatatccgtcccctatctcgagaaggacatgagttttttcaataaactcgtcaatcttgccgtcgggacacctactccatctaaggagagaggaccattcgtatttgatgattctggagcttctgatgtcgtaatcgagcccccatccaaggtcttggagaaggctgtttctgagcttcaagatctcggagaaggaaagctcgagaagaagcttgaggtgtgttgatctgcattatatctttcaaactacttatcaagttgcatcactgtcattggaactatcgcgttgaagctaaatatctttgatctgatcttgatgacctcaatcctccctgaacatgcatatggttgatgtcttacctacagatgctttctgatatctacagaagcatggttgaggactctaggactaaagacttgtttcgagactcgggcggattcttagcgcttgtcagtgtccttagtggtcttcaccctcacccggagtctgaggacaccgaaagctctggcgtgttggttgatccagaagtaggagaaattcaaagaattgaggccctgaggtgagagaagatgcgtttgaacgagtgtgcgtcgactctattgaacgctatcaactaactacagatcttttactcaaataggatggttctcttgtgcctgtgcgaggccatggtggattcacccctcaatagaattcactttgaggtaagaaactctactggtctttacgtacattctatctattgcgctgacatgaaagttgtctacccaggatcaaatcgggtttgctgcattatcgtcagctatcgagctgtccgagatgcttcttccaccatcatgcgaccacaccttttcattcctgctctccttcgcattctatgacttctctttatcggatctgttcccttctatccgtcgttcattagcttctcttaaacctgcgcaattcattgatccatcggtctatcagcccataattgacgtcaaaattcaagcggttcaacacattttcaacaacctctactttcccaaaccgttactacttctcctggaagctcaagagctccttccagtcggagagttgcatcttggatacgccatcctgaaatcgctcgagcgtatctcacattccgctcatcagcgcaataatcttctcctcagtcaactttcttttgtttcgattcttctacctagagtattcgattcccctggtgaccttttgggttctcctgacgatcctcatcggccaacacttctaaaattgctgagaagggtgctagaaaccggagtatcacacgcagaatcgcgcgcaatctttcaattggctattggaaggaatggagagctagaagaagacgttttggaattaatcagacacggaatgaggagtcgttggccggggatgatcaaccattggggcagaagttggttggaatgcagaggattgatggacagagggttcggaaaggattccagagggttcacatttatggtacgattattcatctggctcaagggtcgatgagattgatcactgatgcaagttagacaattgtggtttatctacaggcctgggtatatatatctcaggtggatttccggacacctctaccacttttaacgatatcgaataccgaagagcatttgatcttccaattgactgtagatcaccatggccaagtagctcttgattctccttcaccagggtcaaatcctatctcaattgacaaggctaagttgccgtttggaagatgggtcctagtcagcgtcaccggaaagagatcaaaattaggaagcagcgatgtcggtgcgtgtcaagtttttccatttaatcgctcttgtgtgggtgactggtttgagagctaatttcaatcattttgctgtcctgttaagctgtgctggttgatggaaagcgattgaactctgtcaagtttaactaccctcaaaatggctctccaggatcgaggcttatagctcgtataggagaccgaacgacttcgacctcatcggccaaggatcaccatcgatggaatctaggacccgcttatcttctttgtgatacagtcccagacgatttggttttcctagctcatcatcttgtacgtaggctacttttgttcctgcaagtatctttatcttccttgcctgtattgactgcttcttcctgacctcgctttctcagggaccaagatattttggaaattaccaagtagttctgggccagtttttgacttacgaagcttctacatctctcaatatcttcttgtcctccgttgcccaagagtctgctggcagaacctccgatgctgggagttcccgactggttaaggctcttaaagacggaatagctattgaagaatcttctattgtctttgccttctcagctgagaacgccagggaatttgagccagatttaccggtagagacccaaggggaggtcgaggaagtcatcatcaacggaagtttgccaaaggtcgaagtggcgaaaacagtcaccagaggggtaggtctgatctttggggaagcagtggttgttaagaaccgcagtctcgatgaagaggtgtgggctttaggagggtgtgcccctcttttaagaatgattgaattatccaaggtctgttcaaagccatgtgtttgccctcaagctaccctccttttagatgactgataccacgatacctcacttgatgtgctgctattcgatcctgattctgaccgtttacagacatctgatcagctattcaactcgatttctatatgtttaggatcggttgtggagcattggagaaactcagaaggtgcgatcttatttatcacgaattttgctgttatgtttctctgatagactactcgtgtcattgttgtccttcatgaacatagacatggagaaaagccgtaagtctgaggttaacgatcgtcgtaatatcatttctgaggataacacgttccaactcatttatcctctcgaacagatgggtatgagatcatggctagactgctgcagccgaagatggcatccttaatgactatagaaacgcagcgagtaatctttcagtgcttcggtatagactttgacaaaccagagtaagcttgcttctctatcattgggtcttaagagaaaagttgacgtctgctgtcattgtatttagaacatcaaccatcaacaactctacgggctatcgtatgtatatcttctaatatcgagtagaacaatacaacacgaaacaagcagataacacagaaacgcggaacttgaatacgttcaggatttttgattctgaatttcgaattatgggccaaggcgagtgtagatgtacaactcgttcatctagctcatttccgggatcttgttcgaacaagcagattgtgtgtttcttccttatagggtttttgggttgtgtgaatcctgttcaaatgcagtctaattttggtgtttcgacgcacaaaatacagccgacggttcaacattcgacaacgcctattcaagaaaatggcgctcactaggaaattgctctttgcattaagggccgaagactattccgaaacagtcgctaaagtcttgataggtacggtattgtctgttaattctcttttgtttgagtacgatgtgaacctaacacatgactcgatgcatacatccagaaactctctatgttgtggccgacagccacttttcgaatgaggacactgttaaaccgctcgtggcatacctagtctcctcactgagtccaggtcagttctcattcaattgtcgtatcacccatccaatgttttgctctttatgcgactgcattgtcttatcgtgtttgtttctcttctgtcaaacagcatccgacactcctgtcaattatggcccagaagttttggaagcattggctcggcttatacgtaatccatcgcacctcgctaaacttcactcaaacctccctctgcatcgagtattattactcttcctctccgggtaccctaagccgctggtagtcgaatctacaatgtatatcatctctcatctattaacttcttctgtgggagacggcttcgctaaaaaatgtaagacactctgttccccagtgatcgcaatgaaaccagctaaataaacgtgtttgatcaataactttgttgtagtcgataacgagggtggattcgttcagctcagcaagcagcttgcttcaatttgggacccgaagatacatcgacttgcgttttctatcctctctggcgtatctatcgaagattatgtagagggctcgaattcagccgtcgcttgctcctatatctttccttctatcctcactgctcttgagaatcatctgagcttaatttcgcaagcagtccggatgcgctcgataagtggtggctctatccatagtagtaagcaatgagtgtccctagtttatcaagctttgaacacttttttaacctcaagtcttatgaaccttttagcttctcaagcttcaataaaccccgatgcattatatgaggacagcgagagacttctccgctcaatcatcaacctcttgactagctcacccacatttgccaagctcacaaagtcccgaaaatccgtcccggagaagcttgttgccatgtcgacctccttcctttctactactgagagctggagtggagaacctgatgcacaagtgataggcatacgtgaatctgttttcgaactactccagactgtgaacagattgcctcgtatctcgtcgtcattacagtctgatgtaagtagcgactcccaaaactatttctatcatactagttttgctaaaaaaaaatcaagatccttcttcagatacaccgcgttcttcctcccaaatacctgcatgtggagcatagccttccttctacatcaccgggaccagtgtctcaacttcagcgacgtatatctttgcaacgccgatcgacagctgatagctttgagtctttgtccgagtcgttctcttcaaaggctgataggcggctcagtctttctagacgccaaagcatggagactcgcttccaaggatctaaggaccgcaaccttgcatggaggcagattattctttccgtggtaagtctcttgaatcgtatttcccttcggacttttgatttaaaggcgctgagaatctcttcttcaatttctttcatttatataggaggctcgtcgatttaaccgcgctcaagccgaaatgaagcagcatgatgagcttgtcgatacccaagagtggcctgctctccgtgtgcgctacgaggaggagaggggaatttggccgagagtggatctagacccagaatggcgcttagatgggtctgagtaggtcaaagttcttctaaggattttgtagttagacaagatgtatctaatctcatgtatgtcggttgtcccagaggtcctcttcgacagcgcatccgacttcagcgatctgttcgagattcaagtgacggctcatccagttttcatccaaaacgcctatctaaagatcgcttggtagctgatgatttggacgagatactcagccctgtagctcaccctcctacaaggccttgggaagactcgctggtattaggtcaagatgaacgggaagaatgtcagtatcagcctctcctatatattctcttccgaccaagtttcctgattcaagcaaattggtttcttggtatagctgcgtctataacgactgagcagatcgaagagccacaagaacctgaacccatttctcaaagacagcggctgaagagatcaatggaggctggagacaccattgaggaagtacgtataatgtgcgttacaattatatcactaaaaatagcgcaactgaagtctgttttgcagtttcacaatactatcagaattgttggtgtggatgcattaccaagcttgatccttctgggtaaaaacaatatatatctattgtgagtcaagccgtcatctcgtcatcggtcccacttgcttgcctatcgactcaactcaattgcattggacttgcagcgatgggttacaacgtgctgatgatggagagattatcgaggccgacatcagctccctcgatgccttttctatacccggatctatcgctagggtagatagtgacacggatggtagtcatcgttggcgctatgaagatattgttgaatcaagcaagagaagctttctgttcaaagacgtcggtcttggtgagttgcttttttgtcttatcatcaaagtcgagtgtttgacaaatttcccaaacaattgttcagaactctacttcaaggactctctcaacttcttgttggtttttagcatcaagaatcaacgggacaccctttacagcaaactttcagctaaatccgaatctagagaaacttcttccaaaaacgtttctttgggaagtatgttcatgtctaaagtcgggaacaaaattgctactgttatcaatggaaaattgcccgaattggaagaagcaacctatcggtggcagaaccgacagattagcaagtaagttctaattagttctttggtcgggtttttttgggcgtatagggtttctttagggcagcagctgaagcgatgagctttttag

SEQ ID NO: 670 - DNA, 10819 bp, Xanthophyllomyces dendrorhous
gctttttagtttcgcgtacattgtgattttaaatcaaattgccggtagaacaccaaatggtacgcatttgtacaatttcgtgatacgtagctcgattcactcatgagttctcctttctgccatagatgtaactcaatttcctgtgttcccatgtacgtcatctctatctgtcacgatccttcagctctctgggtattagctcatatagttcctgtttgcaggggtcctttgtgattacacatcaaatgagcttgatcttcggaacccaaatatatatcgaagtgagtttgattcgaggcagtgtcagcttgtgtatccgtcactgatagttcaatcttacattgtgcttcagacttcacattgcctatgggtgcgatgacgcccgccagaagagacgctgctatcggtcagtacatcgtttgatcacaaacagagctaaacctgattgtgtatattcactatgcaccacgtagagcgatacgagaacactttggccgtgaaggaggatccattgtaagattctgtgaattggcatcgaacagcgatacacgaatacgtcttaactttgccatatctctctccagtcattacggagtacatttctcgtcaagtatgattacggccgggtttctcattcggcagtctccatatactgagatgttcaaagtgagtgtccagattcaactcacaactgaatgctcatcaatattgatctttgtccaatcttctcaggttttgcaaggcggcaatttcgatcgtgagctacattattgaagtgtctgtttcacaacttgatgtcctaatcatggtttggggtatcagtggccgatcggttgttttcatcaatccccaaagcatggatttcggcctcgagagacaacaggggtgacgttagagaactcatcgcccctttctattatggaaatggagagtggctggtaaactccaatggtatgatgatattccacacgagttgattcatcttgaatcaatgactgattctctactgtcttctccaggccatgattttggaaggaagcaagacaaccagattgttgatgacgttgaattgccaagatgggctcgagatgatccattgctctttatcataaaacatcgatctgtatgtgtccacttcattgtcgacctgggatacactctgctgattgagggctttggttgggtatcatccactcgctaggcgttagagtcgatcgaagtttcgaaacagcttcctgcatggatagatctggtcttgtaagttgttcagtatgatacaggtcaccttttggtcatttaatcatgctgttgtacatatagtggccatctacagcgaagccgagagagcctcaactgctaccatcctctttcctacgccggagctgttggtcagtagttctctgtctctggtcatcatagttatcgagacttatctttcactctatatgtctatcttgataaagacttggatgcaattaaggacccaaatgaaaggtaagtcttctcgattgcagagctgacagtcgcggttctatgttatattgaaaggaaatctccttgcaccgtgcgcgtcttgctaatatcatgacactacctaatcacgtagaaaagctgcagcggccatgattcataactttggtcaaacccctcgtaaactatttgatgcacctcatatcaaacgtatggttatgactggcaaagtcagtttgcccgtttccgcgcgattcgggatatgcgaaaatttagcgatcttgattcaaagcgccggtgagtatctacttcatcttttgttacagcttaatcgacgcttattgttcttgttcttgatctatgatagcgcctgtatatggtgagtcttggatttaaacaaacctgcacatttgccaagggaaagatattatttaacacatggtttctcccctcatttctgtagaattgagacagtcggttgctgctcttataccccacggcagcaagctaaaaccgtggccttcacaacgactacctgtccccggtcgaaattttgtactgtgagatatctcgtgaggtttctcgcgctcggcttgaaagtctaaatgagtttttcgtgtctttttcagtgaatggggttttagtggaggtggtctgaggatctattcggacgaccgaaaggtctgttgttgtcctgagttctttctctattttttcaatgcactcattatagctgacgatcgattgaaactccatctttggaacaggtcgcacacatcactgaatgggcttctatatcgacggtgatgttcatcgatgagaaggcttcgttcgtgacagggtcgtttgatggagttgtatccttctggaagatgaaccaggataaaccaatacctgaactctgtcacagtttagctggtcatggagacaagatcctttgtttagctgcatcaaaagcttggagtgtcttggtttccggctcgagagtgagtatgatctgatacatgcatcaattctactgtcttttagcggctgacaaacatctgaattttctatgcgtattagaatggaattgtgtgcctctgggatctgaatcgatcgaaatatatccgaacgatctacaacgatccagaaacacctgttcattctctcgctatcaacgaagcaactgttcgttgatttgtacactctcagcttactccaatcaaggttaacccagcttcttatcctcattcatcatatagggttatatcgccattgcctatctgtcgactgtcgaactttatactctgaacggaactttcatttgccagactcttacatcgcatccaacagatcctattctctctatggatttcttcgacacgagagaatggcacgtcctcttcaataagatctatatgtcctttatcttatgttcttactatttcaaccattgaataggtccccgacccagattctcgcaaccgggcactccaaaggaaaaatgtgagctcgttcttactcctcacaaactcgcctcgactgtattgctgaaaaagggatatgacactcgtggttgaaagtgtactctggtcgatgacggcggatgatactcctattggcgagaaggctgtctggaaattagtcccccttcggaccatacatctaaaaaagggagataaagcagacatcacctcgttgtctttcctcgggtatgtctctccctttctatacactgctttcttgttgggttcaaacttatatactcgtattttctctattatcttctcagagaatcaatatatgctggagattcactcggaagagtatacttgtttgcgctccccgatggtggagcagagaatgtgtcagaatctgtgtcgaagtgtatgaacggagaacacacctcattcgggttgttggagcagagaaaggtgcgctcatcacgtttcactcaggctctcgagagaagtaactaaatcttgttattctttatccctccatttgcatcatgaagtggtgtggcggatggttcgttatatttcgtttagttgaatgtgtaccatatagactgacatataaacgctgtgttgtctgccatcatctttctatcttgatagtggtggtgcgttctgcggaaactgctgtcaaaacattcctcgcttcgatatgagatactgtggagagtgtcgtatcgcccttgcacttgggtatgttctgtttactcgtcctctttcaccaaatacgcttgcttcatttcacacgatctcttattactgtttcattggcggtccgtccaggatgatcggagaagtagaccatgagattgatattgaacaacatttggagttcgagcctggagcctctagaacgtcactgatcctccaagagcagtctctccggagaacgtctttagtgggttcgctcgaacaccttccggtgaacacaatgcgacgaacgtctttgactctaaactctggcggtttatttccttccacgagccaaggaatgactccccaagctcgatcgcgatctcgagcagaatctccgcatgcgcctgcgaactcgccctctgaggagtcttcaactggaagtagacctcgagcgagactcagatcgccttcacctgcgttggatccgttagaaccgttgagaagtaggagtagagggagaacgagaagttcgttctctgcaagtagttcgagggtgccaagtccgttggcgacaccggctccctcgagacctcatagtcctagtccattatcaactcccgggggtgaatatagacgtccgctccgatagaagcgcgagatcttacatacacctgtgtatctattcaactctctctttctttgctcttgtcgatttatgcagtttccatctattcctcttcatttcttctatttgtacaatgccataggtgatatgatcacaatatgatctttctttcgttacggatggatggatgtttgggattcaggctggaaacgttgagctgcgaaaggctgtgcgtgcaagcggtgcggcccgagggttgcggtaaccttctttcaagacacatccgccttcgtttctttcttcaaactctcatcaccccagaaccaaacaaacccactccgattatataacatggatattgttattcgagctcccgagtacctcaagtctttccgagtatgtttctttgctctttgttcttctgatgtttcctgtcgcgtgatgctctgttcctacgaaatgctggctggtgatgtctttacatcggggcatgcggatgaacggacggacgaacgaatagatggacaaatccccatctggtgaattagcttcggagctcctggcatcctgaagcatctgtcttgtcaacatttgctgacgagagatgtattgtccggcctcttgtataacactgtaggagaccaagctgtctgctcttcgacctcttaatgaatttgtacgtatctcttgtttgtatcaacatcttgagtcaaacggatatctaaactcgagatccttctcttccttctctcgtgtttcttgactgcagtttgatcatcagaagctcagccgaccagttgatatgaatgaggctacatctgtgagtgaactttaaactcgtttttcttgtcgttcggtgacaagaagtgtgatcgctcatgcttttctacccttttcccctttgccagcgaatttcttacaacacccgatacttttctggttcgtctcgcctcagaatctcccttctctgcgatttttgccaccttccgaaacaaagcttacgtgttgcgtgtctatatccaaacaggaaactacggagttgtcattgctaccctagccatctacgccttgttcgtattcatcaacctctattttgaaacccattgatatagtatttacttactaggcatttggtttggtagaatcaccaaccctcttcttcttctatctctcggattccttgtcggtggattcatcggtatcaacaagtggggtcagtctctctttcctctctatcctagtttgatttgaatgccagaagtatatgaaggttgactcggactctgttctctatcattgatcgtagctcctgagccgtttgagatcgccggcaagaccatagatcagaagtctctctacattacgtgcgtctgcttgtcgcgcacatctatttttaccaaccattttgtcatctactgattgactctaattgaacttctttcttggtgtgtgtacagtctctttatcattggtttgcccgttctctggtggtctgctcctctctcgacatttttctggctcgttggagcaagcatgttcatcatcttctcgtacgtgtctgatcaatttctaacctctcaactcaactgagtatcgctttatgttggccttcctaaaaaaattgattctgatcgtaatcattcttcagtcatgctgctcttcttgaacctggagttgagagcgaatacgcctctgccgacggacaggtttaaggatgttggccgtagccggcgagagcgatcgctgaccgagagagtgaagcgtcggtcgtacaaaccttggactatagagaaaggcgactttcttctctttctttgttctttctgtctcttatgtttttttcttgtttccttgtcatctcttctcgattaatttgggatccagttagttagctagctatttatcttatctgcctgtctaaagagtcgtccgatctagaaatctattcaggtactcgacaacaacttcttctatctcttaaatgtgacataaggggatcgtaaatagatgaatataagaattccagataaccttaagtagaaaaatcttatcagaccccattctgaccgtcaaccttcctgcacccaaaggaaagccaaggactgactaacggccaactcttcaaagagttcgtttaactctccaccgtcttgtttggaaagtacgtacgtcgtcttttgcatgtcctcctctatttccacttgaagaccaaaaggcgctaccagaggaggagcttagcagacggcctttgagggtggtcgccgttgtcgtcgtcatcgctgttggtcgctgtcccgactgatctctttctagtagctgacctcgtcctgtgttctatcctgaacaccgttatatctttccagctcttccttcttcttttatcgctcctctctgctagtcgatttgttggtctactcgttcaaccttgccagtcgattgcccgactatttgctcgctttaccctcagaaccgcgaggtcgatcgttctgcccggctcagtcgattctcttagacaaaccagtagcgaccttcatttatatcaccttccttccacttctcttcctttctgtcttctcatatcactcttattctccatcaaattttccgccagagatgttctttttttcttttcgaagctcgtcttggttggcatcgatggtcattctgagctcgatcgttccgagctggggttctgccaagacacccaacgcaaatgcagggaaaagtctttgtgagttttctcttccctcatcgtgtgaatcgcttagtcttggcttttcatccatgacacttaccgaacgaacttgactctcattttctatgttttctccttcttcttttctcgctcttctgcctgtacgatcatacaataagtcaccaactcggtcacctactgcctaccgccacagggaatcattgtctcttcattcaatttcaagtactaccaagccaatgaggttagtccgtccgcctcttcttgcatccctcactgtgcacgcacagagtcatgcctcatatgtttcttgactaatcctcggttcttttcttcttgcatatgggctcatcttcatcatcactattctcattgaccgccttcagagtggttctttcgatctctctgtagccttcagtagtaacattaaccctgaggtgaccgcctctgttgaagtttatggcaagtaccctgtaaactggacgatatctgtatgcgacatcttggacggtgtgctctgtccgttgccgaaaaacaacttcactggtggatcgactctgccaatccccgatgagattactagcttgatcccctcaatcgcgtggtcggtaccggatctcgagatctacgtaaccctgttgattaacgatgcgtattctggagaaagtgtttcctgtcttcaggccacactttctaacggttggtcgacagaacagtacgccgtgctctgggcgagcgctgcgtttgttctgctggccattggagtgtcctggttgcacacctgtttgaactattgcagagtggacgacgccattctcgctaagcacgggccctatagtactgctactactgcatcggcaggcatcatcacgggcagctccagtcctggccaaggcagaatagtcgatattgtgtatttctttcagacgatgacgtttgttggcatgctcggaatcgactatccgaacgtctttccgcactttgtgctgaatttccggtgggccgttggactatattacgttggtgccgttcagagggctatcaacaaggcaagacatttgaccggagcaaagttgccagagtaagtttctgtagcaaggaaagaaagacttcgcgaccaatcttgataattgacatcaattgacttatctctctttcttacaaaagtacggcttacccatcagtccttttggtgaaccgaaagtcgacctacgtgcaagctattggtggggaaacgtcctcgtctcctctcgtcgccgcctatgcgctaccttccgctgggagctcaaacggatccgcctcagatagtatactctctcggtcgctgcctgcaccacatatgcttcttccccgggcggacgttcccgcaacagacacgttgaaccagtcgacagcgattccgaatgggattccggtttattcaaacgcgatcaacatctcaacggcaaacacgtggatgactgtatttttcacttggctcatggtgattgctgtgttcttggccatccatcttgcagcatggggtctgttgtggctgttagtcaagttgagggccgggaagcaaacgactggctctctaagggagaagaatgcggccaagtacgatagaacgtcttgggtggtcgatacgaattcatggtggggcgaaagattgctggccaatttccatctagtgttcttgacaaacgccttgagacttgtatgtcctgatcttgattctctctctttccattctaagccagacgacggactgaattgttgttgtctttctcccttctctctttatgctatcattgtctacaacagaacttgatgatgttcttcccgatctgcgtctttaccctctggcagttcactcttaatgatgcctggctaccgatatttctagccgctgtcgttcttgtatggactctgctctttttagtcgtcgctgaaggatcgctctcggttgcttcccgtcggtctcactcgattgctgcgaacgccggggggcgcccccttcgatcttctccatctcacgcgccttctggtacatcgtcggatgcgccttcgaatgcgacgctgacagagtctgtcggtcggatcaacagctttaccggccggctctcgatgtattcgccctttccattattccgaccggctgcatctgggttatatcaaccgttccggcgaccgttacgtctattttggcttgtgccagtggtgattcctggatttttgaaggcttgcttcatcgctttcggtcaacaacatggcttccttcagctcattgctttggttgtcatcgaggggctcacactggtggcattattggttgccaggccgtatacatccaagaaggcggattggatcggagtgctattggcgttattcagattggtcggtaccggtctgccatttgcgttcttcgacaggttgcacgcgggagggattgccaagacagtgatcgggatcgtctgtattgccgtctggggtattatggtcgttatcctgttcatcggtgtttggttcaatctgttctggggtatcttctggaaacggcattatccccaagcgccggtcgaggtcgaggattttgtagctaccgatcatcagggatttatctctacaggagggattgaccagtcggaaaaggtatcggacgtgccggctgataggttcatcgacgatgacttacgggaacacgggtatatggacgagtcgatgaatgtctctgaggatcggtatatgaacgagtctgaaagatcgatggagaacaggtatgcaggcgaatccgattcgatcaggcctttctctcgaccagaggagccgtctccggtttgggccgtagaggacgagaggagacagacaagacctctttaactatgggattaggcagacccaaatcctgaatctatccctttcgcttgtcattacgtagatgcgcattctttttccttcccctctccctctgttcttcccgatcaagacttctgtttcttcttattttcctttatttatacaaaaagaacctagactgaacagctcagaaaggaaggggaagtaaaaagctccgagaccagaagaggatacgctggctcgcttttcttttcaccattttcttttgtacactgttggcatcgtcccttctatcttttctttccttttctattattatcctgtatttcatctcgtccattggtcccacgctcattctcaagtttacccatagatgctcattcctcttgtctctttcctgtttatgaacgatctttgttatgaatcccatatctccatattgttcctctttcctttttgttctgtctctaagctatgacaaatggagctgtatatgaaatactatacttgtcgaacaaacttaaagaaacttcaggaaggcatcgggcgagaccgatataattaaaagaggggttcggcgtctttcatcctctttcgtgccgagtggtgtgtgggtgtagtgatcctggcgacgtatcgcctcgttcgagtagctcaaaagaagcacgtctatcttgtccaagtatttattctgtcactttctgatcgacttatgttgaactgggacccagcacgatcggacgttgtttaaaagaactcaacgatataatggtcaactcggtcgagtccgaagtgatatcttttgtttgttcgataagtacacatccataacgaaagaggcgttctcgttctactcctccgcacacacatatatacacacctgctttcggtcctcttgccggacaggaatcagtttcgtccaaccgcggttccctcttggtcgatcagatcatccttagtgcaccgaaagcgccgaggatcaagagtctttagtcggaccggaccggcagttctatttttagatattatctatcctgc

SEQ ID NO: 671 - DNA, 2423 bp, Xanthophyllomyces dendrorhous
gactacacaagtccctgtagctgccctgttcctagacagatgtcatccagcctgatcgacagacgtcgtgcaaggttcgtctgaacggcaaaaagaatggaatttccgtcggccctgacagtctagatctctacttgctctttccgagcccacccgtgtaaacgtagaaagctggaaagcttccaccgatcccgctttctctgacgctcgccgcacgcttccgtcgggcgtactcgcgcactcatcgttggaatctaaactctctccactcaaaattcgcccttcacccgcttcgccgggcggatcgctacggatagaggaggacttggaggaaaccggatggggaccatgtctctgagagaaaaggtacttaagtcggggtttcttttccgttcctcgttgcttttatctttctcgctcttccctttcgatacacactcccactcccattctcgtttctccctcccacctacccttctcctaatctacagtgaactttgagatgagtagtgagaagtatttcgaggatcagaagactgttgctggtagcaagctcgaggtgacacatatcgagagtcaagaaccacacagacatgtcgatcttgcccataatggtaagctttttaccctgcccgttgatctctgattcttgctgtcgtctgggttggaattgacgtcatggttccgacatgtgtcgtgttcggatctcgttttttttttttttcctagtaaacgcaaggtaaggccacatgttgaactctttatctgagcgctcggtttggtatattgattcttctgcttcttcttcttcccctgcgccgaacagaattcaaaacccgctctatgggttgtcgcgtgaacaacttcagcacagagtttccaagtttgttgcgcagcataatatggaggttagtccgcttatacatgctgctctctatggcgcggtttgtttaactctttcccctcgacgccacatgctgaatcaccgcatgaccccttctgccatttcttggcttccaggatgaagcgttgtttcaaaaagcagccatcctcgcacagaacccaaaggattgggagacccaggaaagtctgacggaggaagatagatatcatctccgacgagagatcaccagtgagtctccgatcgttctgtgtttcgttcatgaaaacgctttgtgctgattgttatctgcaccaccttatcagacaaatggtcccagccgatggctctttatatgaccgttgtttgttgttcgttggccgctgccgttcaaggatgggatcaaactggttcgaacggtgcgaatttgtcatttcccacagcactcggtattccgaccacggcagtaagtccagctcttctatcgaatagtcttatccgtttatccgttggttcaagagcttcactcacggcttctcctgtcctctcccacagggcgctcctaacgccgagagaaacgaatggatcgtcggagtgatcaattctgcaccctatcttgcttgtgccggtttttcgtgctggatgtctgacccgttgaacaactggctcggtcgacgaggaacgatctttttctgtggtatcttttgcacgatctcggtcattggaagtgcgttcgcccagacttggccacaacttttcatctgccgtctgttacttggtgtgggtatgggtcccaaagcctcgaccgcgcccgtctttgctgcagagaacgtccctgccagcattcgaggtggcctggtaatgagttggcagctctggaccgctttcgggattttccttggattctgcagtaacgctgcagtgctcaacacaggtaccatcgcctggcgactccaacttggctcggctttcatcccggccgtcccgatgacgatctcgatcttcttctgcccagagtctcctcgatggctcatgaagaaaaacaagtacaaccaagcgatgaagtccttcctccgacttcgaaatagtcccattcaagctgccagagagcttttctttgtccactgccagctggaggaagagcacgatatcatcaatggaaggacctacttcaaccgacttaccgagctcttcaccgtcccccggatcagacgagccactctggcctcattcgtcgttatgcttgctcagcagatgtgcggtatcaacattattgccttctactcatccactatctttgccaacgccgggtactctgacaagcaggctctcttcgcttctatcggtttcggtgccgtcaactttgtctttgccttccccgccatcttcacgatcgacacctttggcagacgagctctgcttctgctcactttccccaacatggcctggactcttctggccgccgggttctgcttctacattcctgaaacttcgaaagcacaccttggtctcatcgcgttcttcgtattcttgtttgctgcat

SEQ ID NO: 672 - DNA, 17689 bp, Xanthophyllomyces dendrorhous
ggttgcatcagaaaattaccctaagcaaacttaaagagccaaaagaataagaaacgagcaaaagagaggggacaaacaagcctcatcaatgatctttgccgttggctttccacctccgtgacctgccttgacatcgatcctgatcaccaacgggtttgggttctctgccagggtgtgctgtagtgtcgctgccatcttaaatgaatgagcaggcacaactctgtcgtcatctatatgcatatcacaccaagtgtatcatcagaatcgatctgatgaacgggtttatcttcatccaaagagaggaaagtcttacgatcggcagtggtgatcaagtacggaggaagaacctttttcggatcgatattgtggactggggagataggtagaataaagtcaaagtcttctggcttatctggatttccatagtccgatgtccatagtcgaccgctacgccggataacatcaatagaacacgatcgatcgaaaactgttcagtcaacacatcagacgaaagaacagaggtgaagtataatctctgaacatacatcgtccacttgtggaatttcaacagatccaacacacccacgtccgccacactcgctccaattagtccgtctctcgcctgattggtacaagcagcgactaggagtcctccatttgatcctccgttcatgattatctttccttccgaggtatacccttctttgacgaggtactcagctgctgctaaaaaatcgtcatacgagttttgtttcttgtcgagcacaccatccgtatgccagccgtcaccatactctcctccacctctgatgttaggaactgctaagacacctcggtacttgtgcacccatgtcatccaggtgacgctaaatcgagggtcgaggctgatattaaaaccactggtgttagataggaagagaaaagaacgacaagatcaggtctgtcaatacttctctagatgtatgtccagttttagagatcagatcctacccatatccgtagagcatcagtggggcggatccattaagcttgacgtccttgtgtcgagtgattgtcacctattcgcgtgtgcaaatcatgacggatgtcatagttagcaggaatattcccagagttgtcgatgaaaaagatatgacgtacgggaatcttggtcccatctttgctctcgtagaattcctagtttcaagcgagacccacacacgatgagcttgaggggcaatgttactgaatatcgagaaattactcacctgaacagagatgaaatcgttgctctttaattccatctttgtctccttcaaaagttcaacatccttggattcggtctcgccctttgttgagtaatcgaacacatacaccgcaccagggtttgtgtaactggctgtaagatatagggaggaaaaaacctccacatgagatgttgtcctgctcttccgatgcacctttcatagaagaggaggcgcttacagatggagaggaaaaacttgtcatgctgtcgcttgcatctcacacccgacacactacctacgaagtcaggaagcagtctcttgattttatttcccttaagatcgtacaaataaagttcatccttgacctggttggttggttgaaaaatcaatcgcgcgtaagtggtatgttttggtacctcacactcttagagagcgcattgacaggaaagtgattttagttccgtctcaagcgcgaggttgagacttacatctcgagagtaaacgagcaccagtgaattctcgtttaccgcggatatactgctcaacacggccttatcatcttctttgatcaggtcctcgaacacgagcttgtcgtttgagatgtcacacgtctgaatcttgtagtttttggcgtccttgttagtagagaagtaaaatttgggaccatcgttggcaaaactgatatgagggaacaattagagcaaacataggcggacgagaagtgataaatgaaagaatcagtggtagtagcggcgcagaataaaagtcttatatttgaagtgagagaagagctgaccaagagtaaatcgacccccattctccaacgatttccctccagttgaggttcttataggcctcgccgtttaagcctccatcgccaagctcagcgacgtgcataagcgcactggttgatgtatcccttgccgtgctcagaattgcgtactttccatccgtcgtgctagggcatgagtgtgtttgccacaagtgaacaagtagaacaaggaagatgaggagctgagaagcgacatcagtttggatgaaggaagagagttccttacacttgtaacccaaagatgtaggtcggctcatctgggcgagagtagaccaagatgtctgtcgattgatcggttccaattcctattgtcatccgatcgttgaagttcgtaaacaacggacagcatagatgagcagactatcgagagtagctgacgattcagaactaaacaaaggtacgaaacggtgatagtagatcatagcgttttgatctgacgcagtggccgtgccaaggttgtcgtcggaaacttcttgggggaaccgttggtagaagaagcctttgtcgtcgtgcgtccacgtgctgtattgatgaaacggaggtgcatgtatacatgaatctatcagtcgagaaatactaatcgagccggaagagagtcagagatcgggaacaaacagtgagctgtgcttgacaaattcaaccttgtcgccgagctttctggcatcgtccacgccctcgaaagagccctcggtcgatcggacataagcggtgtaccagtcagatccagatttggagagtccgtaggcccagaatttaccagacttggagaaagagctggctgcgagagaaattgtaccgtcttctgagagcaggttgggctgggatgattgcgcacgagatatcatgagtatcagcttttcggttcaggtcttaatcgaaagatcatactcacatcgaagaacaattctccaaacgggccttcggaggaaccatagttaggtagctcgcttttgttgaatcgatagaaaggatactggttttgaagactgtggacactaaagatcaggtacacatcaaccatcgagtaagtgtgagtgagaggtgaacggacccagtgttgtaggacatataatatcttccgtcatccataagagctggagcggagaatttggggtagttccaatttttggtaagcgcttctttgaaagcctgtcggtctgggttctgagccatggtctgttcacagaactcgacctgagcgtcgacccaggctttagtctcggcggactcggatggagggacctcgagccagtgataggctgtcagggcggattggttataagaaagaggacagggagagcgaagacgatgaggttgcacacataagaaaggaaccgatcgttaactagctagcatatagagagctgaagaacggaggagatgaaagaaaacatggaggagagcgaattacgaacgatcttcgatctcaactttgcctcgcttagcactctgatagatgtcgacatggtcttcatcccttcgtgccttcggatagggagtagctgtaggatcgaaagtggggatggaagtagaagaagccatcgttcgagttgcgagtaagagtctaaagggagagatcggacaaacagaagacagtcgatgggaaagactaagatgggatacaagttgtcgagctggcaacatgtggggaaaagtcagaagattgatagagtggaagattgatcgaacggagatggctcgttcaggcacatgtgtattatttgaatcaccgcgagcgtcacatcacccggtattatctaatcaggcaccgtctgttcttttggtcgaggccgtcttgctatcgtcggggtgtgttctatatgatcttttagagagagacatctctagagaggttgttcaacgcgagatcggactgtgttaatagaagtcttcatgtcgaagagaatgcgatccgagacagattctggccatttcatacttcgctctatctcttcttctgaaccgcttggcgcatttacgccgttgagcgaacgcttcgtcttctacagcacgcttgtctccagttaaacctaaccgactggctaatagtcctgttgtaggtcagatagatttcggtccttcaagtatgacaatgaagaccagacggtccgagttcagtggttttccattggatctgatcagatccacagcttgagctctcttgccactgatgctcccagcacaagagaaccatgaacgagggttcgaccaatatgaatcgtgaaagaggggaatgatgagaaactccggagaaggccacatgttgtctctctgccaagcatgtataagcaaggactatgaaaaagaagacaaggcagataggtccgaggaaaggatcaaaaatccctgcgggtgtcctcggaagtagggaacagatacgtcatgtttaaaaacatggtcggtcgatagtcttcttagcggaaacgacaacaactcatcaagcatcaacttctagtgtcccctgttttttcaagccgttctattgctgtcgaccgagtcaactgactgtgaaatcgctgttttcgtaaccatcttgcttttcatatcaattctatgctcctcgctttcttctcgcggcttcaatctgtcgcttctacctcccctgatataaagcagtccttgacaatgtcgcttttagatcggaagcgttctcctcgatcgataagatgcttggcattgttcttctctttctatcgttctatctttctctcaagctgttctgacacgggtatactgcaaagagagaagcaagaaagaaagaggttctgttgccatcctaccggtcaatctgaccgggtgcatatcaaacaggatagttctgacaagacgacccgaccaatacttaagctcaagtttcgatagtcgttctacttttcctttcgttctttcactcccccataccttatcacttcctctttctctcctcattatgactctcgaagacaagtttgacgaaccaaaggcgatgacaggcgatttgtccgaggtggcgcacatcgagactcaacggccggctaggcatgtcgatctcgcccataacggtatgttttccttcctcagttgaaactccatctgacttgcacaaactaggtcaggtttaactagaacgttcttcccaatcctgctcttcactctcgattttatcagtgaatgctaggtgagcgcgcagatggccttcgctatacacaacggacgcaattgaccgagctgcgttcctttcttgttccgatagaatccaaaatccgctctatggattatcacgcgaggagctgaggcacaaagtcaagaaactagtctcgcagcacaatatgccggttagtccgaattatccatttagtcattatgaaaagccaagagcaatatgacgaaccatatattcgcccctctcaggacgaagaattgtttcagaaggcagctgtcttggcgcagaaccccaaagattgggaaacacaatcggatttgaccgaagaggacaggtatcacctcagacgagagatcacccgtgagttcagagcttttctttcatattcttctctttcttcggtctcttcgtaaattgaataagctgatacatctcttcgtcactgccttttcagacaaatggtctcagccgatggcgctgtacatgactgtcgcttgctgctcgttggcagcggccgtccagggttgggatcaaaccggttccaatggtgcaaatctctcgtttcccaccgcactcggtatcccaatttctgaagtcggtaatatcatgattcttatatagcaaactaagctcacaacccaatcccacgcatctcgtcttttttctaccttctctcgcgctgcagggctctccagatgctgagaaaaatgagtggatcgttggaatcatcaacgccgcgccctatatcgctagcgccggtttctcctgttggatgtctgacccgttgaacaactggctcggtcgacgaggaacaatctttgtctgcggtatcttttgcactttgccggtcattggaagtggtttcgcccagacttggccacaactttttatctgtcgtttattacttggtgtgggtatgggtcctaaagcctcgaccgcccccgtattcgctgcagagaacgtccctgccagcattcgaggtggcctggtaatgagttggcagctctggaccgctttcggaattttcctcgggttctgcagtaatgctgtagtgctcaacaccggtgacatcgcctggcgactccaacttggctcggctttcatcccggccgttccgatgacgatctcgatcttcttctgcccagagtctcctcgatggctcatgaagaaaaacaagtacaaccaagcgatgaagtccttcctccgacttcgaaatagtcccattcaagctgccagagagcttttctttgtccactgccagctggaagaagagcacgatatcatcaatggaaggacctacttcaaccgacttaccgagctcttcaccgtcccccggatcagacgagccactctggcctcattcgtcgttatgcttgctcagcaaatgtgcggtatcaacatcattgctttctactcatccactatctttgccaacgccgggtactctgacaagcaggcgctcttcgcttctatcggtttcggtgccgtcaactttgtctttgccttccccgctatcttcacgatcgacacctttggcagacgagctttgcttctgctcactttccccaatatggcctggactcttctggccgccgggttctgcttctacattcctgaaacttcgaaagcacaccttggtctcatcgcgttcttcgtattcttgtttgctgcattctactctcctggagagggtcctgttccgttcacctattcggcagaggtcttcccgctcacacatcgagagttgggtatggcttgggctgtttcgacctgcttgggttgggcggccgtgctatcaatcaccttccctcggctcttgaccgtgtttggctctgtcggtgctttcggcttctacgctggactcaacatcgttgcattctgtatgatcttcttgcttgtcccagagaccatgcaacgaacattggaagaactcgactatgtgtttgccgtcccgaccgcgacccacgcgaactaccaaatgaagaagtccctcccttatttcttcagacgataccttctttgcgataagaaggctaagcttgagcctctatacaactttgacgaggttgagtcgattactcacttcgaaaaaggttccggtcattagaggattttttcttcttttttcttcttttttcttctttttcctttttttctctctctatctttcgcctctgcgtctgtcttttctcctcgttcgaaatccagtttttaccctactctgagacccttgtctgctctcccacatatcattgtaaaccaatgggctatacctttttgttcatgccactcgcttgggtcttctttctgtttaatgtaactcctttctatgtcaatcatatgtattcatgatgtactcctctcaattctcatctagttatcaagttgaagtgaacaagagccggtgatcactctcaacctgaggttgtcgagcgtcaacttagatccaaatcgagagacatgaacttcattcttatcttacgacgacctgttcttcttcacttacaggaggaccaacgccgttccccctgtcaccgccctcgccttcaccggggacgggaacggtagcagtcatgaccgatactggggtcgaaacacctgaaacatctcgagaactgacagccgaagcagaggcagaaacacctccggccccggcttctgcctcggccagtttttgccgttttcgggcggcagctttgattcgttcggctgatcgggtggccaagactgatgatgtctgttggtctgcgtacctgttgatgtcgaaaggttgaattcaagatgacaaaccggactatgtttaggcaaagagtgcgcatacaaagaaagagagggagggggggggagagaaagaagaagaagaaagcagagaaagagaaggaacgaacgctttgatggcggagaggatgtaaccaccggttccactcatcgtcatgaacggatgagtcctcatcggcaagacctgatacttcctcaaccaagattccgttaccgtcgggttcagataggtaggttccgtccttaggatggcttgtacgtcagtcaatacttgaaggtagggactgtagacgacgatgctggatgaaccggcaaggtatttcgagagtttctcgatgattgagtatggttcgtatgggcaggcgatcaccagtctagtagccgttcgtttttgaagagttgagagagagagagagagagagatgaagaaggggaaagtgtgagtatcatggagaggtaagagggatatcgaacaacaaggaacgaagaacgaacccatcccattcgccggcaaaaagctcctctctggtcttcaggagctcatccctggccgatctcttcttcttgatcctcgtgttcttcccgccgccgacatggcctttctcagccgccttgattaacggtgtatccagatcatcaggcggcgtccagctctcctcgacggtcatccagtttaatgagcaagtcgtctctgccaacatctcctctgggaaattcatctgggcctgtaagatattgagcgacggtggagaatccgtatcggtgatcgtaagaatccggcctttgcctcccattcggtcgagcatgccgcccacgatcagaccaccacagtcatcaatcacgatgtatcgccctccaggatggacgtttccgaacgagagcatctgggcaaaggtatcttcgcgcatgcccatcaccgtaggcgcgaaccgagcgttgtggtaggccaagagagagggaatcgtgggagccaacggccggaacgtcttggagtatctgttcaaccagattccaaagaagttttggcggatgagcttgatttgtccggtataacggacaaagaagggcaacaaagaaaacccgctgacttttgctcctttcgctttttgtacttttcttgagagtatactgtcttgagatggaacgacgagtgtttcgcgatttgcttggcgataatatcctgttggatatacatatgataaaaacacaagaatgtcaagatgagctcgtccatcctacgtctgtatagacaccagaaaatgaacaccatacctgagcgctagcgccttcatccttgagcttttgaatctcttcgctggataagagttgttgttctgttccgtctccgattagctcgttcgtagccatggtctcctctagggtgatggcattggtagaaacatgttagacgtcagaaggacatatctcatggtgaaacaaacgtgaatgagaaagacgttgtgggtaggacaatggaggggaagatacttaccgacttcggtgatcgattctccttgaagtggcttcaatgtagcctttcctcctggctctgtaggctcgacgatagcgtatgtgattccatagagcagaccgatcagagcagacacagggaacgagccaaacttccctagggagaccgttcttaagatacagaaaaggagagagagaggtgaacaaacatgaacaaaacatgagcgcgcttgcttcctagcagagagggatgatgaaaatgactaacttttcgcccttgacctcgaccatcttcatcatggtactcggcaaggccagaatcacctggtcgccaagtctaatgcgctcgactctctcggcgagggccacgtcgtactttcccggctgggtctacacacgaacgagggaaccaatcgatttagacagaaatgatcagcttggaatgacgggacaagatattcgccagagaacatcttaacatacggatgttctggaggacgaagctactggctggttcgagctcatccttgcaatataatcgtccaaggaatgaatcaggagagagtaggcggatgcgtgtgtatgtgttggatgtgagcagaagggatgaaagccaaaagacttttttttaaaactctgaattttttgtcataatctcgtattgaattttcgtagtcgattggaaaattcgtctattcaacttctttgcgttctctgctcactcgacatccatcccacacatcagacgatacatcagacaacatggcttctgtcccctccacgacgaggaacatcctcgcttccttgttccattcgagctctctctttgcatcttcctcagcttcttcttcagccgcggtcgttcgatcggcaacactgtctgccccgctcgctccttcgccgagtatttgggaaactctccagggtctttggggacttttacctcctatcgtgcttgccgtgcccaagcagcgaacgtctcactctaagaagcggttgagaagtgtcaacaagcagcttgatcgaaagaccagttagtatatcacgttctcttcgtcttttgtctctctgctttcatcgttcttcagccctttgccaaatccatatccatcacggcctgttggcttctttcgatctttctcttctctttgttatattgtttctttgcctcagttgaagcgtatcgcgcgtataaatgtttttttttctttgtttgagctgttcactgacttgaacgtatgcttgttcttctcgtcctccgtgttcccaaccttcttcgcccttgttggaattctcttgtcttgattcggtcccgtcttttcactcacaccttgcgtcaaccgtctatcctctcaaaagacatcgtcacctgtcctgcctgtggacttccaaaactatctcactcgatctgcagggtatgtctatcgtcgataacccgatcactcaagaacgaacaaagagtcaaggctcttttggaaggagaagaggaggcgcctgtgttggaccgtgtggaagcacctttggaggtagaagcagtcaagaaggaatagttttctatggaagctagagagaagagcagagtatattaaaagccagtctttacatcactgaaagaaacagaagaacacggtcacgcatacagaccatgcacacagagaaaacactagagaacaccacagaaaaggaagatagaaggactaccacgtttattaggaaacggcgtagtccgagtttcgtatttctgcctttcccttctttctgttaagcacccatccgatcagacaaccatcaccatcgtcatacaacatgttctcaaggaatcttggcagaatcacatgcagtgctcgcgtcggtaagtatggtctctagatcacaggtcgatgtgcctgtctcttggttgcaagtgcggcagcattgaacgtaacctatccttccctcgtctctctccgcatggttctctgctccctagcttctcagaaggctttctcgtccgcctccaaagctcaatcagcccaggcatggagatacgctctcggaggaacctcagttgccgtcggcgctggattaattgcttggcctctacttcaagtatgtttcactcaggacagtctgactttcctgcttgcctcgccaccatacggaatgagctgaacatcctctttctcctctatcggttggtgttgggaataggaaaacgtccgactagaagcaccggcaactacccctagtatcgcatctccggttcctgccaaatctttccctatctcgaatgtccccatcgtgtgtgcttctatgttgactcttgaacgcgtccttataagaaggaggacttacgttgttaatcaacccttttacttttcttttcctattctctaaaagtcccctcaatatactgcaatggtcgattatgttcggtctctccagcaacgcattacgagttcgattgaatccctcgaagcggctcatacgccttctgctgattcgcctgcaaagttccttcatgattcttggtctagagcgaatcacggaggggagggcatgtcttgtgttctcacttcaggtcggatcatcgagaaaggaggcgtcaacatctccatcgttcacggactccttccacccagagcaatcgctcagatgaaggccgatcattccgtcttgggctccgtcccagctggaacatccctgccgtactctgcctgtggactctcgcttgtgctccatccgaaaaacccgatggcacccacggttcatatgaacattcgatactttgagacttatcacccggatgacctttctaccccgctcgcatgttggttcggcggcggatccgatctgacaccatcctatctgtttgaagaggatgccgttcactttcatcagacgttgaaagccgcttgcgacaagcatggggagggctactacccgcctctgaaggcatggtgcgatcggtacttccaactccctcatcgaggggaaagccggggtattggcggaatcttcttcgatgatctagacccatcgtcagaaatccacaaggcctcggccaggttccaaggggaaggaaagaatccgtctggtgacgaagtgttctcatttgtgaagagcgtgggagacgcgtttgtgcccagttatctgccaatcctggagaagaggttcaacatggactttacagacgaacagaagaggtggcagcagttgagacggggccgatatgttgaggtatggttctttctttcttcctttctccactcttttatcactctgtgaacttttacgggaaccctgactgagaatatggttcatccaatcttttttctttctctcttgcacatactcacacaaatcacaccgactagttcaatctcgtccatgatagaggaactaaattcgggtaagccatccatcttactaaaccgcgcattttacgtccccgtctgcctttcggaacatcaatatctcatcttcaacccttttgcgatgaccccctaggttaatgaccccaggcgctaggatagagagcgttctgatgagtctcccattgacggcccgatgggagtactgtccagagattgaacacagggaaggctcggaggagagcaagctgttgagtgttctgaaaaccccgaaggaatggatctgagagagagaggtagaaagtacgttcttttctcttttctcctctctctttctttccttctttcatttctgttcgtcaacctgcaacgtctgatcgatggcttctccccccctcgttcgttcgtattcgttttagtttgaagtttaaagatcagcttcatagacaagagggaaacgatgatctatcactatgacctgtttgatcgctttccaaagattctctagtctgtcagcgcgcaggatcctgtctgaacccctttagattgcacacgtcctttcccacagaatgtttcacgtaaacaggctagaaaaaacagtcacccgtctagacctagaaccgagatcctagtgttcaaaccccgaaactgagactgcttgaatgacatggatgatggttctcatgtgtggcagtacgagacagcatatcaggcaaaacgagacgaagtggtcgacaagactccgttcttctcgctcaaactggccggtctcatactatttggcagtctgatctaatgtgcccccgtctgcaaccatctttgctgtgattcccccagtgtccaatcttcagaaccgattcgcatcaatcacccaccacttagcgctttgaaacgaagtcggatgtccctcttagtagatcaaaccctaaaagaaacgagagtcaaggagtaatgaatagtgcttgaattcaaatatccatgtaatattcttccgtccgaaaacagagagaacatccccactcccaaacagtatccaatcgaaaagaccaaaacgctttttaaacgacggttccagagttggaagcaattcgggctgtatgaagaaggacaatagacaggatcggtcaacaaatacccaaccgaaaagagcctgggaagagacttacgccaaagatcagcggcctccttggcgacgggtccagtgatggcagatcccttcatctctcccttggggttgacctgatgcagtacgaagaaaatccaacaaggatggtgagtttacgagaacgaccgatgcatcaatcgagcaaagtataggcgtgaaaggcaagtaaaactcacgatgacaccggcgttatcctcgaagtagaggaagacaccgtctcgtcgtcgccaggcctttcgctgtcggatgatgacagcgggcatgaccttcttcctgagctcaggctttcccttcttgacggaaaccatgcacatgtcaccggcggcggcagcgggcaatcggttgagtcgagctccacatccgacaacggagataacgtagaggttcttggctccagagttgtcagcgcagttcatgacggctccgacgggaagaccgagggtcatcctgaacttgtttccggcggcttgggctgttatcacacacgacatgataaaagtaaagaaaaaagaaagaaaaaaaagaacgatcaggctctgagaatccactcgtgggtcgtcgtgttgcctagagaccctctaggacgtcgaatctgtcgaggagccaccaacggatctttcaagtaggcgggacgacaaggaaaagaacaaatcggtgtctggggtaggtggaggaagaaagagaagggtagaaaactatatgacgtgttttgcaagtcggactgcttgtctttgcaaggcacaccacacataagcatctcccttttcctccttcccacctgattcgtctttaatccttgttgttctttgacctctgttgaacccgatgatggaccacgacatagacttcgtccctttgtccctcctgcattatcttgttccgctctatatcccccatctaaacccagtccctcatgatttctctgcaaactcaaccagtcggactaacgcttggacatcttgaggagtctgtttggaaggaagaaggcaggacaaaacgacgggcacaagtcgaagggtttgaatcgaagagatcgaagtaggccaaaaggttaacagatcgggtgtttggattagatttttttgttgtacaacaagttgagttgtgaaaattgagcgattcgttgtagagccaggtttggagatagccacacgagggagaagagaaaaaagtttccggtttgaaagaaaagttgagaaaaaaattcatcagattccgttcgttctctcattctttcttcgacatccgacatggaaacaagactccttctcaagagatccgacagctgaagaaacataccttgacgagaaaaagtgagcgtctagcgattcaaacctgcgaagtcggccccctccaaaatcgaaaaaggacgcccagaatttttcactgcgactaaggggactggccctggtgagtcaaatatatgatagattagttgaattcacgatccctattaaataaggttgtgttagggttgtatctgaatttaaaaaaatggttcagctcagtcttcctcctacgtgcatatcaaaatgcacacacttcctatcattctacattgtttgacatcagccagttgtcgtctgttagactgactgaatgtatcaggataattactgatgactgtgcctgctgttgtgtcttgactgctcagagtgagaatcaaactgatcagagccgctgtacttgatcgttagactccttccatttcacacagctcccacaaagttattcgaacttaatgctgattgtgaccacacactagtgacggcatgaagactttgtggataaaaaaacatacttcgcagactcggaatacaacaacagacgtacatgaaaagaaaaagggagaaaaaggatgaccagaacgacgtgtgagatctatagtctagaaatctacaacgaatggaaacctaaaacttaagcccagagaaagaaacatagaaactgatacacctcgaccctccaaaaccctccaagaaaggaaattcctttgcgtcagatctactgacagtcgatgacaactcgagcagtcaagacgagagattgcatgtcctcgtagatcttcttcagattctccatcggctgtacctcaaagtgcgtagacacagcaccccgagcagccagatcaagcgactcgatcgcatcctgtcggttgcccacatacgatccgatcacccggtgctcgttcagcaccgtaaagaagatgttcgcgttcacgtacgcctccttcggcagacccacacagatgagcgagccatgtggtcggaggtacgacagcgcctggttgtacgcagcagcaccgctcgctacacacaccgcagcgtgcgccccgccgtcagtcaccttcttgatcgccgcgacgacgtcctccttctggtagtcgataaacacctcggcaccgtagccctcgacgagcttcctcttggcgtctccagagtcgataccgatgaccttgtagcccatggcctttgcgtactgcacagcgagatggccgagtcctccacctgtagtgggcaactatgtcagctgggcctgcaggtgcgatgcaagcagcacgtctgataacataactcaccagctccagtgacgacaacactctctcctggggcaccgccgatctgcttgagagccttgtagacagtgacctaagggcagagataggcagagagagggagagagggatagaaagacagcaagctcggtcagtccgtgtatggcgaaaagaagaaaacaaaggggaggaagagaactcactccagcgcagcagataggagcagcaaagtcgagggacagcgcagaagggataggagtcaagtgctgaataaggcaggcatgatccaaggtcagcgaggcgtatcatactaaagtactctgaagcacactatagacaccaaataatactaaccttggcgtaagagaccgcccactgctggaaagagccatcgacagagaacccgtggttcagcgccttctggcagcacgactcgtatccccgtcggcactccgtgcactccaggcacgagtccgccagccacttcactccgaccgcatcgcccaccttgagctgggtgctcgtgttgtcggcgatcgcagcgacatagcctgttccttcgtgtcctccgacgagaggaagcttgttactacgcaagagcaagagcagagagagcgcatcgtcagcacagacagcacagacagcacagacagcacagacagcacagacagcacagacagcacagacagcacagacagcacagacagcacagacagcactcactccagaggccagtccccaagccacacatgcacatccgtgtggcacaccccagagtacacgatccgcacaagcacctctcccggcttgaggtccttctgctgggtcaccggccagtcctctcggagcgtcagggggccgttggcctcctcgaacacccacgccttctgggtctctgcacagagcagcacaagacagcgcatgacggcagatgcgatcacaggagagcagagacagtcgtcagtcaccgatcgctagcaaacatgtccgctcaggcatagacaggtatataggcatataggcatataggcatataggcatgtccataggtacaaatatggccgactcactggggatgtcgtacgacgactgagacttgatggtctggttggccatgttgatgatagtagtggtggtggtggtggtggcggtggtagtagtagtagtag

SEQ ID NO: 673 - DNA, 5013 bp, Xanthophyllomyces dendrorhous
ggtggtagtagtagtagtagtagtagtagtagtagtagtagtagtagtagtagtagtgagatggaagatgggagatgggagatgaagatagagatggaaagaaagtcagaagaggtttaagccgtttaagtaggccggtcggaatccaaggatatttcctttccgttcttttccttgcatgtggttatccccaaccgggagaacaggggattggatagggatcagaattgcaaagacgaaagatggacaaggacaaaagagagtaaagacaaagagaaagcccaagtgaccacgattcgagtagtcgacaaacagatgagacgaatggtgaaaggacggaggacagaaagggatccctaagtcacccgaaggtcaatctgatgtcacaaggaaaacaaaatcccgaggagaggcaactagagcgagcaaaggcactaagttagctcgaccagagagagagagcgggaaacatcccaagatacctctaaggagggtgtgaagtgtatctgcggctcggagcccagggctgaggaggctagatcttcagggcaggctgaaggtctagaggaagcaaaagaaaaaagcttccatctgatgctcatgaggaaactcgggaccggcaagatttgaatccatcgtatgtcaggcacgcaggcaatcagtcagtcagtcatcacttggacggtgtgtcgatcaatcagtcaatcaatctctccgggtctttggtcgggcaaaaagagagagacaagagcaaggaagaaccgagtgaagggtaagagagataggagataaaattcggtctgatgaccacgcccgtatctaatcagctagtgatagtcatcctgccatttggaagtttattcctattccttccgaattcacccataagcccaagctttttttgggtgccatggaaacattggacctaccgtctcacacgagacctgcgccagcctcggctggacctaaatcactcggcaaatactttcgttcgatcagggaaagcaacaggagaagaaagagaaaaaaaaaactcggttgagaactcagactcggagatcatcaatcactagtcatcaaaaatgatactcattccatcctgtgctctttcaaaaggtcagcaggcacaaagacaatgaaaaaatcccggctgtgtacaatcaatcacagaagagaaagaaaaatgaaggtgttcatctcatcggctctttctcaactcatctctgaattattcttcatatttgttcgcgagtcgttcaatcaatttcggttcattgaagttttccttctcgggcttttcatctacttttctctgttaatactgatgtgatacttcaaacttaacgtatgatctttccatactgtcgctcgtcaatccagcgcgaacgaatcaaccttaatcaattgttcgttcgttcgttcattcgaccgacccatttcattctaaggattaaagttcaagctcgcattttggaatcaagtttagattgagatcatgaataacgaagaaaaagacgaggaaaatacagatagaaatgaggggctgaatctgtactagatgttctcttctgaattaatatataacacgagatcatgaatgaatccaaatttaaaaaaatagaaaagtatcaaataaaataatagtataggatagaagagacagagcgggagagagaattgtagggagaaaagagtgaagtagcacgaaaggctaggggtatcatgatgccgtgtatggcgtggaggtcgtcttttttttttgtagggttttttgtttgttttgttttggttccgtatgtaatatatgtaatatatgtactgtatgtgatatgatgtgatgtatgtagtagcgaacgttaaggagggaaacaggacacccaaacgaggagaggagaaagagaaatcgaacaaagaaccggaccatagaaaggaaggaagaagaaactagaagcatcaagcccgtctctttcctcctctctgaggaccgtcttcttcgtccgtctcgagccgtttgcgtttagccgaaccaggtgccaccgtcgttgttgacgaggaaactgacccacaggcctttctggcatttccactgggagccactccagtcatcagcttggttgcgtcattgacggtatagttgatgaatgagtaagctaccggtcctgtttgttccctctttcctatgctcgtgatcgcactagtctttgggcgcgatggagaagaaccagaacttccggctcgaccagaaagagctggccggagcttgatcggcttttgaagcgtcgtgatcggggacgatggcaaggaagagcaagacatcgaatccgatccaaagctctcgggggaggaggtcgagaaaggagaagaagacacaggcgtcaccgctgccatcgccaccgctttcaactttcgagcggcgttccgagcaggaatcatcggcgctttgattgtcgtaggtgctggtggcaccggcgaagatagcgaggtctcgaagacggattcagaaataagacttcccggatcgtgccatccacaaatcatgatcggtcggctggcctcgatccgtcttctggcaacgtcgacatcttccggttcggtcgagctcgtagaagcactgttgctagcggtagcaataggagtggcatccgcgccgcttacaacgaccgctttcttgggtctccttttggactttttgggaataggcggaggtagcaacgctggaaggtccgagatatgaggaggcgagagaggtgaaaaatcgaccgggccagaatataacgtggctgaggacggcctggtcgtctccttaatgtcctccccatccgacgaggcgagcatgctgatgtccaagttttcaagatcaaggcatcggagagtgtaatcagacctataggcgtccatgccgaccgttcgagattcccatgaatggccaagactttggttctcgccaccgtatccacccagtacggcaaacatcgatggttgagctgctgttgatgacgaaccagccacagaggcgccactggtaccgtcaaagacagagctgaaatcaaagttactgtcctcgcggagggtggatagggaagcctttgctggaagacgttgcctaccagcaaagttggtcgattggagcgcaggattcgaccgcgttcggtgggccgctcggaccggggtcgcatactgaactgtcggggtagtctccgatgttgaggagagcaaagaggatctagagtgagttttgatcaagaaagacaatgaacggttagcaaaggaaaattgggacatgtatttagaagcaagcaaaaatgtttgcgcggactcactctaagcattcaaaactggtgtacacgtcgagcatcgactctgactgtttatcttcccaagagctagtcccgagatcaacaacctgactgaaggagtgagattccaatccgagtgacaacggcgccggctgcagggcggccaacgagatggttccgttcgactttgcgctactgctcatcggacgcgagggtttcacccggttcatcttgttcaacacgaaagccggggttgtctgttctctctgttggagaaacggaacgttctccgcgctcagaggctgacgggatgagagcgtcggggtgaccagtcgctcgtcatccgaagacgggtagagatcgttcatcagatcttcaaagggaggagatgacggcgactctaacgcaaatggtgaggaattcgacgaggaagcggatgtcgacgagacagaaccgatggaagatgagcagagttgctgggccaggccaccaagggaggcaaagctaaacggcgagctgggctcagtgtagtatgagagtggggagagcgggtattcttcgtaccctagcgaggattcgattgagaacgacgagcagggagaatcgattggggagaagatcgaagagttcatttttaaggagtatatgagtgaggatgagagaaggaggtagcacgttcgagaagagagaaggagaaagagaagttgtgtctgtgtgcttctgtgtacgaccggcgacagttgtatagtctatcaaagacgaaaagacgatcgaatgggcactaggccacaaagaacgatggtcaaagtttcaagaagagagtgtgtgcagtctgttagaccaagtgagtggctaggcttttctttcgacgaaaaagagattcaaaggaaggagggtacgggagggacgtgatagggaatcgatgtatgaaggagagagaggatgagaggaaagaagagtttagaagagaaggagcaattgagaaagagaagaggaactatttgtttatgactgatcgagagccatgacgaccagccatgttcaagctcgggtttgtttatcccatcccaggcttcctccttcttgtccttcttgtcctccgaggttgcgcaagtgtaaagcatatgccgtgttgaatgaggcgatctacatccggctcaaccctccaaggtaggcgtgtcattcaacaatgataagccgcgtggtagtgtgtacgtaagcgaacgtggacgatggaatcaagtatgattcgaaaaaaagaacagcatacttgacggttgacgcctgggctttccgcagtcgaacaagaatacacgggccgagtgatgtaaccatatggttacgacaaaccgggcgcaagaaaaagagccgacactacaagattcgaaccagaagtaaggggaggatggcgggacagggggtgaatagcggtacggagggagagaatggtggtgcagagagtgtaagaagatatcatggaacagagtacccgagggcggcggagaggaatggagtgaatactagaacgagagagacagagaagaggcaatagagaagatcgatagagaactcgtatcaagaaaagctcctaaagcaaaggaggaatcctacgaagaatgaaaaagcgaaatgaaatagagatcgacactacaacgggactacgaaatgatggtagaaatcgtaatgacgagaaaaaataaataataataataataat

SEQ ID NO: 674 - DNA, 23963 bp, Xanthophyllomyces dendrorhous
tatatatatatatagtataaatccatgcgcagtcgcaaaacagcccgagtatgcttttaccctctaaaccgttttttgatcttactttcctccgctaaccttgttgttgctgttgccttcgtcgctttcctttccttcaagctacaagcattcacccgatcttgaagacttctctttctctttcttcttctgccctctctttctttccttcattttcatatacagcagaagatgagtcaaccttccggccgagtgtctccgcctcctaactcctatagtcaagacatcagcgatggcctcaagacggccgagctagaggtcaaggactctcttctcggagctcgagcgaccagcaggactcctgtcatcgagtcagctggaaaccctggtaggtttggttcttttcttgcaggacgtctatctattccctctctgtttgctatgccttgaggcggcttggtttgagttcctttagggaataagagatcggctaggtcgcgggaggcgcaatcttgtttttttttccttcttttatttcctcttctctcccttttttaaaaagtctttccttccttttattcttgctattacgtcttcctatcctttttgttcgaacatgacctagccaaaggcttcctctggctgtcattcgtcaccggaagtgaagccaggactggaaccgaagttgagaccacgaaagcttgctaaaatctgatactgacatccgttgctttgatgcatacacctctcttttagtctaccccatccttgcgtactgtggtgcctcgatcatgatgaccgtcgtcaacaagtatgtcgtgtcaggtgcacactttgacatgaacttcctcctgttgacgatccagtcggcagtctgtgtcggagccgtctttgctgccaaagccatgggtattatcaccttccgggactttgacatgaaggacgcaaagatctggttccctatcagtgctctcctcgtcaccgtcatctacactggttccaagagtttagtgagtgtgatctaatcggtggtgctgggcagacagaacgacggaaacatcactctgactcctatcattcatcgtatccatcatcacagcaacatctttccattccggcctacaccgtgctcaagaacggagctatcattcttactgttcgtatcatcttgcagctcctaaagcgacacaccttgcatgcttggctgagatcatttccccttctgtcttgtttatgacatttcgctttcaaataggcttacggagaggtcctctggttcggaggaaaggtcaccaacttgactatttgctctttcggtctcatggtaagttgtgcggtcaaaagccgactctacgcttagcctgagaggtgaacgctgtatgattctgacttgtcttggctgtcacaaaactagatcttgtcttctcttgttgctagctggcctgagctatcgaagagcttcgccgcgtatgtttctatttctaattggagagctttgcatcgtccaagctcttttgactgatatctttgttttgggcgatcgccattgtagctcccctactgctgtcgccgccgcctctggctctgacaccatcggttacttctggatggccatcgtgagtgacagatgttcttgtttcgttcccctctaggctcgaacgctgaccgcctagacctgattttgtattaatcgtccactgctatgcacagaactgtgtcgctaccgccacttaccttcttaccatgaggaagagaatcaagcttaccggattcaaggactgggattcgatgatgtacaacaacttgctctccattcccatcttgatcgtcgcctctatcttattcgaggactggggatcggcatccctcaacaggaacttcccctctgagaaccgaaacttcttgttgtttgccatcgctttctctggagctgccgccgtgttcatctcgtactcgaccgcctggtgcattcgagtgactagctcgaccacttactccatggtcggagctcttaacagtatgtgtattttctctgagtacattttcttttaatctcttctcctagctgatcgacggcttttcgatctctctttctttctactctcagaactccccattgctgcttccggaatgatcttcttcagcgaccctgtcaactttacaaacgtcacctccgtcctagtcggtttctttgccggactcgtctactctgcggccaagaacgagcaggccaaagaggcccgagcgcgggccgcgacggatatccctcttcacaacaccgacaggcgatagacggaagagacctttctctcgttcctttcttttccttccctcttcatcttatttcttagaacagattaatagcgtcgagggcgataggagcagaggagcgagggatggtggtccgaggatgattatagagttttccagtgtccttttctttgctctttctttctctcttctccttcatggtttaaggatcttttgtcattaagcaaggagagggaaaatcgaggcgcgcttctttctgtcttttcttctctccctctcacgcactctttctggcttgattatctttattggatgtctctctttcttttgctctttttatctctatctgactgactggttggtcatgacaaagtcactttctgacgatcaagaccaggaggaaaagaatggaaagaaggagacagatgtatctatcttttcgataaccgatccattcctcttctcgccccttcttcatttgtccttctttgctgttgctcaacatgcgacacctgactcatggctgtgtcgaagagttgtattcgatactagatatcgtatcaacgaaagattggtaagtcggcaagtaagattcggatgcgatcgtccatatgtatgatgatcttctgttctctcgttttctttctctctctctttcctttctcgttcatgctgttctgggttctttgttccatgctgtctttcttgttattttactttagagagaggaaggagatgtcgatattggtgtgggaatgggtggatggatgtacaaactgcaaggactgaaggatgaaggcaaagatgatgacgaaaccgtcttgatccagattctttccttgttctccttctttgccattagatttcaatctttcatactttttttttcgcctcccttcttctttctttacattaggtaagttgattgatccctcttgatcctggaccatgttgtgccaaagaccgagacgtcccgtcgatcgatcagtcggtcggttgctcgcccgcctataaacagtccagacgaaattatgcccctctacctctacctctacctctgtccatcggtcctcctccacgaccttcaagttttattgttgatatcccgagcgatagagtggtttgagatgaacaagacagaagagagggagaaagaaagatgaggttcagtcagtcgatgttcgtatcctacccttttttttttcttcactgggtcatatctcgactgaacctctagagaatctgtgtaagggaggtagagtttcggaaacagagtgaaacaagacaagaaactcacctccacctcgacctctgaatccaccacggtcacctccccttcctcctcttccaccacctctgcctccacgttcggaccctggacctgaacgagcctgttgttcacgaagtcgagcttggtccgactggacttgatcaaggacggcatctgcgagtcgtaggtattttatctagatgagatgaacatcaaattgagaagaaaaaaaaagggaacagaggaggaaagattgaatcaggatcgatacgtcgtgtttccgaacagcctaccatatatgactttccgacaacggcggattcgaaacgtcgaacataggaaggaaggaaggaagtaaaggggaacgaaccgtgttgcctcggacgtagcattccttcatcttccagaaccgttcaccatctgcactcgtttggaagacctcacggaggatgatgttcatgaaattatcgcacgagacaagatgaccgttgaaggtctctccgttcttgagctcgacgagctggttggaagaagaaacaaggaagaggatgacacccagatggacagagtgaaggggatagcgagcagaacagaaggaaaggagagtccacgggataaagatagaggtaagggaaaggatggaatcagtatccgaccgacaagtcgacccaataggtctggccatgctatatctcgatcatagaaacagatgcacgcgatggaagagggctgtttgtaaggaaagcgaacgaaccatcggcttgttctgagctgcattcagcagcgttaatggtaactgtgtggattttccaccagatacaccagagcacaagacagactgaatgagttactcgttcaaagaaccaacctgaaggagaacatgtactgaccatggtttgatgagtcggagagaaaacagattggaaaggatccacaaagcgaccagtgcagtgaacattggactgatgcaccccagatgcaccccgaaagcatccccagacagagaccagatgtcacccaattgagcccagatgctcaacccatatgatccccaacttgggcccatgtgcctacttgagttgggtttgctgtgcacatctgccattcacccggcgcaaacacgtgcctctgctacgcacatgaaaccaccaacacctcggtggctatatcagatagagtaagcaataaagtctctaagagaactcatcgatgacattcagaaagcatacaataccatgaacacactggctgtcggacagcatcaaattcacaggtctacttgtatgaggaagatatcgggaaccaagccagccttctgtttctttcacagagaacaaagacaacacatccacccacacacccgcacagaaaaagaaaacagattggtttaacctacggcctgcaggatgagatcaacgcctggtttattatattccatctgtgttctgtatccgaatcccatgacctctatcggccaggtagcatacatccacagctcacaggtgccttctcttgcttcttgcctcgtcgcatgtcttgctcccatctctatcggtagaatcccgccccttctgatcaaaacaatcaccgtcgtattcaaactaaacccacacatcgctcggctctccacaggcccgaccagggaagaccatcatatgatcatacatgtgtgtttgatcggatctcgctcttggaagagtactttctgttctggtcgcaaacccttgccatcgcatccacccgtctgtgtcgtacagaacggttggcgatcaagccgaacagaccccggggcacattgatatatttctttctcacaagctgacttgactggacttgacttgacttgacttgatcgagatcgatggtcacgtctgaagcagggaattataccgactgaccaaccggattaatcctactcaagcatagactaaccaaccgatagactggctgaccatgtatcgggaatcctaggagtgtacggactggaccttggggtctcaaggtcgatggaccaaaggacatgatagatccatctctctcgtcctgtacagaaagctctaggtattgaattcaatttcttcatcttttcaggagctgttcggaatgcacgaaggaaaacgccggacagatcttgaacaggttgaagacatctacaaaaggcgaacggaatccatctcgtttcctttcttcatctcccatcttccatctcactactactactactactactactactaccaccaccaccaccaccactactatcatcaacatggccaaccagaccatcaagtctcagtcgtcgtacgacatccccagtgagtcggccatatttgtacctatggacatgcctatatgcctatatgcctatatgcctatatgcctatatgcctatatgcctatatgcctatatgcctatatgcctatatgcctatatacctgtctatgcctgagcggacatgtttgctagcgatcggtgactgacgactgtctctgctctcctgtgatcgcatctgccgtcatgcgctgtcttgtgctgctctgtgcagagacccagaaggcgtgggtgttcgaggaggccaacggccccctgacgctccgagaggactggccggtgacccagcagaaggacctcaagccgggagaggtgcttgtgcggatcgtgtactctggggtgtgccacacggatgtgcatgtgtggcttggggactggcctctggagtgagtgctgtctgtgctgtctgtgctgtctgtgctgtctgtgctgtctgtgctgtctgtgctgtctgtgctgtctgtgctgtctgtgctgtctgtgctgtctgtgctgacgatgcgctctctctgctcttgctcttgcgtagtaacaagcttcctctcgtcggaggacacgaaggaacaggctatgtcgctgcgatcgccgacaacacgagcacccagctcaaggtgggcgatgcggtcggagtgaagtggctggcggactcgtgcctggagtgcacggagtgccgacggggatacgagtcgtgctgccagaaggcgctgaaccacgggttctctgtcgatggctctttccagcagtgggcggtctcttacgccaaggttagtattatttggtgtctatagtgtgcttcagagtactttagtatgatacgcctcgctgaccttggatcatgcctgccttattcagcacttgactcctatcccttctgcgctgtccctcgactttgctgctcctatctgctgcgctggagtgagttctcttcctcccctttgttttcttcttttcgccatacacggactgaccgagcttgctgtctttctatccctctctccctctctctgcctatctctgcccttaggtcactgtctacaaggctctcaagcagatcggcggtgccccaggagagagtgttgtcgtcactggagctggtgagttatgttatcagacgtgctgcttgcatcgcacctgcaggcccagctgacatagttgcccactacaggtggaggactcggccatctcgctgtgcagtacgcaaaggccatgggctacaaggtcatcggtatcgactctggagacgccaagaggaagctcgtcgagggctacggtgccgaggtgtttatcgactaccagaaggaggacgtcgtcgcggcgatcaagaaggtgactgacggcggggcgcacgctgcggtgtgtgtagcgagcggtgctgctgcgtacaaccaggcgctgtcgtacctccgaccacatggctcgctcatctgtgtgggtctgccgaaggaggcgtacgtgaacgcgaacatcttctttacggtgctgaacgagcaccgggtgatcggatcgtatgtgggcaaccgacaggatgcgatcgagtcgcttgatctggctgctcggggtgctgtgtctacgcactttgaggtacagccgatggagaatctgaagaagatctacaagcagatgcaggacttgactttgactgctcgagtcgttatcgactgccagtaaactggaacctcctctcccttctccttctcacgcgaaagggtaaggaccccggttcatcttgtcttttgtatctggttttctctcatctttgattgggttgttgtttgcgtttcttttgtttccttgttgatgtagtgtaactgtagtgtaactgtagtgtaactgtagtgtagtgtagtgtactctattctgtcttcctaatccttctttttttggtcttagttatggtcttgatccagattttgacctaatttcgatcatcttgcaggatatacgatggcacgttccctctttccgttcacttcttttctggtctttcattcttgattgtatatctgccttccttcgagtctatgttcctggtttcttgccgtctccatgccttcacagccgatgatttcaattcataataattcattcatttgttcagaagaaggtttctttgttccaagaggactcccaaggaaagctaaaaagaagaaagaaagaaagaaactcatccaagaaacaaggaacaaacccattcagaaggaaaaaaaagaaggaaagatgaaccccttcctattctatattcaattgtcttttctctttttctttctcctcttttttctttcaagtttgtttcgtttgttgagaatacacagtaatttattcggcagcgaagacggaagcgtcgatcacgtccgatatcttgaggatttgacgctgaagaaattttcagatgtaagggtttcaagggtatcaagtcagacgaaattaaaggaagagatcaaagagacagggccgcagagatgaatgagagacaaagggcaagacacgtacaacgagctgggtagccaaaaggtactgctgtcgtttcgagatcaacgggtcgtacacgtgctgagctttcatgtctgttcaacgcaaagatcaggatatcatcagctaaccaaggaacaggtgatcttgcgagagagagaaagaaataagagtggagacagggctagggccagagagaaagagagaatgggaacgaaccgttctgtcctcggcccatacagtcgatacccagcctagtgttaccctcctcaatctgtctacttttcacttcagcgagcgtctcgatcgggctcaatccagagttctcagcaagagcgagcggaacggcgtccagagcggaagcgaaggctcgcatggcgtactgctcgattgacgggatctatcgattggaacagagagaagagggcgaataaggtgagacaaagtcaagaaaaaggaaaatacacaaaatagatcgtcttacctcgtcagcagccttggacacagcaatggaggaggagatctccgccgctccaccaccgtaaacgactcggttgtcaacaaccaagttcctgacaacgcagatcgcatcgtgtaatgctctcttagcctcgtcgatgatcttttcatttggcacggcaagaagaaacccggataacgacgatattagaagagaaaaaagcatgataaagagagagaaagtaggcgtaccatcttgttagatcctctgacgaacactgtcaccgctctcgtgttggcgcactcctcgatgacaagcatcttatcccttgtcgttccgaatgaaacctctcggacaattccggcatgaccaagcttatcagccgtcaggtcctcgaaccggggaacgatccgacccttggtggcgatggcaatcaactatatgtatcaagaataatgctgaacacggtcaacttcaaaagtctacttggtagatggagaaactgagaacagacctcgatctcgggtcctccaaacccatcggacagcgggcagctcgttctgcatcaacaggtggtttgcctcgtcatcgaatccccattggcacacgactaagtttgcgcctgtgtctttcaccctatatattgaccagaatgtaaatcggaaccgccgttagcaaaccatcacacggcatcctgggatatgcgcgtgcacgccgggaagaaaaaagttgggccgaagagaaaactcttcagacctacatcttgatcatctgctcgaacttctctcgctcgtacacctggagcttcttgaactcttcgacgctctcgatgtccaacttatgcttggtcttgggtctcggtggctcgaacggacacgtcaagatcgcaatcttcgcgtccttcaccgtccgaggcatgttcggatgagacatatccttatcgacgacgactccctgaacgagaagggtatcttcgagagatccaccgactcgaccatccaccttgataagctcaaaatcaacgtctttacgctcgaggtcggcaacggagagcacggcatcgacagcaatttgggcaaacttggagtgcgctttagagacactggaaaggggattgtcaagtaagctttatttaggattatggcatatagtcgctttacacaaagattctcgaggccacatacatcttgcttcccaaactcgtcatggcagtcttgaacaagttttctgtgttgttcttatcaaactcgatcgtatcagccgttcggtcaagctcggcgacggcgacagcgcaggctttctcgaaaccatcggcaattcggatagggtgaattcctcgatcgagcaaagattcagaagcggacagaagagcccctgccaacactgtttagggtgaaaaagacaacaagtgttccatgtgtcagcctcgattctgatatttgacaaggtagcttgaaagagagtaaggatatcaaaagaaaacttaccaacgacaccggtggttccatctccaatctcatcatcctgactcttggaaacctgaacgaggagcttagcgatctggtgctcaacctccatctgtcccaagatggtagctccgtcgttggtgaccgtgatgtctccatcgggagagatcaagatcttgtcgaggcctttaaacgttcaagcagggcgagcgaattgcacaggtttgaacaaaagtgtaaagatagtttgtattaagaatgaagagtgataagcaggaaagcatgacgatataatttgcattacaggacagaaagacaaacctcttggacctaacgaggatttgatgatctatgtcatcaaaatagcaagtcagtatgtatgtcatttctaagccggcatacgtccagaacagaaagtactcacgtttgagatttgacgagcagcaaggatatgggactagagaggaagtaagcgagcaaaacattatgatcaagacaaggaagacagagagaagaaaaaaaacaagccgtcagcatatagtgatacaaaaaatctcaggaatttgtttgcaaacagaatgcttgagacatgatctctacacagatttgaacgctcagagcttcccagatgtcgaacagggattttaggaagaaggtattggagtaaaatgcaccttgatggcctcgtttccttgcaatctggtcttctttgcttgctctcgaacgatgatgaacggtctgttttgtttatcccgacaaaatcccaaacagcaagatccagcccagtggaaagcagatcaggtcaagaagaacgggaggtgagttgacctatcatcaagtaggacaaagagagaaagacgatgatcttaccttccgtactaggagttgcaaaccaagtacaaaagtgaatattggaaaaaagaaggatgcccaagaaaggaaaagaacacagatcaatacttgtaatgaacctgacagggtgattcaagtgcggtgaaaagcatgcttacctcatcagtagtgtagactgcctgccctggatccatgactgaatatcaacgagaaagggaaaggacgaaggagaggaaggaaggtgaaggtcaagagaacggtatgaaaggtgatgaaaggtggaagtcgctatgggcgattgaaaggttgggctcaaatccatatggttacaactctcgtggttagggttacggacaccgtaacctaactgctgacataagtcgagctcgcctggtggtttgtctggaggattggacgaagctcagaggacagggaagccagacgagagtcatcttgagaccattggattggagggttgtgtgttgatgttatatttaggagtcgcgtgtcagaagagggtttgtacagatataccggttgtgtgtgggtagcatgtgtcgaggttaccctattcgaaggatgattctagtcaaaagacaacaccaagctctcttcggaacacagacttgattaagtgatgtttctctctctctgtgcgcaaagacggcacatgttagattcctgatagaaatatagagaagatgccctaagtcatcggttctatacgtcctttgttgtgctggaagagccaaaaggaagatgtaaacccgttgggggtacacgcgcgctctcggacggacggacaggctgctgatgtcatccgataggttcgcttccatctactggatgagcagcatacgtaccccccttgtacgccttgaccctgaccttgaccttttcttgtttttctttctcgagtgttgacttcgccctgctcgctctttactctcctgcctccttgtttctgttacttagtagtagaagaatacgaaagaacaccaagaaatagaataaagattcgcgtggccgcccgaacaagatccaaggtttgttcattccttcacgttcctttcgcttgcttttcttcatctaattgtttgtcgattgatctgtcagtacatacacatataaaatcatacaaaaaccatggttaagaaacttcaagtgctcgtcggttccgacaggtttcatgtagaaatccctcacgtcaacgacgctgccaggccgaccgagatcgatacgtgggtgttgtgcctgctcctcttgttggttgaccatccgaggacgaacaatattctgaactcaacctctctcacttcgttttgattcacagcgataagtttgtcggtcgagtccttattagaatcaaagacttctcagggtgagctctctttttctgttatttttctatcttggcgtttcatccaaatctactcctgagcacacgcaccgatctcctcccgggctacaaatatctttatagaattacacctaacggagaacctcctgttcaagacgaagtatactttgccggacggagtcgaaagttctccattcagatcgaaggtagattcaagcagagacccggcgtcaaatcctacgattatgatgaggttagaatttctttcttggtctgtatcatcttgacgcgtcactaacacatggtatcctcatttttttttcttcttgctctgcacagattcaattcgggtcgtgagcccttctattatggtttctttcaatggtcttggaaatgtggcccaggactgaccacacgctaaaatcacatcactagggattttgaccgactcatcgattttccgaggaatctcttcaacgctggcatgaaggtcgcccaatggtgagtgtatatgtatgcgcgcatatacgcgagcttcaatgatatggttaccgtttgactcaacgggttcactctgctcgctttgtttgaaggatcgatgtgagcgccctgttcttctatggtacctctacaatacaattgggccctgaccgtgtttgaactctcacagccagctacgttctacgaagaaactcctccaaacggtcgaccttacatcatgttagtaaagtcgcttgcttcataatcacaaacaagatatgaaccaaagatacggaaatttagaagtctatgaatctgatgagttgattccctttctgttccatattttgttcaggtctccttacgcgtatgtcgctctcgtttcaatatcggggcagctggaacaaaattaactcagcatgtattacttcaacccatagtgcttgtatgaatactatcgccgcttggcctgctcctgatcgagcacaggatgctgtcgtagtttgtgagtctgactaccatcattccttctagcagacttctccttggagttgatcgtctgatgcaatcttcctttcatacgtgttaatagtgaggcacacagagaccgagagtgacggtgcgcttaagcacaacgaggtatcaatctggctcatcatcctgctatatcttttcttgcgcgctgtcttctccaacttagactgattgtcctccaactcttcactctttcctccgcctcaacagaaagatgtcccgcctggaatggaggatctgattcccgccgcacgggtcgatgaatattcaaagaagaacagacatctcgtccgatattggcggttcttaggctttaaagtctgtctgtcttcttttgctcttttctagatgagctgcctttccttcaaccaatttcactgatatgttatccttgaaactttcagagcgaccctaaagttgcggcctggttgactacaaacgcgcctcacatcctatcgactccttctctccaaggctcatcgtcaggccctcctaagctaacgcacagagattcccttggcgctgtccgcagagcggcctccccaggctcgccaggttctgcctctgcatctggaacaagcacgcccacttcgcccatcatgactgacaagaagaagaccttcggattctctggcctcaaagccgcgcttaacggcaacggaagcagcggtggaaacggacgggtgaagccagaggatgtgacgacggccgataagttgaatgccgtcccagaggaatccgacaagatagttagcaacaagctagacagccagctggggccttggaagtttgctagtcctgggatcgatattatcgaagtaaggaccttctcctctatcaactttacctctgtccacagattgacatttctgatctctttgcgtattctgtaccggctccaggacaacacgttcgtgttcctcaacaactcaatctcgacatccaagcgaagaaaattcttctgtgaaaacaacggaaagaaccgaaaagattttgtgtacagcccagacgtcgtctatgctaccagtccgtctcttcctcttgtcttccatcttcccttcgtacgtggttgtgtttgagatattgctactgacggtctgaacgccgaatgcatatcccatcctaggtttcttcacaccgatgtgcgatctcaataccctcgaccttgccatcggtcccgtccgcatcaatctagaccagttcttcagagatatgcccattagatatagtctgcgatcgacaaggcacgagctcgtagacggagtccaggaggaggaagttttctgtaccatcagcttccagttggttgacgttcaagcgtttgaagagtagcaggaagacgttcggagcgtgtcgatccatctatagcttcgctcagaagcagcactctatattattttctacctccttaatcaccttctcattgcgattcctctctctctatttatatggatgtatgacgtacggcgatgaagcccatcagcaacaaaaaaaaactacaaaggaaaggagtgctacacgagaaagtgaaagagattagatgaaagaaattctattgttttcgtccacttgtcgctttttaaatcttgtccatctcaaacacttcaacccttgaacagtagtttggccgacctcgtgccctctccttcctctccaacagcatatactcctagcattcactcaaattctatggcttctacgtcccaaccgacgtctaacctatgggccgacattcttgacagcgtttctcaatctcaccatcaccatcaacagacagggcagccggcgacagtacagacgcagcaacgagcgagtcggaagaacttgatcgtgttgggagaaccaaggacagggaaatcgacaattttggatagcttgttaaagtgttcttcagaccgttctgggtctagtcttggtgagtgtttctcgctttgttttccatcatgtttcctttgtttctttggctcctttcattctctttcgagatcgttgtttctggctcaagacctatggttgcatgtcgagaacaggagctgaaggtccatcgagtcctgacccaaactctgtttcgtgctcctttcgtctttttttttgttctgatggaacagtaaaaccggttatctacccatcggtcgtgaaggcagcgccttctgctaggagggatgctgctatgggctacgactgggtcgatgtccgggaggaaggtgacgaaggtcagtcctcggtgtctcatcctctctttccatgctaccctcgcttgatctctgtctatcctaacctaggtttgatggaagagcaggggctaggaccacagcaaggtctcatcaagctgatactgatgatgctgctctcatttaatgctcggctatagagaccctccccccgctatcaatcttgacggctccttcatctcatccttccctattggatcttattcctctcactctatcatacgaaccttctacttcatccgagtcagcaaattcatcagataccaaatccgtcggtgatggcgatagaagtagcctgtcgagctccgtgttgaaggacacagctgtgttgatcgtgttggattggacaaagccaggtagaatgatcaccgagttgttggactggttagagtgggttgatctatgggcagagaagacggcgaaaagaggagagagcgaggagaaccgagaacgatgtacgctactcttcttctccccatcaggacggctaaatctatcagttttgctgattgtgtcctgatttcttctttcggattcttgcacatcctacgcgcgcgctttctcctctcagtgcaataccatcttcagcattacaacgaacctccgccgatatcgacctcatcagcaaatcagtccatcaacccttccccatcgaaaaaatctatttcgctgcctttgaatcagtcagcagcgactggtggtgaatacgttctgcctacgacggaggtgttaccccttggtccgggaacgttgactaagaactcgtgagcctcttctgttttcttctccaagatgagcgtttggtctcgcatcccttctgtgtttttctgctctatctgtactgatttagattgcttgggggtttactcattcttgtccatttaatgtatgattcgaaagacatgggatcccgatcactatagtttgcaccaaatctgatcagatcgatactgtcgccgaagagctcggactgggcggaccggctggctcgggtggtggaggtgggaagggcggtaagggaagctgggaagagcgaacggattggatcggacaagtcttgagagtgattggtcttatgtgtatgtctacctggtctattctttcttcttttctatctttcgttcgataaaccttatcagagttgttccttaccgtcttcttctcgaaactacagatggcgcatctttgttttacacttctcaaaaccgtccagagagtttcacacttcttcgtagttatatcatccatcgcttgttctcctctacgactactagccctcaaccacctccaaccgaccagagctcttctaccctcgctacattccaatcgacatcgagccggtttccatttccgtaccgagcaaatatctttgatagagaccgagttgtcgttcctgccggatgggactcatggggaaagattcaagcattgggcgatgggttcgatcctgtcagaataaccgacgcgtgggaggcgggcgtgaagagaaggaaggcggagagaacctcggaaggggagccggcggaagtggtggatgaggaagtggaggatattgaggatttatgggaggacgtcgtgcctgatctggagaacgggattaacgttagtgttcgaatgttccatccattctctcccctgtctttttgcctctctgaaagggtttacatctgtctgacgggaaatggaaaacagacccgcgtcgcccctcgactgacgaccaccgagagcgaacaagcatacctatcgagacactacgagatcatccagaatgatctcgctcgggatccaagccgaggtttgatagcaagtagagcccagggtgagaggtcgtcaggcgtggtcggaccgatggggagtgatagcctgagtttaccaaacgtgcaggaggcgatggcgttgatgaatggatcgactcctacgctcggaaagagggttcgtcttctttgtgtttctatatcgatcgatgttaacgctgatacagttcatgtccggtgcccttgctgtttattggaaatctaacctcaggatcctttgacgaggacgccttcgactcctgtgactacgaccactgccggtctatcctccttatcgtcgactgtgccatctacgggaggtcaatcatcttctttgggatctccggcttctcttttgacaggttcagcacagggcaacggatcgagtgctcaggctgctccctccacagaagttctcgtccgtccatttctctttctttgtctgactgatctttgaccctttaacatcgacactgacgtcgtccttctctcgccgattcttaccttgcatctcccaccacagcatcaattcttccagtctcttctcacttcacgaaagacaacacccgcaggagtagcaggtctatcggcgtccacactcggttcttcctcctcttcgtctactactactaataggaactcagagcatgcaaagaatccttgatgggcccaccttgttcttttcatcatcggacgaccctgaggtttcttgggtcactatgctctcctcccccctctctctagacgagaaaaaccaggattgtagatgagatgttccataataccccctttcttccacgttctctccaatgtatctcttgacaagagaaaagaaagaaggagaaactctgatcgaaaggaaccagttgtctcttctaaaatttcgagaatgaacaaagttatctcgatcttgttagttcaaacaaacaaacaaacaaacgaacggaagacgacgaatgaaaaggcggaggacccgaggggtgaggcaaagctaaagatacgctatggtaggttagcagatcaaccgacagacatccttctcactccctcctcataactaatcatccatccagccagccaaccaactgaatagaccaccaatcatgtacacaagaacctcaaaggggaacagaacgatcttcttgttttgctcgatcggtctagtcagtagtcagctcctatgtgtcgaccgctgtttttcagtccgttagttccccagtgagtcaaagtaagaggtggatgatctgaaagttccttaagatctggctttcttccttcttggagacgtcactcaaaaataagcaagatattgaaagagagagaaggaaacgacaaagaaagtgcacagagggaaatcaaagtaaagcaaccgtcatcgaatcactaaaagccaactaagacgtttagaaaccgaaggaagccaacttctcgttctcgggaagggaagcggcggccttggttcggagcttgacggcagcggtctgatcggaagcaagggaatatggatgagcatgtcagaaatcatatcattcaatcggttgagaggaaaaggaagttggaaagaaaacgtcgaacgcacctttcgctcgtggtaggcgacagccttgaccttcctcttctcctcaagggtgtcgacgatgtccttgtatccccatccgacctcgtgggagagtcgcttgagggtgcagtactttcgtccgggcttcaatcggaggactcggagggcctgggggacgaccatcttcttcttcctgtcgtagggaggaggcataccctcgtaaagcttaagtcgctcgagagcggcctttcctcgggaggtcttgtgggcaaccattcctcggatagccttgtagaggattctagaaggagctcggtggtggaaaggaccggacttcttggggttgaccaaatgcctcttgtggaggtagttgtggtatctcagctgtagtgtacgacaagagtaaggagaaaggcggaagggaatggtgcattatcgattgttgatttggtgagtagagtggtgttttgagggatggcggtgcaggtcgtcagagcggatcaagaatcgagagagagccaaggacaagataaggagagtcgaagccgggtaaagttgaatatcaaggaagcatttgaagaggtagaggaaaaaaaattgtgagaaaactggactgagactgcctggcaagtatccatccactacgtttgccagagaaactttgacgaaccttgtttcggaagaaggatccggagatgttgatctcctcacatcggacaacggtgacctgttatgaatgtttccccgtttccaaacatatccatgttcccaatccgtcccaagacacaagagtccagccaaagcaatttccgttccaatcaaccaaaacccccaaaccatccaaattcgcaaccgacacaaagaaaaccaaaaaaaaagaggataatatttagacatccttttcgcgattatctctgattgatcatccagtctgtttccagcaagaattccggctgaccttctgaccgttaaggatctgcttggccaagatggaggccaatcgtccgagaaggtgggccttcccgtcgacgatgatgggggtagctgtgaagttcatgggacgaaaagcaaagggaagggatcctaaggttaatcgagagattctgtctgtgtgaattttctgacgtctttctcttcagagggctggaagggaggagcgtggtaggatataggtgaatttggcggaaaggaatgggttgtgttttaaaggtggagaacgagagttctttctctaaattcttttctacggtcgaatctgggaaaggtcgttcgctgaacaaaaagccgagatctgtactaacaagagaacgaggccatctgatgtgcccgttcccaaagagcgacgaaaccgaacaaagacccaaagaagacaagaccgtcagtatccatcgaaccaagattttttctgattgtctcccggatatttttcgcgtcccttccgtccgttcactctcgcccattcactctcgaatagaaacaaggacgatgccatattctgtacggcagcctatcccatcctgtacagaaacaggactgcctgtggacatagagtagactgaccttgaggatttcttgacgtctgatgaggtgctcacactgcgatttccgagatcccttcgtttctttgcgacccgcctggcgcgcgtccgactgaggcgagctgacttttatgtaacccccgggaaaagtcaggcgggggagtgtgatcgcaggcgtaaccactgggctcaggctttgtaaccacgatgcccgatcttgtagtctccgcgtagtctccatgtagtgtctgtgtctattgtgttgtctgtagtgtcgagcgtatgttgttgtagttctgtttgtagttttgtttgtagttctagttccagttccaggtgccattgcagcagcagcagccatagctctgttcccaatgctagtactgtcgccgcaaaggctactacgaccgagaaccatagtctaggtgacggtggtggtcgacagtcgtagtgcagatactacagatccatggtcttggtcgttgccgttgtcgtatccgtagtgtccatcgtcaactctctatcgcctggtgccggtgtgacatcatcctgatctctaccagtccagacatagaacctttctcgctctgctgtcgccccatccaccgtcccagagcacatcctcatctgatcttgttgtttctcgtaacatttcgttccttgcttgcaatctcacagtcgatccgttcaaacagcaagaccaagccatctaattccgatcattcgatggccgtgacaaaacatgctttgctcaaagataacgatgatacacaacgacacggcagaaagcagcaaacctcaacgtgttgctcctgatgcagtcaaacagaccctctcaaagtgaagatgtgcgagacaaatgagaggtgcggccgagatcggttctacgtcgctcgcttgcgccttgatcagaacgaactgtcgtaatctgttttgtcgacttttcggtcaactcctatctctcccatcttccccccccccttctcttgccttgacatctgcctctacctgcataccatcatcaactagagaacacaacatgcacatcctcattccgtccatccttccctttctcgctgcatacttcaatctctcggggttcaaagatcctaggtcgccctcacgcttcccaggacacgtccttacccgttcgtcatcttcggtcgacacgtgctctcactcttccttcacttgttcggttgattgacctgatctttctcgtacggcttcctcaaacaggcctcaacgatggaaacgaacttccttcgcctttcttcggagtagggtccgtcctcaagtttcagaacgtcaccggttcgtcttctgatagagcctcaccgtctagctgtctacagagtcatagcgctgatcgttcccgatcctttctctcctccctttctcgtcggctcacagatgatgtggtgagcgagcttgttccgataccagcactcagatgatctacacgttcctcttctcttgctgatcatcacacttaccgatggcaaatcctcttagttaatggcgttctccaacggataccgcacgatcgacaccgcttcgttctatcaaaccgagagttcaactggcacggccatcgccgtaagagctattcctctctgcgtgggtcctcgcggcgcgtctgatgactctgctcttatccttcgttcacacaggcgtcagggatccctagagagaacctctatataaccaccaagttcgatgccttgtatggtcagaacgttcggcacgaactggaccactcgttaaagatggtacgctcctccactacaatcgaaaatagttctgagcatcatccaactcaaccatgccttctctctttatttctctgatttcaaattttgcatagctcggagttccctacatcgatctctacttaatccatttcccccaactaagcacaaatcttaccgatacatggcttcagtttgagaaacttgtcgaccaaggactcgtccggttcgatcactctttctattcgtatgcttctctccatcctttagcatcccacacgctgactttaactcttgattgaaaaaaaaaactcgaccaggtccatcggagtgtccaatttcggggtagacgatctcaacactatcctgtcggtagcgcgcatcaaaccgaccgtcaatcaggttcgtgcgcgcactcttttttctcacttcctgtttcagccttctaaccgatccatatctctatccacattcttttacaccccttctgttctttctcactgtcgaccaaaacatccaactagatcaaatatcacgcatacaacgccgccaaccagaccgcactggtcaaactgtgcaaagagaacgacatcgtgatcgaagcctacagctctctaaccccactgacgaccgctcctggtggtccggccgtatcagtagcagagaggatcgccaagagactttcaaaagtcaccggagccgacgtcaccaccggtcaggtcatcttgacttggttaaggactaaagggatcgtagccgtcacgtgagtttacttcctttttccttttggaaacgttgcagtgtccccgctctatcaaaaggttgaccccacctcttgagagatcctctttcattcagaacgtcatccaaggattacagacagcgagaacaatttgctcccttccaggatgactttcctcttctaactcctcaagagatcatcgacttgtatgtctctcattcttctcctagtcgatccgtgcgctatgcggcatgctcatcgttgccttcctccttgtcgatccaccagcgagagtttccccggatggaacggaacgtcctttgatggttctctgaactgagaaaaagggtcttccccgtcttctgacatgatgcgcaaggtgcttgagcaagtgcattagagtatatatataaagacatatgcacacatatcaaacgtggggtttgaaccccttgtcatattcaagtacattcgaaccgatagtaaagatgaagaatagaaatacggaagaagagaagggggcaagagtgtcctgacgctcatgctcagtcaaacttagttctcgacctcacatcccccgatccagactttctctgtcgttccgccttttcccaacccgtcggccaactcactcagccgatcgagacagacccggtgtcggtcgtctgagaggtcgatctgaccgaaagcaacgtatttgcccgtcagtttcgatagttgtccaggcgaggaagttagtgtgatgaaaaactttgtttgtcgtccgttttcacccccaaagggtagaggggtttgcatcaagatcgaaggaacgggggtggagtggagcaaagagaaagatgaataagtatatata

SEQ ID NO: 675 - DNA, 19393 bp, Xanthophyllomyces dendrorhous
  misc_feature (1310)..(1319): n is a, c, g, or t
tatatatatatatacgaaactcagtcaaaccccaaggaacaaagccaaagagagggaggggggaagcaaagagaatcagaaggcttctcacctgagaggaattgctgttttttccggaattagccatggcctttctcgctcaatcacaagaggagaacaagggaagaagaaaagaaaaccaagtcagagacctgttcttttatacgtgcgcgagcgcagaacgctcgattgattctatcaggttgagatacataatacaaagaaggaggactcacaacggtgccctgcttgaagggcgttttaagtccttctttttcatcattgaacgtcggcccgtctagaattatcatgaggatttcccccctttctcgaccgtcagaccatcgatgacgacaagggagaacagatccccttctcaaccgaccgcgaccagaacagaggggagagagagccggcacgaacagatactttctcctccggacccatcacccctggtaacatctcccatctgagctacaaaccccttctccactctgaacacctttgatccagcttcagtcgtgtatcccaagagcgggaacggcgaccgcttcgacttgaattccagcggatgggaagcaaaggtcaagaaattccgaacggtcttttggaccccttgcgagggcgacagatcgatcttcagtgtagggagcgcaagcgaagtaggagcggttagaaccaagggaccggtgcttggctgttcagattttccaaaagtccttccgcgatcaacgcgaacgtcgagagcgtggatgagaaggaagagagacggtcaaacggatatccattagcaatcaaggcgaaacggcatttaattctaggtcaacgccagcgatcagtcgtacctcccccccatgtcaaatagaaacaaaagagaagagagaagataaaagaaaacagaagaaacagatcaatcctctcttaccttcagctcacttggcaagacgccttccagtaattctttctcaatctcatccatctgttctatgttcccagtcaatccatatgacgttccggactttgcgacccaatccttgatagcctcgtatgacctcgtctgagcttcataagccgaaaggtcacccgaatagagtgtgagattgacagaaggcatgtcttgttgtatgtccggccggatatatcctcagaaggaaggcgagatgaaatgattggattagagaacaaatgttatgtccgacatcaaaatatagaccacgacaatatttcacagagattctctggatcgtgcacacacacacacacacacacannnnnnnnnncacaaaaaagcccttgcattgcccaccatccttaactaagtcttgccatatccaaacgagaaacctgaaacacaaatatgaaaagtttcatgttgattgatagagggaagaaaaaagaaagagcaggcaaagaaagacggactacccgttcgggcaagcacaaacgatgctacaaagctttgagaaaaagtagatagaagcagatgaaagaaaaagaaatagacgatgaggcgaggtcggcagagactgaacgacatgtagaggggaaaagaggcccaaagaagatgaagaacgggagaaaaccccatgaagaaaggaaagaatagacacagaagtagagaaagatagaaagggagaacaggaaaaggactgagaaactcgatgtatataaaggggaaaagatgcacacgttaaggagacgaagctgttgtgatgtgttgtattgcgttgtattatcatacgaagaagaagcgaggagaaggagcaatataaagaggtgcaagacgataagacgacgtcaagagggagaaggaagacgagagagatgcggaaaaagatgcataggtgggaggtaatgcgtgcagatgcaactatataaatgtatgcgcggtaagaatcgattaagaatgaaagaacaaccaaagagacaacaggcgaaacgaacacacagaagaaaagaagagactgaaagagaggagaggagacaaagaagcacgcacagagcagagcagctcggaacatgaggataaaaaatatatagaagaaaaggaagacaacagcttgaacacatgatggaaagatcgatagctcgtagctacaagagattagaagtcttccttctcattcgtttgcctcaacttctggtccggctgaggacccattatcaaacggactgaagtttccagaaggtttccaaccttgtatgccggcgagagctttggacggagctgtcccgaacgcgtgttgagctgaacgttctccaggagaagacgccccgagccgagtctcttgtgaggaggtagagccggcggatgacgtagggaagaacgtgcttacgggccgaggtggcaggggggccagtgtgggaagcgacaaggatgtttgggagatgccgaaagctgaatgtcgaggaggaagccgctgaacgttggggtcccaggtgttctcagcagacgagctcatcgatcgagagccgagtggcggactagtgaggttcccagtgttgccattgagaagaccagaggctgtcgcaggtggggagctcgcgcccgggttgattggaggaggaactgcgttcctttgaccgagagaatttttcgagaacgaaagccggatacctcccttgacaagaccgcctagattgtttccatagtactccttgagagcagtggaagctgaatccacgtcctcaaattcgacgaaacacatcggcccgttactcttttgtcggaagctcatcctcctgaaaccttcacatcgagaaaagaggcttcggagagattcctctagttgagagaccgtagaggctgtagaggatgctgtgggaagattgccgacgtagagggtgttgatctaagattcaagataaggatagagaaagagagagcaagacatttagttgttatctctattattagagcacgtagcctggcaagcagccgatatgcacagctctactcaccggaggattcatatcggcagggttactagttctaggcatgctcttcaatcggtccgccccgttctttccgaagctagatgacgtgctacttccagagtttgcaccgtccccactgcctgacgactgcctaatcgagctctgccgtctctctctttcctctgcctcgctcgacgcgtctcggggatcacttgttcggtccgagacagaggagtcaattggcttctggccagtcgacggctgttgttgttttccagacctctgttggttcaaacttgcggagaatggctggatttgttgaggcgtctgaagagttccaggagttagaggaggggagaaggcaggaaaatcatcggatgatctacggtgactgtctgacgatgaaaggcctggcatgtttgatgactgatacgagccttgaggtggaggagaaagtgggaagtgctgggtttgtggaacggctgagagaaaatctcgggatgatgactgatcttgatactgatgaggagagaggaacgggggagacagctgctgctgatagtgaagagaatgaagaggaccaggctgggtaccttgagttatcgacggcaaatattgaactggatcttgaagcgggttgaaagacgcaaagttcgaaggttgctggaggtgttgaaggtgttgaccagacgatccttgagatggctgttgagacgaaggaaactgccgctgtagattcgggttggcacttgatccaggaccagtcggccaatcttgggatcctccagacaacagaggtttggcccctgatccgtcttgtccgtctcctcgacttctacctatcactccgttggccagattcatcccgccaagcccaagagaaggaacgctggccgtggagccggccaggctagttaccccaccggaagaggacccgcctacaggacctccggtctcctctcctccaacacctcgtctcgtatgcaggttcttttttgccatctctgctttcagcacgctagctcgttcaacgtcgacttttcttccctgcagggcatccctggcctccatagcggcctgcttagtcttgaacttagcaaaccctatgatttgcttgcgagccgacaagttactagagttgaagccgggggctgaagcattgttgttgctgctgttggaagaagccaagccaagcgtattagaagaagacggggcatcttggaagttatctagaaaagagggatcaagatatggattgttcagatagaagttggggtcggctgtgctgatgttggatgtgtttgagagcaacgtgagagcagcttgggtgaccgaggctgcagaaggcgggttcgtgttcgatagaggcgtgttactagtgttcgtcgatacgtgaggtagcttgagagtagcagcttcgaaatctttgcagaaggtgaacatgttttgaaattctcgttcctacgggagagatgtaaattacccgtcaagatcaggttttcttcctatgacaagactgataaaagtagataagcacgaaggatggaatgaacgaacctgcatatcgtctggaaagccgacgacaaagatagtgctaatttcttcttctggttctcgacctgcagcctgtgcagagccctgcgggccttctcccgggcctcgacctgttctacccggtcccatgtttgctcgaccgttttgtgcgagcttaggattgattcctcccatgccaaccggcaaggtcatgcttggaacaatgccggtgggaaagccaggctgaatttgtagatgaagtggttggcgttgaccagaagacatctgggattgctgctgttgctgttgctgttgctgttgctgttgttgttgttgttgttgttgttgttgttgttgctgctgggattggaagaacggatgtgattgggattggttcgagaactgggtaccaggaagagaagggatctgatacaaggggtctggtgggagagcgtgttgggtgggagggtgataactagacgctggatgactcgattggtcgagttcagcagagaacggaagtatcgtagaggtggatgacgaggtggatgcatcggattgagacagcctgggctgaaatccggccgaggaggaaccagattgaaggtgttgataagaatggccacgagcaaacgaatagccctcggtggagctgttagcagtggcggcaagattggtgttcagtaaaaagtcgcccgagggattggacgggccacctgatcctgactgattggatggttgtcttcgtcggacgtcatcgaacgacggatgtatggaagaatcgtctcttcgacctctgccctcgccggtcacgtcgcccaacctggatctaccgtcctggaaaggattgctcgaaggagttaatcgattaccgggagagtattgataaaagttgttgggagtcgacggaagaggtaacggagaggatgattgaccgatagcgtggcgttgctgctgttgatccccctgctgttggacgtgtccacctcctaaactgtcgagagactcgaaaagacctctaccgataaacgagatatcgtcatctcccgtgttttgatgcatctgtcgcgacctcttatcaaatggacgtgtcgtgtttgcccggactgactggatggatggataggtggatggacgaatggacgggtccaaagagagaagaaagagccaaaggatccaacggtggaggaagaaagaaaaggaaggatagatggatggactagatggctgggcaaaatcacgacacgcttcgggtacggggtttattggattcgcgtcgaggagaaaaggcgtgactgagaccaagagaaccaagcggatggcgtccaaacagatagaaatctgacaggaaggggatggcgaacgaggatccgagacccgtaaaggagaagacgagcgaagagaaagggaagaacaagagaaagaaggaaagaaaaaaagacggggagagtgaatggacgtggtgggtgaatggataaagagaaggctcgaaactcgcggccgccgtttgtttggccggtttgtgtgagatctttcctaaaacggaaggtggctcgtcttttttaagggatggtgggatctctttcttctatcggtgcgagcttatggatcattcttaatctgcttctgtatcgcaatcggtatcaaagacccgtcagagagaagaaacagagaggagaggatgaggagaaggagatcgacaaacctctggttcagacaggccaagatcctcacatcgtctaggatcttggccatctctcacacccgctgaagaggggtccacgttttgcttacaaacagtcagacagacgacctggtcggctttatcgacaaaccggtcaccgtgacgatgacagagtcgaccatatgcgaaacaaacagtcatcaagagacggatggagggagagaaccggatactagtctaagggaagaagaaaaagagagaagaaagaagaaaagaaagactaagaaattccttgtaaataagactacgtggaaaatcacagatcgtaattgatgaagtaacaacattgaacatcattttgcaaacaacttgaggacgttccatgatcatatagggaagagcatattctagtgtatctgaaccatggcttagttgagtcttggaggacaagaggtgtctgagtttgtgcgagagcgcttcgagtctagaaagatcacatatatcattcacactcaacccctcagacctgtctgaccttggccgttttgacgtttcctaattcattcaagagactcatggctcgccgctcttcaaagatagagaaagcgactaagatacccgcgagccaggttatttgtctgtggaaggtgtgaaagcttgcgcaagcaaggcggagacaagacagaagtgatggaaatccctgttttcacgcgctgtctgtcgaccagctcgagaagggcgaggagatacaacacggagccaagaccgaagctcagagcttaagtagagcccgacagcggctgatgcgacaccagctctctctctaatgacctcaaaaacgtttcggcctgcttcctctgcctcttttcctcgatgagcctccgtcgcccttcgacctcccgctttcttttctctactgactttccaccaaacacgatctgtctcggatcaggagacatcccataggaagtatcttcttgatggacctcaacgtcgagtcgagctgcttctgtctccagccgggccgctgccaattcggcctgttgttgcgctcgggtggcagaatctttagagaactgatagaatgccgcagaccgattacgcactttgaagtggaacgatgtcaagaagaagagaacgaaaaacagaatcaacacctgagagccatccgaagcatattgagagtcatgctcttgcttaccatcagcattagcgtcgtagtgtttctcgccggattcttcttcagccgcctcccaccgcgctctcaagtcttctgccgaaggttcataaaccggaaagtaattttggtcgccaactgattttcatttcaattttttcatatgaacagagctcgtcagtttatgaaaacaagatagaataaccaagaaagcacttactgatcaagtttgccggtctctcttccaaggctgctttagctagccgtttcttttccatagcatatatgggaacttcactccttctcacggatcgtgtccggccaagatcatcctcatagtcagtcagagggtcgtcctgaagagtagatgagaatgtgtacgtttagtctatcttgatgaaacacaaagttgaaggaacaatcgggcggaatatgctcactgccgtaggagcctcatcctcttcgttctcagaaccagaggaagatcgatcgtcctcttcgagcttcttgtcccactagaaatagacacgccccgacaagcagtgagaaactgaatcagattctggtaaagtcttctctatcgatttctagattcctaaagctaagcaaaaactcacatctaccagagcatccccgatctgtcttgaactcagcccacccgtctttcctctcttcagccgttcatatatctttgatttacgttccaacgcggcctgactgtcttctagagtggctctgtcgatttgacctagccgagaagagctagcggatagagcatcttgccgagcttgacgggacgccagacctttcgacggagcggaccatttcgtgggtttctttatccagatgaaggacggaaggagcagcagatcttagagttagtcacatatcatgttgaaccctctgattcctctcttgtactccaagaaccacagttgttatgaaaccggattattaaagcttctgagagagaagcttggtcggatgcacatgacgcaagtgatttaggatgagtcttgctgtcttaccttgccttctctttgaactcctcgaacataggacgacccgtccccacttgatcggttttgagctttctccttacccttctcgagttcggctttgagatcgaagagagagttggcattaacgatgttgtatttcgtagagggtttcttccctgctgacgacgaggtagacatctttgtcgaaaagacgtgtaggtgatggatgattgatagagtgatggaatagtatttacatctgcgtttcgtccagttttagtttcttgatgattcaccatgtctcgtctttataagtgtttttatctatattgagtttcatcattacattgcatcctacatctcaacaacaaagaacaagatcgtgcctaaaatactgtttacacacacacactctctctctctctctctctcttttcacctctcatggttcttcttttccctctcaaaatcaacaatttccatcatccatcctaaccttcaccgcgctcgaaccttgacgccgaggaacaaacaacggagaagccgctactgatgacgaagccgacgacaataacggctgctgctgaatctgtggaagatgtgacatcctcgaaggaccaggcgagactgatgtctgataagacgcggccgccatagattcagccatcatgtttcccagctgagcagctgcgtacgagttctgaaggtcgttcagcgaaggaggatatcctgaaggtgggatcgagatattgcttgggaacatagttgggtagtacatcggcgatgtctgatccatcgagagtctaggttgagcccaatgttgatgtgacgatgagttttgaagagaagaagcattatgcgtaggaagtgatggatagaaaggcgccggttgagtctgagaggggtaagcatagatgtagggctggccggtctgttggtcataatagatcccactatcaagaaggtatcccggtgggacaatcagattactcagcatgtttggtgatggtgattgctggtaagaggcattcacttgaggataagtggcaggagcaatatgagaacccgaggaccgacaaggtgcttcagggaacgataaaggcataggccctgcgatcgaactgaatcggggagattcatcgaacgcgggagaagcagaatggtcaggcggatgagaaagaatcgttcgctccaaggttgcgagcgccggagacgttggttcggctctactagatataacgaaatcggttgccttcgccgattcatgttgttgctgctgctgttgttgttgttgttgttgttgttgttgttgtcgcatatacccaaactcaacctcgttgatcttttcagtaacctcctctttgactacttcaaccacctgaacatccaccatcctgttcttctttttctctttctctcttcccttctcctttcctcttggaagtttctccttgaacaatccacttgattcaacctcattctttcctccggctggtacagccgatctactttcgctctttcgaacggccttcgctttgggtgtggccttctcggtcgtatgagtgtcctcggtggcactagctgccgccaacctctccttcttcctctccagccgctctcgcttcaatgcgttcttcgactttgtcataggaaccggtgtgtccatttccgagggttttaatacgacctggttttcacctgaatgaaggccgacagcacgggatacgctaggagcaggtcgagtatgtgttgcagagagagatcgattgggcggaggattcttctcggtggcacgtcgcatacggagctcggccgcttgttgtctcttctctgcggtgtaagaaagttgctggacaggtggaggtggtcgattttgcgctgttcaaagcatgaagtttgtcttattgagccaataagtgggaagcttgaattaaggaaagagatgcttactggcttccaacaccccggtgttcggttcacctgtagaaacagcgttactctcattggcgactccttttgattgaggcttcgaaggaacaaacggtttggctgatgatgtaggggtagaaggcttgatggaatgagagggcacagtagacttaggcacgacatctggagaagcgctttcttctgcgtttgcttgatgagagcctgccgctactgccgctgcttcacgctccttccgctccctcatcttctgcctcgagtttttcttcttctttttagggatttcatctactaaggtgggatcattagattggacagtgatgcatgtagtggaaggatttatattagaaagtgatgagtcgatgctagcacgggatgcaggataacttcggagaccatcattttgtttctcagaaggcgaatgttggtcattcggagatgtaatcggtcttggaagaggctttgatgtcttggaggtcgacagaggattggtctgcgaagaggaaacagcgatcgattttttgttacgcttcttcttcggattttttgatgcaggtgtgtccgttgatgacaactcgggaggaggcaagattggtatagcagaattggaagtagagccgttagatgtgttagaagaaggaggtgaaggtaactgaaggatccgaggcagtttagccgtagccaggtcaagggtcgtctttacaggagattctcttccctttcctttcgagatcgaggttgaactattctgtctggaggatgccaagccgagtttgagctcctttcttcctgcgggtgctccaaatgtcacttcaacgtcgtcgtcgtcatccgtatctgtgtgagtatttcggagacgtccctgatcattcaaagaggaagacctcgaatccgagtgaagcacaggccgagaagcgcgcgatgaggatccttgctcctcatcatcgtccaccgaaccttcacgtatccgccggcctagctgacgagccctagatttgaaaggtttcttccgggcttgcttgggcttagactttgcgttgaagttcgtcccgtccggtgaagagccagagattgatgccacagggagcgacattggtttaagctgaggtggagcaggtgcagaaacggcagtagctgtctgatcgggcaaagtcgaaggcatcgtcttttctttccaacgattctcagaaagaacaaagcaatcggaatcacactctcgatgatgagctagaatgaacaagagagggtatatgtgtgtgtgtggcgtgggtctgggtttggttggtgttctctttgttttggtggaggtgggaggaaaaaaacgtggcgtgtgtggtcacgtgatctgttgaatcctacggctcacagattgtccagttacgaacagccgaaatccgaaagttgaaaagacagagagaaagtgggagaagaccaccattcgtagcctttcttttttggactgaacatatctctttatacagctatggtctctcaaacagtaaaggatttaactagtggaacagctggaggtgttgctcaagttagtggtctttgccgaccagattctgatcgaccgtgtctgaccaccctgaatcgactaactgatggtttcgttcttgccttttttttaaaacgattaggtcttggtaagtcctgggccctttcttctcagttaaagaatacaatcgcgtttgtatggtttcggatcttgactgatatcatgtctgtcttgattaggttggccaacctttcgacttggtcaaagtggttcgtcctcccgatctagtttttaccaaccttatgcgccctcacttgatcagcgctgtctgtatgtttgtgcttggttcaacgtggtctcctacagagaatgcaaacatctcctcccggaacgtacaagtcggtcctcgagtgcgccgccttagtagtcaagaacgaaggacctttggccttctacaaagttcgtcgtttcgcatatggggatgagaagaaaaaagaaattaagaaaggaagaaaagatgagctaataaatcaaccttcttttttacttttctgcaatataaacttccacagggaacgttgacgccacttctaggaatcggtaagagtctcctgatgtcttaattgtcgcgtatgttttaataacacctcgatcgtttcgttttctggctaccaggtctctgtgtctcgatccagtttgccgcgctcaattcaaccaagaggtacttttccgagcgaaatggaccaggcaaggatcttggctacggtatgggtgccgttctaaagttcattcggaattggccatgtacatactgacaagcttttgtctcttcgtgtgctttttaaaggacaactcttcaccgccggagtagccgccgggcttgccaactccgttattgccggcccagtcgagcacatccgtatccgtatgttcatatcatctattcacctctcctctaaaatgcatttctgacatatctgagatgttcgaacggcaaaactttccctattttaggtctccaaacccaaccgaacgtgacacctaagttgtacctaggcccatgggactgtgcgaagaagctgtacgcgcataacggactacagggaatcttcaaaggccaggtccccacgttgattagagaaggacttggatatgggtaaatggggtttctctatctgctctctagttccactcagcctatggagagttctcatgaacgtgatttcctcctcctcttttgtgtatctgaaaaacgtcaacaacctcagagcctacttttgcgcctacgaagctctcgtccagcgacacatcaactctaccggacttaagcgagaggagatcacatctggctacacggtcctctacggtgctgccgccgggtacgcgctctggggatgcatctatcccatcgatggtttgttcctcgtttttcttttgtttccatctagcagacaccagtcccccctctgacggatttctttgaatctcttccattccccttccacccgtttgcgcttcagtcatcaaatcaaaacttcaaaccgactctttcactgcttcgactggacaaaagtacacttcctctctagactgtttccgtaaagtttgggcgaaagaaggagtctccggtttcactcgagggcttggacctacgttgatcagaagtccgttctccaacggagcgacctttatcgggtacgagttgatgatgggtttcctaacaaggagagagtccgatgggactgtagcaagcgcatagatttgagaagaatgagggagacgagacgagaggaagaggaataacaggtagaccaagtggtggaaatgttgtctttagggttgtatatgtctagaatctaaatagaatgagaatccttgtctgttcatcttttgtatgttctttggatcgctctgtttgtctgtcggtttgtaggccaggcgtgtctcttttttctctagcgtctttgggtaacaaaccgaatagacaggtacaacatgtgtttccctctctaaacaaacaacgtatgcacatgcacggtcaagattctacaaacgcctatcgcctactcccttacgcaaatttccagcagccttcacttttgactcttgttcattatcagcctaatcgatatccatattaccaacaccccttcttgatcgttggcttccacctctcttacctcctcgccctcggccggcctgtcgagggcgtgggttagaactggtgtccatcgtatccgagtacatttttctgatacaaaagcaaagagaacgcgtctattgtgagaatccgttgtggtctgagagaaaggaagaggagtagacattgaaacatacgaagaacctccgattccgtccatcagatcacctccttctactagtttctccaacgactttttccctgctcctgattcagactggccgctcaccagaccgagtcttccgaacaaccctcctggtgccggtgccctaggagcaacaggagcgagcctgttgcttaagctgctgcctgcattcttgtttgatgctgccggtccagacggagttggtctcgagcgaggttgttgtgaagatggggcggtggggacagagattgataattggggggatgagaattggacagagatcgttcgaccatcagcaatttggccatggaaagcgctgatagccgcctcggcaaaagtaggtttggcaaactctatgagcacctaaaggttcagagagaatagatattgaaaatcaggtaagatgatatctcgagagtgaaattctaggaaagaaaagaatcgggcgcttaccgtgacggattgattggtttgagatgagatagaagaggagacgatggcaccaaacgtgttgaacgtcatctgtacgagtgaaacaaagagatcagtctcattatcagtctgtctatctacatcgatcaaggtagatagggtagtggggttgggcacaaggagaattcaaaggacaaggaaaaagacgcgaaccttgacatcttctgccgtggttccaggtgcaaggttcccaacctctaccatcttcttgttcaccatgctcgcgcccttgatcccaatccccttctctgccggtgtcttgttttctctttgaggctggctcggtcgagcgtctcgaggtctggagggaatctgagcattcttctcggtttcctctttctttccaaacaagtctagcccgggatccaatagatcattatcccttcctcctcctcgaccaccgtttcgagcggcaatcttcgcagccgcagtgtcattcttattcaacctgaaagcgagattcccgcctgggatcatagctccaaagagatcatgggaccatctctcggatgtactgtgtgtgggcggcgcgtagggcaacaatgtcctctgccgatcgcgaatggatgtacgtgtatgatcaaagagaagggaacgatttcagaactcctgcatgcttgtttgagtgtaacccggacgattgactaacgcgatagggctgctgccgggagtcattagccgatcgtcggggacgagacttctgcttgggaataattaaaattcattttttttctcgtcagaagatgagcacaaggaggctagggagagggtacggagagatacgaagaaagaatattgagaacaaagagcagcacagacttactgagaagctgtcaatgtccatgatggactcctgggcgcggtcttgttcagagtacatgatgcagagaaatgggtgggaggatggatggatggatgatgattatgaatctcgatgaaggagatggagaaaagagattcgagttgccgattaggaaactctgtagtcgacgtattaggccggtttgtaatcaaacgagttccctcaccagccggttgttgttacttcttttcaatctattccatcccatcccgtcccgaccctttctcttctgggctcaagatgcaacaccctccaccaacattagaaagcccaccggcttcgaagagggtaaagacagacaattcgccgtcagcttcgccttctccgcctgctggagcccctacgctggttctggatggatctctctctcataaagcacccggcgagatctttacccatcaaggacacccttctgtcgctggaactaggaaaggtgacggcactggtcttggaccctccggaatagaagctacaacgaatgttatagaacaaattccgaaggaaatcactcaatctgaagtcgacgaggcctcaaagggcgtgtcgatagacgacacccagcttgctgatgctaaggaggtacgtttctatatattttttcttttcctcatagcatgacgaagaatgatcatacatcttttgaggcatggtctcgaccggtccttctcatctttccctctctcacctctcatggcctgcttggtgtttgtttgtcgcgttcgttatgttgttctgacgtgttttcttccctggcttgaaacccgtccaaccggctccttcacccaatctattcacggatcaaggcaacgcgtcaactccgaccggccgctctagaggagttcaaagatatcatccggttcaccgtcgttaagaatgatgggttgcccgcatctatgatcctccttaccggtttgaaatgcttgtacgtcttgtgttctttctctgcatctgtgccttcaatcgaatcatgtgtatataacccccttagccgtcgactgacgcgtcttcttttattcgttttctaccttttctcggatccgtgacggacggtagattccaaaagcaactgccgatgatgccaaaggagtatatcgcccgattggtgtacgaccgtaatcaccgatcgctcgccatcgtcaaacggggtctcaaagtcgttggtgggatctgctaccgaccgttcgagaccagaggtttcgccgagatcgtcttctgcgctgtggctagtagcgagcaggtcaaagtgagtttgacggagttttttcggtgttctttgtcaagagagaagggtggtcttctgctgtcgccagattagctgaacaaacgtctgttgccttcctgttcttccttagggatacggatctcatctgatgaatcatctgaaggatcatataaaggctactttcccgtcgatacatacctttctcacttacgcagataactacgctatcggttacttcaaaaagcaggttggtcattatttcttgttcttcgtcctcttcatctgattgggacattctccggtctgaaatctttccggtgtattctcgatgaataggggttttcgaaagaagttacgctggacaagacaagatggataggttatataaaagattacgagggaggaacgatcatgcaggtgagtctctgttgtgatagcgctgtcaaaatttgaaggttggatagaatgctgactacgtgagctttttagtgtacgatggtgcccaaagttcgatatctcgagattcacgacatgctagcccgacagaaggaggtttgtcttccttttctattcatctcttcttgttatttgaaagtttcacggaactcaatggccgttcgttctcttcaaacctctttctgtctccctctttcgtttcctctttgacagatgattcttcaaaagattcggacgatatccaagtcgcatatcgttcatcccggactagaaatctttcgaaacccgaatcggccgacgacgtctatcatttcgcccggacctggctcgactgacggtactcagcctgctgatgatacttctgatgctactgctgctgctactaacactgagaacgactctgcgctctcgacaaatctgacgaagggcgcgttgggggtcgctcaatcgatggctgtgccttcatccgacgatcttgtttcttccccgccccctcttccgaatgaagatggtaaggaaggaaagggcgcgggaaagacagggggaggtgggaatgaacgagatggggagggagatgaagaagaagggtggatcgtccagccggcagatgtgcctggattgaaagaaagtggttggacgagagagatggacgagatgtgcgtgtttcttttctttttcttttcttttctttctttctttctttctcttcttgtttcttcctttcaatattgacatgaggtttccctattctcaatgaacctccttggctcgtctctttcggatggaacaggtcgaggagaccacttcggggaccacagcatgcggtgatgaaacacgtgttgtccgatcttcagaaccacgcgtccgcctggccgttcgcaaagccggtcaacaaggacgaagtggtggattactacaacgtggtcgaacacccgatgggtttgtttttttcttctttctttttttcttcctctgtagaacttcatcaaattctctttgtcgccgtctgttttgacaccgcttggtcacttttctggacgctgaacgggcaatgcttatcagatctatccacgatggaactcaagttggattctaatctatacccgacgttgaatgatttcctatcggacgccgggctcatcttttccaactgtcggcggttcaacccagagacgagcacgtacgtgaagaatgcgaacaagttggagaggtatatgaaagagcgaggtccgtcctttctttacacttaaaaacaatcttgagggttttttctcttttctgactgtctgaaacccctgtcgtttgtctggatagtcctggcatggacgggatgagaagcaggtggatgggaaaggaggcgagtgtgtggtcaggttaggatgagaggagaggaaaggaaagaaggggaaaggaacgcaaacacgagcatgggcgcagttacgaacgtgagcaggcaagaagggtgttgaggacaaacaaagacggctctaaatcgtcggaacgtcaactttcttccattctgttcgctcggtcgtacggcctttccccccttcgtcctcgggtctcaccggatgaaagggtagtgctcaaacatgaacccggagtctctctctctacaagtacaagggaacgggatgagaaagacagaggggagacccactcgagggatcgatcaatctttctgtcgctctcaagggttacattgtgatctgtaccgtcatcgtcaggctcaagaatgcatggtatatctgactgtatggaaaaggagaagtcatgtagaacgtgaatcatatgtttgatagatccatgatgcgtttatgcgtgtaactaggatcgaacgatgactcgtctgtccgattgggattgtttgacgagggagtaggagagacctggacaagaaagagagaacaaacggaaagagagaacaaacggaaagagagaacaaacggaaagagagaacaaacggaaagagagaacaaacggaaagagagaacaaacggaaagaaagaccaacccaacccgagtttctccctgtctgttccgagcttgttttaggacaagcgagccgatctgtcggccgaagcgaaggcagcaaaggcagcatgagcagcagggacagcagacacgacaagcgacaggcgacaggcaacagacgaaagctcaacgtgacctgtgggaaagccaaaaaaaaaaaaaaaaa

SEQ ID NO: 676 - DNA, 13455 bp, Xanthophyllomyces dendrorhous
aaaaaaaaaaaaaaaagaaggaacaggcaaaagaagatgaaagcaggcgtgcgagcgtttaccggctgaaatctttaccgggaattgccggaggcgagcgagtttcttctcgctccctcttaccagcagcagcactcactcactcactcactcacacccgtactagcacatacgcacgcacgcacactctctctcaatcactcacatcctcaattcctcctatcttctcactcacttaccccatctgactcttagtttcttgactccctcgccttttactgacccactcgagcatcgggctgatcgctttgttctgtttctatactgactcggtcgttcatcctcactggcgagatcttggctgaccctctgaacgttccactcacccatctcactcggtcgcccactcatccaaccactcacacacaaacacacaaacacacacatatccttgctagcattcctcttcggattggcttctttctcttagcgcattcacccgggagatcactgtttcttcttgtaaacacacacactctctctctccctctctcatacacaggagagaatatcagccttctcctctcgccaaacgtatataaacaaagaggtttcttctttgctcttctttaacaacagcatcgctcccattcatcactcctcctgtcactaccgttcctgcccttgatacatctctctcactttccttggcatccttttttgctttacatctctcctttccttccacccttccactcccactttcactcccactcccactcccattcctattcccgctcccgctcccactatggcatcgtttacatccaccccgttgacctcggcaccgtcgaatccaccaactctgtcatccacaccaccaccctcgccgccgtcgaacccagaaaaggcaaacataaaaccaaaagttccgttgggcacacatctcttagcaggaggaattgccggttagaactctattcttgtctctgataccttgtcttgtctcatccaacggttggcatcgtgactgaccgtatactatcatctccttcacatgtgccatctcaggtatggccgaggcctgtaagtccatcatctttctctgacttttaccaacgatgagccaatgtcaagatcagcactaaggactcatcctctcccaatcgaccttgttcctaggcatatgtcatcctctcggttggtctggtttctttcatctcgttcctcatttataccgctattctggttttctctcctgttcctttgagagcttatcgttcactctctacttgccgctaatttggtacagatactatcaaggtgagtcgagcagtgatccatgtccctcgccgtatcttcaggaacatgctgaccacctacctctcatctcctgttggtgacaacccataggtccgaatgcaactcaccaggtccagaaagctggctggtgtaagtctttactcccgttgctctcattctggcgcctcttcctacctcttcctatctctgatcctttctctttcggtcatctctagcttccaccgctctcgttctatgcaaccggtcgacaaattgtcgcaaaggaaactcccttgggactgtataaaggtctgggcgccgtcatcggagggattgtcccaaagatggccatccggttcgccagtttcgaaagtctgtcccctggttttctcacactctccgataacacgctccgtttatctgctgacaacctatcctgcgtttctttccttgtgaaaaacctggaagtgtacaagggcttctttgcggactctcagggaaaaactggtccggggaaagtgtttatctgttggttaccgtttatcgcttcctctccaaactggttcccatagaggccattatgaattctcaccgcccttctctctacctctacagccggtctgttggcaggagcgacagaggctgtcgctgttgttaccccaatggaagttgtcaagattcgattacaagctcagcttcactcgctatctgatccatccgaggttcccaaatatcgaaatgcggctcatgcagcctaccggatcgttggcgaagaaggactgggcacactctaccgaggagtcggcctcactgctttgagacaggcgaccaatcaggtcggtccaatccagtcttgccctatgcatttttactcgaattcttgcctaacatccgatgattgtcccgtgtacttttgatttcgtcgtagggtgttaacttcacggcctatcaagagttcaagaagctcgcgctcaaccttcaaccagcctttcaggaggcaggcgaactcccaagctatcagactttggttctcggtctcgtcagtggagcaatgggaccattctcaaagtaagtcccctgcgctccttcaagatgagacgaatcatgaggctgactcaaatgatctgttctttattgccaaaccggcctacagtgctccgatcgataccatcaagacgtagtctctgtttgttctttgcccttgtcttgaccaaagaatctgactcgtcccacctttctcttgatgttgtgccttgattgaaattatagtcggatccaaaaggcgtccaaggctccaggcgagaccgcgatatcacgtttcatgaaggtggcaggcgacatgttccgtgaagaaggcgccaaggcgttctacaagggaatcactccccgagtcctcagagtcgctcctggacaggctattgttttcacggtcagtaacctcgttcttgttgtgtttcttcccctcatcttgagttaactcccaggcgccatgaatgctgacaattgagccgagatattatattgccctgtatcaggtttacgagaaagtgaaaggcgcgattgagaatctgaaggcgagccctgtggaagatactagctatgatgcgtaggcttctctatttctgggtctggcccaaacccgatccgtgtttgctcctcctcatccttcctgcacacacccaaaaaagggtgggccgccgcgctctaaaccatgtgctatatgctgtggccatgatcccagagcaataaacactttcagtgccatctcttttcgctttctccattctccactattttccctcctatttttcatttagttccttctctactttattctcgctgtattcaaggttgtgtacgcttacgatgaacatgtgtaccctactcaagcggagatcattacatgacaaagactctggatggaatgacgtaagcgacgaatcagaagcatcccaaatctcttcacctcttcattcacatcaccccttcatctacagacccccgatcgacgttgactgaacgacaaccatatgctcatcagactcccgatacacttagccaaccgtatcaagtcccgtactctactcgcttcaccaaacagatcttttgctactctatcgactcttgagagaatgaagattacacctattaaaggtttgcttgaacccctcctctctatacctcgttctgtttcttatacatccctctttactctccacttcaagtcgagagacagacagactgatgagagtgaatgtaatgggtctctctgttctaatacagccagatcggacaattggatgtacatcatccaagacacaaactccaagaagggagcagtcgtagacccgttcaacgcggaaaagatctcggccgaggtcgccaaacagggtgtcgaagtgagttctttcctgagattctttcctctcacatacacatatgcgttcacattctttgtgcttgtatcttgatcttgattgaggggttctgctgatcgtcaagccctttaatgtgtgtgcttttggttttgatctcgttctcattccgcttcgtttcggttggccattgcactgggaataatttggaaaggttactcacctgatcacgactcaccatcattatgtatgtttctcacgattccttctctcattcctttatctatctctctctcttcgcacaacatgtatagactgacaaagctctgacgcttgttcgcctcaccttgatgtacgcgcgcatatggggggtttcttcatcaaataggatcacgctggtgggaacaaagacttcgtacgttctctttcttgcgcgtcggaattcactttgatcctttttttctgacggtcctaatttttgggacccttctttcctttccttgtccaataggtaaagaactttcctaacgtagtcgtcacaggtggttcgaacgaatgcgagggcgtgactcagatcgtgaaggacggcgaaacgttcaagatcggtgatgatctagaagtgacgtatgtttttggaatctatcactctaactctctcttttgctcggctcttctccagcgttgaccattgtatcgaaacttgactgacggtttctcttttctttgtggaatggttgaaaccctgttaggtgcattcacacgccttgtcatacccaggattcaatctgctatgtgagtgaccgtttgcttttgaaatgtgtgttggagaatcactccagaattctgatctccgtttattttctcttcctcttcgctccgccatgttcgttctttcttacttgttgggtaaacatgtcagtatgtagtcgataagaaatcggacgagaaagttgtctttacaggtgacacccttttcacaggtcagtttctattccttgttcatgagcacagctcgatccattctggtacacaaaatgatgtccaaccagacacttatgaatttcttgaaacttctattgatcgttattgtggtttctcagcgggatgtggaagattttttgaagggacgcccgaagagatgcattcttctcttcagaagctcgttcgtccctccttcctcctctctccccttcccgattctcatcctaattccttttcgtctcattctggggttgccttccttcatgtgttccgcctatcgtcaacaaccgaatagatgaaactgccggaaacgaccaaagtccttaacgggcatgaatacaccgccggttctgcaaagtttggttcgttctttcgtcctcttccacactctccttctcgtctatctctttcttggatgatcgagttgttgatctgtcattcacgtactcgttcgcttactcacctctgcccccgtgcccgcgcgcacgctcactttaacccacgcactctcaaatgaaccgaaacaataaaaaaggagcacacgtcgaacctaagaacgaatcgatccagacgctactcaaagcgaccgagcagggggactgtgtactgaatgggtatacgatcggggatgagaagcggtggaatgtgtttgtcagattaggggagaagagcgtccagtgagtgtctcctattcttccctctttgtcttcttttcttttgtttcgtttcggttgggattgggaggggaaaggcagatggaaagaagcacggaaactgatatttctctcttcgttcaatttcccctaacacgaacggtatcagagagtacacaaggacagttgacccggtcactgctatgggtgttcttagggagaagaagaactccttctagacaggcggaggtctgactgtgattgttaatcaaggggttgaggggttgaggttatgggagcatccacagtgaacggcggttctttgaattatgctatgaattcctcttcatttctttggttgtaactctggacgactgatatatatgtgcccactcagatcactgttcgcttgctgttcaacggcttctttctttctttctttctcgctccgaattgactttattcgagacaacatgtatatacagataatcatacgataaatgggacagtacctgaatggagtcggcaaagagaccaaagtcagcaaaccgacgttctctttgcaaggaatacagccaaattggagcgtagagggcgaatcaggatatgttgttgcacgaattttgttgcgtgcggtttcaacaggatgatgatccagcaggaggttaagctcctgacaggatcgatctgaagaccgtcgtgatatagacatcattcaaaggaggcgttggggtgatctggagggaacaacgaaagcaaaagaactaacctttttgaaaacttgatgggcagatgttttgagctattagagtttacactgagcaaaagcatgacaagtgatttgaatgtcagccttgagatccgggaaataacacggagtccaatggaacgagaacagctggggaagcatcattacacatcacgcgaagtgacaatgcagccttgtgtgtatcaatcacaaactggaagcccgcaggcctccagcatctgacggtaattacataaataatcttttggatccccagctacgagggtggatggggtgggtagacataggaataaagcgcactcacgaaagtagaaagaaaaaatagaagcccctgcaggagataggttagtatgagcaaattcaaagatctggttcaaaaacagaacagccaaaagtcagttcaagccgttcttctttctctcgcttaaaaccacaaagcagacggcaaggatgtcgatttgaaatcagagtgttgttttatcgtctgcgcctttccactcacacaggagaaggatcggctcggagactctagtttgaaaagatttatacacaagagttcatccatttccaggaggcgtgggagaggacatgtttgtgtgcgaggatgaaaatcgtgaactcaccaattgtcagtaatcaatgagaatccccagaagctctcagggaagatgtagaacgaagaaagaaatggcgaaaaagtagagtccttttgaactcacaaggtcttgcgccagggccggtcctcgagtttgggtcacgtgattgtgtgttcgaagaccacggaaggctgtgcgggtagccgcgggttacgatatatgtacccggaagaggtgagcgcgggaacagcaattcaggctcctgatttggttgtctttgacaagagaaggtgaacgaaacacatggaacaagggaaacagggtggatagatcgcaggttgctgggacatagtcacaggataaagagatataagaggaggattaatcttggtagactgaacccatgagatataagatgttggtggcttgtggtctgaagatacccaggcccaagaggatcacgtatcggccgtcattggttagggttgctctcaccatgcttaaacgcaaggcatctcattcttcctcactttcttcccctgtagcattgacatgccatcttcagatcctccttcgacctcggtcgctctccaagagcatgtcttctattgtttcgatgtccttcatgcatacctttcaagcagaggtgatgacagtcagacgatctcccctaggttcccttcgccttctgaaccttagtaagtctctcgctctttcttcattgatagtcatagacgaacgagaacacaactgcaagatccagaaaccaatacctctctgaaatgttccacttactcttatcccgtcaatcaaagtgccatctttgttacatggaacacacttcgatcgggaaaggaaccacggttgagaggctgcatcgggaacttcaagcccgctccgttagcagatcagctggctcaatacgccatcatcaggtccgtccgtatatctatcctgacttctcttatccttcaccactcacatcaagcttgagccactgtattggctcgcccagcgctacggaagatggccgtttcacgcctgtccggctatctaaacttcccgacctgggatgcgggtgcgccttgtttcggatctccccgtctaaccctaacagactgattgacgttaagaacctccaaactacttgtgcacacaggatctccatccttacacctttcgaagcttgcaaagatcctctagactgggagatcggaactcatggcatttatatcacctttagacatcctcacaccaaggtttggcctatgtccttacctcggcctcttcaaacgagctcaaaactctgctgaccgtatgactaactcgtcgatgacattgaaatcgacggtctgactcatagcgaacactcacagccacatacctaccccagatcgcctctgaacaaggctggtcaaagattgagaccctccagagcgccgttcataaggccgggttcaacggcgatcttgatcaagtctggcagccagatcaggagagtactttgagcgttcagcgatataggagtgagaaggcagaagcttcttgggcagaatggcaggccgctagagcgtaatttatctctatcttgtttctttaggtttcttttgtttcaacatcttgtagtctcggccactagaaagaactcctaggatactttctctgtgttctgtctttgatctgtttgagggactttcttttctctttctttttccatcatagttgtaatcgtttagatatcttttctgcccagacttcgcattaccgatcgatcaaacggatcataaaataaagctctgagctaacgatatgtgacgagtgaaaaaaaaaatatggaaaaaagatgaagaaagcaaaacgaaaagtttcgctcagaaacctccaccggtttcccgattgtgctctgccgccttccttctttgagcatcctccaacttgggacagttgcttgctgcgtgtcccaaaccaccacaaaccggacaacccgttcctgcgtatccagcattgggatcctcgagggctgccaagaacggagggatcctgtagaaaacaagtttttttccctccctccttaatcagcatcctttcgatcatccactttacaaacagaccaccaagaggaaggaaataaagaaagactcacctctgcttggcctccttgagtagatacttgagatccaaaagggtctgttcagtggtctgcatgtttacaaatgtagtagcaatacctgtctttccagaacgacccgtacgaccgatctgatggacataatcctcgatttctttaggcatcgtgtagttctgtcggataaaaacaaggaacgaaaacgatcagaaactcgatggtgaagatgagtgaaacaaggccaagaagacggaaaatcgtacaatgacgtgttgaatttcgttgaaatcaagacctttggaagctactccagaagccaccatcacatctttcgcgccagatttgaacgatcggatcgcatactctcgttcttcctgggctgttaaaaacaaaaagagaaggggaaaaaacccgttcagtacgtctaggactagggaacattgtaggcttaagaaagacaacggtagacatacttttggatccatggatggcaacagcctcaactcccttcaaaagcagatattcctggatatctacatcaaatccaagacgaacattcgtatgatcaaccacggtcagtcgaactttccagatcatgataacgagataaatattcttcaagaaagaatttctcaccatctacctcattcttgttatcactgaagacgactacgggtggcggggtcttttgcaagcactccaaaagatagaccatctttgcttcctgtttgacgtactctacttcctggatgatgtccaaattggcagctccagcacgaccacagtttacaagaataggcttggtaagagattgttgcgcaaagttctggattgttttcggcatagtggcagagaatagcaaggtttgacgttgttgcttgaaagcgagaaaaagagagaggagtatggtgcgtgagtcaaacagtttacgaagcagtcttccaggaaggaaagagcaaagataccttgaagtaactcataatctctcggacgttttcctcgaaacccatatcaatcattcgatcggcctcatctaagcatagatatcttttcaaggaaagcattcgcgccgtcagatggataactcgatagttgtaagatagacaaggaagatggtagcagaaaaagaacagtcactcacttgcaggcatccaatccaaatcgttttttcgacaacatatcgatcaatcgaccaggcgtagcgactacgatatgcagtcctttggacaacacgtccgactgctcctgcatcgagattcctccaatcgtaagtaagactccaagctgaggataaccaccctcagccaacgcggtgcacatttcttgaactccttcatatgtctgtcgagccaactctcgctgtgttcgaggaagtaagaaaacccagtttgagctcctatcttaatgtcatgaaagaatcaatgttcaagaggagtgataaacgtaccgatggacaaacgatcattcctacagggccctctccttttgtgaaaggcatctttcgctcctcctctagcgcgagcatgatagctggtaaagagaaagcaagcgtttttccggatccggtgaaagcaataccgatcatatctcgccctgagaacctggtttgtaccgagcgccatatggtttccatgtcagacgatataccactcaaaatagaacgacacggacaatgtccgcgaaaaacaaaggaaagaacgaacgcagtaggaatcccctgaatctgaataggggtgggatgcatgatcttcttgttcttcagatactttaagagcggaggaggcaatttcatatcctgttcgaagtagtgccaacatggttactatggtcgatcaccaagaagacgaatggaggaaggaaaagacaaacctggaactcgggcgtcggcggcggcacatcatctccctccacgaataaatggtacttttctctgatcttggcatgctcctcctctgtcttggtcaggatatatctgggggctcgccatctatgatacatcaagaaaatccggatatcagttcatgaactttcgacctcttttcgccactttctcagccatagcgtgaagagaagctagagtaacccggagaacgacttacgtggctggaagactgtttccgtactctactccctgagcaagctcagcgttactagccaactttctctgctggcctgcaagctctttgatcaacttttcctcctcctccaaccgaagctgctcctgactcttcaacgcgtccgcctccatctttcgcctcttgacctctgctgcattatccaagagcgtccgttcccttcttgccttctccctctttcttgccaattcatcctctcgctccttctcaagatcagccaaatcctcaaggtgctgtttctcttttccacccttagaggctaacgtttggaaacgagcttcccgacgagcagcaagtgggacgtaagggacatagttgtcctcctctggcgcaggttcctcctcaacaggttgtcgataccgatgagagacaaacagcttggaagatgaagatgaggaggacggttctggaggaggaggagcaacgtcagtcatgatgttctctggtcaaaggagggttgtgtggatgttcagtgggtaattcaagatatatcagatcagcggatgagttcgtgacaaatagagcgtgttttgatatcagcctggcctcaggcttggtcaaagactacaacttttggtgatcatcgcattacacaatttgtagttctttttcaatttccttctagatccttcctactttctatctatctttatttgggtgagtcatactaatgaacgctggtacccaagcttcatggtcatgatcatcttgaacgatagacgtggtttgaagatgtgttttaggtcaaagtctccactctcaacatttctcatgaataacttggcaactgttccgttcctgcgcctacgttcgaactcggatcgtccacccgctgaacacccccctcgatagaccttccttcgcccatataaggaggcggtacccctccaccttcaatactattcacagccagacccgtctgtatttgctgtagttgaacgctctccagtgcgggcgcctcttctactcgctcatgtggtcccacagataaggttgtcaagtgtgctcctccggtcaatggatttcccaacagtgtctctagtcgatgttccctactacctatcctattggtttcaacatctccgaatatgggcggcagatcgttcgggtcatccattctttcccccctcctttcttcgtctctaatgatcccacggatgggactggtccccctcgtacccccaccgccgccttcccttccaatgatgccaacgccgtttgattctgcattcgctgctccagaggatcgactcatgaccagcgcatctacaacttcgcctactaccgaagcaggtactccccgttgcatcgtaggggcaacttcttcacctgccgccatcgagttcaacatcgactcaacctctgcagccaacaatgacggacgttcaccttccaacggagggtcgatggacgatgtcgaaccatatgcgacagataggtctggaggcggatctgagaatacctcataaccatcgtattcaacccatgttgcagggaggttggcaggatcgatgaagtctaaagcggagagagaaagagaaggaacatagggagactgtatagttgatgatgggacgacaagatctgaagccagatgatggggcgcaggaactgaaggagtagaggagggcgaaggctgaaaccgtggaggctgaggataacttggaacggaccctgtcggggtttgattgatatattcttggaatgaaggtggggccaccgccgttggagagtctggttggaacgcgggtggaggaagaggaggtaattccgagaaggggggaggattaagtgacgaacttgaaattcgatggtacgttgcgggctgaccgaccgaagatggaggttgtggagtgccctgtgatgatgatgaagcatatctatgatcagagcgcgggtgaggatctcgaacgaggaaaggaggaggatcttcctgttgcaccggtggacctggctgggagctatcggttgcaagagagctagatccaccggccgaaccctctctaattgtgactccttgccacatactctgctttgatgaagtactgttctccgtaattgaggagctcgctggttcagtagtcgttctctctgcttcttctccctcgatgtcaactagatcccccaagacttgtatttctcgctcgtactccaattcgtctactcttccgccgatgaatccgaccatcaccttgacccagaaccggatttctacccatccattctcagaccacggccgagtagacagggtgagatgaccacaggtaagctggtaggacgatgagggtgatagtggaggatgaagcgagaggcgtaagcggataggtgatgtgagcgagaacctgcacgatgaacctgtggacgtcaacaaggtagaagacgtgctctggtcggagtcactcgaatctaaggtcgtagctactgaagaaggcccgcgaggagttctagtgggctccccaggttgtcgcgcaccgtgatgaacggtaacgactctccatagctcggctcgtacgttgcgt

SEQ ID NO: 677 - DNA, 26095 bp, Xanthophyllomyces dendrorhous
gcgtagcacagctccagtccgcaaggcttctgtctgtagaggtatgggaatctctatccagagtctcagggtttccgtctttcgcacccgaatttttgggaatcctattaaaattggacttggcagaaagctcggaggtggaatttgagctagataaggtgctgggtgatctgaatcagcatggtctccgtttggacaaagatgaaactccatggtctctgtgataacgagaagaccttcggaattggaagatacagcggtggacgatcgagactgatacatttcaagagcagatgacgtagggtggtaaagtgttagagagacggagagactgtaagcgagcgagatactagggtgatgaaggcattgaggcaaatccgaagggatgggtatacggaatgactggcgaggagcagtgacgtgtgtaagggtagccatagaaccggaaggtgttaacgatgtgtttgcacaaggaggaatcagctgagacctgcgaaagaggatctgtggtgtagttgttggagttgagaggttgagagtaatggtcactgatctgcggatatacaaggagttcccaacaagctaatagtcagcatttccacaatataaaccaaagcaatcgaagatagaccgacaattctcttattgcggatgatagacctttcatcatgacttcaccctcgatgtatgccttgctgtccctttcgcctagtgtacctatgagaaacgagctactatgaggcagcggcgccaaaaggatggatactggctcggccaaaggaggaaggtcggctatgctgaccgaggcgaatgggtgagatgtcaagcgagagggagcatagcaggcactggtagaggatgcatatgttggaggatttggaaagctcatacaagacctgatagacggactgtgaggtctagtatgtgtatgctgatgtgagtaggtgtgtctgttgatgtgagtaggtgtgtctgtatagatcgatagagagacgagggacctgatgacaaagtatagggctttaccggactcaccccaatttgtccatatttagccggacatgatcacgtgtaaccccatatatccccaatattaaccatacgcaattgcatacattcacgtgaacacgtcatttatcacgtggttcaatccctcaccgggtcacactgcgcaatgcgctcgagatgtttcgtccccaactccatctgattccccatctcttttttcctcgtcacctcaactttcccatatattcatctgagaatctatccatctcactttctgatatcaccttcacactgctatctaacagaacatccacaacaatggcctcgtacgtgtttattgttcgcttcatctgtcgatctgttgtgctcatatgagttgatgtacgtcactcatctcggttatccctcattcttgggattgtttgttttgtcatatcagatccaattctcctagcaaaggacctgctggttcggaccctttctctgcccttgctgaatttccataattctatccttatctaataatctctttccgttctcatttactcacttacatctgtctacaatagaacaaaattctgaagacaactatcagaactaccaggatgacagtaagtgcctccgacattgtctctgtgtggtccacatagtcctcatactcatagacagccctctgttcacaattgaacttcttttaggtacctcatccggcggctacggtggaacgtccaattcattttctcgatctaaccagatgggaggagatgattcggatcgaggtggccagttcggaaagaacagttccagtgcctcacaggataacttcgagtcccacaaagaccgaggtcgaaactcgactggaagctctgaccaggattacgctagcggaacatcgactccctacagttacgaggagactggcaagggaaccgagggttcccttgattacagcaacagcagcggtcgtaagttatcagatattctatcagtacatacggtgaccttctgaatattaaccctctgagccccttctttcgcgactctttgcagaagaacctcctcacaaccaaggttcctccaactctattggagcctaaacgatgaggattcttgattcgtttagcgttgtttcttattttctctctttcgaactgtacttagcctcagatatatcgatagcatgctcgcgttagatcattcactagaagagaaagggcacatctctatccgcgaaaaaagttcttgatggcagcacctggctgacataagactaatatgactctaaggaagatcaactagaacgtagagattgtacatgagagccatcatcatgatcgtaggctcgcaagataagtggaccagacaggaatgaccgaatcaagacaagatgcagaagaaaaagtatagaaaagaagatgaagttgtccattcagttggcctcgacgaaagccctgtaggcctgcaaggctccgttcgcacttaactcgagttcctgtccagccgcgatgaaccaaacagcacccgtctcgagttcactttccacctctccacagatcaactttccagttccctcggtaatcaaaagaatactcggtccgtccaccgctggctgtttctccttctctccggatgggagatgagtatgcgccacggaaaactcatcaatcggaggatcatacagcttggtgtgagctaacgacttgaactgatcagggttcatcaattgagcgtcgggaggagcagaatagtaggtcaacattgagacgagcgtagggacatctcggagtttaggagtcagaccggctcggacgacgttatcagaggtcgccatgcactcgacgatgtctgttgatcatgaaaagaaaagaaaaagaaagacaatccaagaagaacagcccggttgagaccttcgtttgcaagaaagatagacaagaaaatggaagaaagaaacgaacctccagagatgtaagcgtgcggttcatccgccttcaagaacgctcctcctccaggttctaacgagacgacgttcaagaggaaagagcaaaagacaccgatatcatccgggaactgctcattcaacgatcgaactagctctctcaactcttttgtctcaacctcctcgttcacctcgactccaccaacctcgtatctgttgacgagcttggccaactgggtcttgacctcggcctcatcagctgtcatcagagactcaaacacctcacgaagggcaaccttggagggatcatgggaaagcgggagagacgtttggccggcacacgcgataaaagtcgtcttggcttgagagctgatgagatcagagaattcggggacgacggagaggaaggaggcaatctcggctaatggacggaaaccgacaaaggctttgaagggggtgatggcgatcgccatctcaggctatttcaccaacgtgcgaggcaaacagacacgaggtgacagaggaaaaatcgagaataagtgagcgtcacgagagatttgaatcaagttagggttgcatacgaaccttgtgattgtcgtccttgtacacgtccggcctgtccttgtgcaactgttccgctagctgcttgttagggtgagcctgaatgctaagcgccttaccgatagcaagcaccttgaataagaatgggagatcatctccaaatcgttcttgaactttaggtcccaagtaggctttcgggtcggacgcaattatcttggagagaagctccgaggtctccgcacgggaagaagggcaggatgggtgggtacccatccagagctaaacaagcgggaagacatagacaaggaaggaattgtattgagctcagaaccaagacaagaaagacctgggggcaaccatataagatcgagcagatagcagcgaaaggaggtctatagcgtcgaaatcatggtctcaaaacctccctggtatcttttgactctatcataccaacccttgacacgttgctacccggtaaataccactcacctcggcgtagggcttgccttcctcgatcttgaaacccttggtggtttttccaaactgggcagccttagaatcgcttccaatctttccccattcgtaggactggacaccggtagagagctggaaggcaggagtgaaggtagacatgctaaagagggctgaatgagtgagaaagatgtaggtaatggagactcgttcgttcgcccttcggggcgtagcttaacttgtgtcagtgaaacagatcacgtggcatgtcacgtgtattgtcacacgtgcaacacagccttgatctcgctatctttatggcttggctttctcaatctctccttatttgaggtcccatcaacatcgagatgacttcgaatccggagcaatcccatgccatgttggttttttttacttcctgtgaaactgattcggttacgtatcgaagatgttgttctccaagctaacgccgtatgatgtgtttgtacatcttaacatgtaatcggatatatctgcttgattccttctcagctcctcgtttagccttcttctattcctcgcgttatgtacattttgttatttaagtcctcttgagcctccaagataccctgaatcaagtgctcgaccgattttggcactggatatacccgttccaggctgctcaaatgcgtcctatgagtaagctacgcctggcttcctttcacctcggaaatttcgccattactcggctcttgatgacgaagatgtgttgaccctgatgcgcctgtgaattaattcttctgataattaagactaactctcccgagagagaaagcttgtattctgattctggccggaaatcaagatgatgtaggactcaaaagctctctagagtcatttgagcgaatggtttgttctcactatacattccatgttcaaatccttgcgcgcgcgggctcctatcactactaacgttctcttcttctcgctagttcaacgctcaattcagatacccatacgttcttctttctgatacccaaatcaccgatgagtttcttacatccatcaaagaaatacttcatccggacgcggtagttgagtcaggattgatctcgcacgaacagggctggggggtcccagactggatggatagtgaggctgtacaagaggcgttgaagatgcagaagaagcagggcgtccagcatggtggtgaagagagctatcgtaagtgccgtcttcttggtcaggaatatcagattgtgttcaaagtgttctgaagctatttgatgtcccaatgaaactcatccagacaatacgtacaggttctattccggaccttttgccgtgcatccattattggccaagtccgttctactgagactatgcacgataccacgtctttgtgtagccacagtctgacagtagaggctggctgcttctcttcttgaaaacttataccacacagatacgagtggtactggcgtctggaatcagagtttgtttcagcctttccctcgaatgtctatttgcgccacgtacagtacctgacttctgtttcttctctcttctttgtcaaaatgtgatgctgcagcgttggttttttctgcaagttgaactatgagtgaatttcttcttcctgttgataaatacctggtcttggtggtttctgtatgtttaacacctttcacacctctacccacttagtccttttcgtttcatggcgacaaacagcaaggtctatgggttcaatatcgccagtgtgtatcacataagatcatcgtatcgcttcttatgtactgaagaacttgaaaaacctgataggaagtctgttctctgcccgtcatctctttcttagtggtagaacaggagaacaccatcccgacgttgttcgagacagtgtccgcttatagagataatctcatttcgacaggagcaatcaaacccaactcgtactgtgcgcttgattctatccatctctgacgctttctctttgtcaaaaacgcactctgttctaacattggtctgttcaactttgatcgcctgctgttctttgtttctgttagggagtatgtttgaggctgacgggagaggaaaacacggcgatggcggaaaacctttgaaaaatggaaattcagggtacaatttatgccagtattggacaaactttggttcgtccctactcctgtcatctctcatacttacccctgttcttgtgttctcatctgcgcaccctgaggctaactaattcagcgctttgttcgtcgtacagagatcggaagtctgaatttttttaggtcgaaacagtatcaggaattgttccatcatctagatcagactggaaacttctattttgaaagatggggagatgcatccagtctgtcacaatttctttcttctctcgtatcttctcctttttttaactggtttcttactcgatacctcgcggatctatgctcaattcatctctttctccttctgataattgcactggctgtactgattagtccgttcgttagctctcggtctcttcacaaacttcactcaaacacagtacgttcttttctactctgtcttccatctctctttcaaaatgcgacaagaagagctaaccatctaacgactgacttgatttgcagttactttgaagatatagcgtatacacagtttcgtatttttctcttttccttttctttgcctacatatcagcggctggtactgaccttgtgctggttgatgcagtcactcctggatgtactgtccaacgagaggagggataggatgcgactgctcgtgtcctcctaaggtcaaaaacatcgcactggacgaatcaaagtcgtttgtcctctcaattcatactttattcgtcctagatctgtgctcacatcaggttccctccttgatctgtctgttgttccgggatgacaaaggtgcttgagccggtggcaagatatcaatcgggctttatgagatgctataatcagaatcaagctagagtcgaaactctagaacggaaagaatgaagcgagagacgtatgtgctcgttgatacgcaaagaaaggaaaattcaggttgaatgacatatattttttcgttaatgcgatcacgtctatctatccatccatcctcctttctcttcacattcactccattgccttttcattatcactattttcctcctcatcatgctcaatcgctccgattcctgatctcaaccgttcttccctctcacctacatgtctctctacacctctcaggaaatcatttgtacaaagaaagtggatcacttgagaaaggtcggatgtagtatgttgaatgtctgtctcgagaagcgaatgaagcagagaaggccgagtcgatggacggggctgaatccgaggattgggagtcggtgtcggtcggggttgttgagtcggacgaagggcgttgggcttgtatgttaaatagaataaaatcatacgtcaagaaacgatgtcgatagggagagggaaagagcacaagaaagaacaggtatagacaggaggatcaaatacaacttacattgctgatacaatcggggtcttcctgttcgttttggtgtgcaaatcgacaggcgttgcccattttgcaacctttctttgttctgaagtaggagcacacaggtttggcccgtgctccttctttcccttccccttcagcagtggggagcttggatgatgagccttctggggggccgtcttcatcactcgatgattcatcttcctcagaagaactatcctcgtcttctgatgatgaagaggaggaggaggaggatagagggtcgctatcaaaatcatcatccaacagtccttctttctttgctttctcgtatgcttccaggtcaacacctcgaccttttgacccaggtttagcaggacgattctctgatggctttttgccctgcggtcgagaagaagaaagctgattcctggtattgcctctacctcgagtgaccccacctctgcctcgaccgcgggcggatgccgaacggaaaggcagctcacccctagaaacagcttcttcatgcattttttccttcacagaatgaaagtgaaatgtttgttttgtggattagccgcgctagtaccatgatcactaggcagagtgttgaaggttgactctatgaacgggatgtgttaagtacatactttttcttgaaccctagcttgagtaggccatttccgcttcctttctgcgatccaggcttcaatctgttcgggagtctggagcaccatcgttgttcctggaattggaaccggaggtctatcatcgattgatttactcatcaaaaacgtcagctcatctaatcctcgtcaaaagaattaaagagagagatttgacgtgacataccctccgttggactttgcctttttgcgctccatcttctccttccaaccgactggatagatcagatgtctatccatttcatgaatttctacatccttctcaagtccagtgaaatgacaggatgataattgacaatttcgcattcgctgagcagggttgagtgcttgatggtccagtttcggctgcttcgccttcttctctgatctgccggctgtcggatgaggatgatccgatatggacgacgaggacttcggagtaaaagaggaggaagaaggggcagacggagaagaaacaggctgggacgtgaagtgtgtagagagcgtgtagccctgaggcgtctgttggtacggatttgaaggatacccgaacggctgaagcggatggccagagtaagcgttgttcatggatggatagcttccagcccagacattaggattcggatttgaaagtgcttggagagcattggaggcagctaaggaggctagattgaagcctgaaggagaatatatgggtccagttattggtgctggataagctggaagattaggcaattgatgtggataagacgaagacgattgaggttgaggttgaggctgagactgatgttgaaggagagtagggttggacggaagatttgacggaaggtttgagcgcaaacgtggtggaggagcggcagcggaagaatcaggagcaggttgacctgatggtcgttgaggaagagaatgatgcatctgtttagctgagctcactgatcaacggccaaacggtcaaggtcaagatcaagctcgatgtctacgtcgagccaagtcaaacaacgctggtcaaacctcaaccaacatttttgggcatgaagtcatcttgagaaaggcatacagcacagccttgaatgtggcgatcgacttggcggtcttgcggcaccgcaacacgtgactctgcggctgtttgtgatgatcagagatcgcattttcatcctgcagttgcacctaccatcctttggcgtctctctgtttgtgtctacatcagactattgttaaacaagcttggtggacttctagttcaacaaggcatatagtgaaccagccaaactgtcgtcctacgctcccatagatcgatcgcctcaatctccctcgggatcgacctcgtcgcgctaccaggaagatatcaacctgggcgaccctcctcggagttactacactcatcaacccccggcccagaggtttctgagaagggcacacgccctattatcacccaaggttcttctctcaggtagaggaatcaccgtaggaggcgtcctgggtagcgtggtgctgctctggatcattcttaatctctctgggacgtcctccaaaacagtcatcccgcccagcaagcgtccggcagggtacaacgacaaggcgtaccagctcctttattacccagaacatccaaacacgtgtagattccaagaaccaggcgctggcctcacgaaagatgaactagaggtttatcaatcgttgcaggctgcgttgagttctcctcataagaaacctcactccagatggcaaggtggaatcaaactcgatttaccaacgtcgcctgccgtgttagaacatgagggtgaagtaagcgagcgtagccatctaggatacaagtttggcttggatggaaacattcatccgatattcagtctcttggcttggggagaggaaaagttcgcgggcatggtccagagacggagtgaaagtttggaggaggccgtgagtgagtacaagaaaaggtacggtagaaatccaccaagagggttcgacaaatggtgggactacgtgagtgttttgctctgtattccttgtagtcctcttatttgggtttaactcatctgtcgagtgctaatgtatcggagtttgtgctgacaatttccttccaggccacaaaaaataacgtactgctacccgatgagtacgacagcatcgaagactctcttgcacctttccgagcatttacccgacgcgatctcctctcacgcttggaggaagcaaaatctgtccgagacaccgttatcttgaggcaccgacggggaactggaaccagcgctgtttacaccgcagggttgagcgaaaacgattattggacaaaccgacggtcggacggacagttacttttgataccagaagaggtccgacgcgtacttccggattttgagtaagctgcttgtttctcctttccattgaatgcgcgcaatttgtttgccattcgctctatcctctacacccgagtatcagatataaaattcatacgagtctgcaaatgaggttcacttgattggacgactgacacccgtttcgtttgatcaatttctcttcaacctagtattgtctttggtctcaaagatgagcctcaagttttatccgactgggaaacaaaagctaaactttatgatctttccgcacacaatgaaagtaagttcgccttgaaagtcttcgatatcttatcgttcttcatacaaacatgatcgatctatgaattctcaattcaagctcatactattttgtctctatgtagaacttccggaaaactctcctttaccatatgcgtcctctagattgttgtttccaaattcatgctcgcccagtacgcctttacgtcaaggtcttcccgaagagccgtcccatcttgcgtttatctccccagaatcacacaggagagcccaagatccatgcctgcacccatacatcgcggacaaccacggtttcctgatcgacgagaagggggaatggaccaatcctgttgttaggttcggcggcaaggtgcatacactttcccttttcttacggccctgcccttcgactgacctattcttgttctatggacatatatatgcgtggatgaatagctattaccactcttgtgcttgagtaaggtggaaggaatgactgatttaggcggaataccttttgaagaggttcgttgcagactataggaatttttctgcatcgtatcttccagaggacaataaactcacttcccttcatgttatgtttccttctgcaggagggttttgatcttgtgagcaaagacaagacaccttggagctctaaggatgaaaaattatattgggtacgtcttatcgttcgctttctgccttgttgaatgattccagtttgagttgcttaggtctatttggatctcttctcgttgttttgaacctttccagagaggacaatgtactggactgtaggcctcgtcttgttaaaacattttgcctcttgagaaaaatctgacgcgttctacgcctatccacatccagtttcaagtcgaaaggacatggttcgtatcttatcgatctcgttctttcgtcttcctgagttcattcttctgttctttcttaatttgatctcctttccacctctgaatcaaggtcaccgctggcgtcaatctcacagagcccgacttcataaaatggtcaatgacccgtctacactgaagacggttcctgtactccttaccaacgctgatagtggggaggcaaaaaccgaagtgttctcacccactcagattagggagtggggatacgacatcagcttgagtgggaaggctgtacagtgtgaccaagaggatggaacatgtgcagacatggagtgagtctgtgaagctctatcatttgttcaaatcatatggactgacctgaggtgaatcttgggcgaacgtgtcttcagtcaagtcttcaagtttgctccgttagactctcaagaaaaagcaaacgtatgtcctcttccgacaattctgttcttcatcagatatgattaatttatctatgcgatcttgatccttgtctattattggtgtgaacgtgccgaatgagcagaaccataaatatctattcgacatcgacgtatgtctcttcttgatttctgctgcactcctttttttttctttccatatccctctcgcaaatcattcaccttcgccctcaatcaattgaactgaatcgaaacgttgtagggaaatgcatggacgagccgattccgacgactgatgatgagcaacaggttcgccttcatattctttcctcacatgtttctcatatttttgcacgaggcgagggtgttaatcttttcgaattttctccttctctgtgattgtaaagtttggtattcaagagcacgatttgtacgtcaactgtcctttgcggatgagttttctaggttattgattgagtcgattatatcatcttttacgattcacagtccctgaatggagtaagccgcctgtcttctcttctatgtatagacatagagcattagatctagagacgatgagcgataacaaattacagccggactgatcgagttcttgattttaaattacagatacggacatcctacctgaatggtttgcgtatgtgcccatcaagatggattataccgacacaccttctgtcctcgccttgtttgtattatctcttcctttcgtgttttaaaacgaatccttgtgctgacaaatatcattttcaatcacacataaatcttcattcaaatcaaccacaacaaacagcttccgaggatctccaccagagaaaggctcaggctcttcatggccatcgttctcagctgagaaaggtttaagggacgaagtggctaagcgaatggctgataatggccgatgttgggtggagaggacatggcgtaaaggttcgttcttgcctctgctctctttcccttgctactcgcctttgactacgtgcttactggatattgttcatatagaggatatggtggtctacatgtatcggttttaccttggttcgtcttctttgtttccctttatgttaatttcgaaagcagacgatggctgatctcaccctctgtgatttcgatatcttgtctttgttctttcaaatagaatgggcgaggcttgtgcacgaagatcggggagatttggagatggccgattgaggagatatgtgaactgggtcctttcaatcagatcgggatggtgtcggaagactgtttgagattaaattcggagcaacaggtggatgagaacagagaaaggatgttcgggtgcacaggtctatttatgcttatcttagctcttcataagccaaaaatgtcctctcatgatttagacccagatctagctcttgttgatcagagaaagtctcttcatgaagagaagagactggtcagcggaacaggtcgaagacagtgtgagatgccagaggaaaaacgatttgaagggtcagtgatggaaagaaggagaggtgttgtggctaacgccattggtcggttaattagacacgatttctcgggaacaggtttccttgtatcagtgtagatcagtctcgtattcgaagagtaagagagctgtcttatatgcttatatgtgtgtcaatcgtcatcttccgggagaaccgacttgccctcaagaaatgagagagaaaaaaagcaaaataagatcaaaaccaccgtccgcctcacacttcctatctacggcttactcgtccttgtttccctgtgtgtttgatttgagaaggacagaagaaaagcgaagaaagagatgcccggtcgtttttcagaatgagcaggttaaaaaaggaatagtcagtttccgttgtatcgcgaaatagaatctctagacggatgatacccaatcaaggagatagggagagaaaattgaaaactacagagcaaacaaaagaaaaagaacgaacaagaacaagcttgtatccggtatcggcggatgccacggtgctgacagcgaggagggcaaggtagaactctgtttcatgagaagagaacgagaacgaagaagcagatacaaaatcaggacttctgtagctttcaatactgtaaggtagatgctattttgctattctttctatctcgcttctttctatctcttatgttctgatgggcgagccaagggagcacatgtttcgaaagaaacaagagacaaggtgaaggcgagatgcaagcgaggaagatagccgagaggcaaaagaaagaaaggcgaagaaaggacacatactgaagtaggtctttcctcggcccaaaaggtagacgggggtgtccttctcggactggaaagctcgctgcttagcgatgatatcgtttcgtccgtcaaggaatcgcttgaagatcgatcgattgatcggctgggcgtttcgaaggagggaggtagctcgcatctttatctattctagagaggagcagaggaagaaaaaaagattggccagacaggatggggtaggaaaaaaaccaaaaaaaattcgataaaaacacaacaaacagacgcgacctcgttagaaatggagacagaagcagcagtagacatttgaacgaccactctagtgagccagacaaggacgtacgaagaaggttagagatctggctggctggctgggatggatgatgatcaacgaaagagaaagtgaaaacgaaccgagggcgaaggcggaggaagacttgtaatgttacgggggctgttatgcttatgtaatcgcaacgcgtaaccattcctctttctcttccaattgactatcatcattttcagagtcaagccttaccatccatcatcatcatcatcgtccatctatcccacatggctctcgtagactatgtctcagactctgattcagagggatcagatcaagaggtagccgctccagctgttactaaagccgctccttccaaagctatatccgcttgtactgtcatcccttcaacagcacatatcaaaagagcaatctctccgcctcgagctcctatcccctcggcctctggatcaggtctagcccttcctcctccaaaatctaatatccgcaaacggcctgctcctaaattcaccatcgaggctgcttcagatgccgatacttctgccactgcaacgagcggatcgaattcggtcgagaatccggtggccaaaaaaccgaaacagaccccggcaggtagttcggccttactctcgatgcttcctccacctaaacaagcactaccgaaacccaaggcaatgcctgcgcctgtcaggttgaaacctcttgaggtggatgctgaaggcagagttgagtcgttcgagagagttgtagaggaagacgatggaacaggtggtcacaccggtgaggtcatcgatttcagtaggaaaggaccggtaggggagcccaagagaccggtgatcgtcaggccgttggatacaaaagcaaacggcggatcttcagcaaaatcgaaatcaaaagaagctccgttaatggatttttttggtattagtgagtcgaaatttttcttctagttctgctcacacctcagttgttttgaagattattatgaacacttacaacatactctgtctgaagctgcatcaacttcatccgtaccgtctgccgccagcctatcaaatacctctgcgcctcccaagatctcttctgctcctcagcttcctacattccgaccaccatctcctacgcgtctagacccatatcctggttactacgctcttccctctggagaatgggcagcacacgaccgagcgtactacgatagttactaccgtcaatggcgagaagaagacgaggctgcatcaggtgggaaggaagggtcgaactgggatgcactggatcagggaagagagattgtcgatgagattgatgtcagagggatgggcgcgaaggatgaggacaggttacctggggcggcgcccagagcagctgaggtctgtccacaactttctttacctcgcgcattcgggtttttcactcactttaccaatgttctgtcttgcttccaattattggaacaggctccaccaactgctgttaagaagaacctatccaagccaggtcaacggaatcaactctcggcgcttatccaaaacgttcgttcctctctctgtttcgtctccctcaatatcattcgatcgtttacacttcccaaacttttctctgtcttcacaatctcatcttttgaacatataggcccagtccaaccgggaggccttggaagaacagattgctaaagcaaaacggaacaaggttcgtcttgtcttatttcttttttcgtgttctgacttatcgtcttgtctaatgatgagttcgttctactattccgatgttgctcacgcagagagcgtctggacaagtatacgggttcagatagatgtatttctacctgggaggacgtatgtatatctaatgtatcactaccatcaaaatgagaaacataacatatataatacaaattcgtgacagacgagaaggtcatataataggtacagaagaaaggcgataagaagcactttccgaacagatccaaaagatgtgttcacagaactgcgagaagaatacatatcaggtcatgtacaagtagattacacgctcagaatgaactatcttcatcaggcatgagatctaagaacttcgttgagaccttctcgctgacacaaattctcaaacttgaagctctctgcaaattcatccagctccttgaatgagagatctctaaagtactctgcatattcaaagcaaagttcctccgagagtagaatgtttctcaccagcctacctaaatgagttgacgtgctccacgtcttggggtatcgagtcttgatcgaaggagcttctttctcaagccagtcctccagcggctggaaaatgtgcttaacttgactggtgttcgttccccattcatcagctgccaatcgcttcttcttggcaaggaacggtgcgagtcgtttgacgtagggagagtcaggggaagcataggtcattccttggaagccaatctgtggttgacaaatggcaattgtacccgatcaggtcaatgacgcaccaacacgaagtaggaagcgcgctcagagtgaaataacaaaaacaacgtacatctttgtacagccagattgtccaactcgaaccagcctttttgtatatacgaagctgatcttgaaggagattgtatctctctttgttagtgtcctcccatccaggtccgtctgtcggatcagcatacaccggtccactgaaacatggcgatcacaaggacggcaacattgacaatggtgagcaagccttccctcgaaacatcggttgatcaagtccgagaaagaaagtgttaggaggacgagacatacaactctccgttccacataggggttcctgtcttttgcatgaattggacttttcgctcccaactcttttgaagtttctccttttgggagtccgttctgtggtaaccccctccgagactgattaagcaagatatcagaaacgaaagctgaaacgttcagacaggaattttggttttgaagaagacatgtgcgcggaaaagcgcgagacgtacggaaatccgaagtttgagtagtcgtggtaggcatatacactattgggcagagcgtgggtgaatcgagatgaatccgaagcgaaagtgttcagatcgaaaaatagctgtcggagatagatagattcgaatcggaaaagagagcacgatctccatatcaggctacttcttcaccaaatgagaaggagggaatctagaggtgctcacgatgtgatctggatctatcttccggatagcagcttcgacctcgtcgtaccactttatgaccctaacgtgctcctcatcagtaggctcgttcaaaggattgactagacggatcacaacaataaagtggagatcaggtaatcagcggaatatgcttgtagacagaggagaagaccaagctcacatccggcaacccaggtgtttcccttgtatcgtcgagcgagctcctcccaaagtcggatagactacaagaacaccagagattaagtaaacgtttctcatgaacggaaataatctcgagttcaatgaactgcaaacttaccctgttctgaaactccttgtattcccagaacacagctcggtggataccagcatcggagtgcctttcaaaagatatgcgcgcctctctttcagttggcggcacaggagacaaggaaaagagaagcggtttgcaacaccatcttatggaacagttctcaccagtcgatgttttgacctcccggggcggcatgaaggtccaggattgtaaagatcttatgtttcgcacactataaccataagccgagtcaatatcattcctggtcaattgccgttctagatgcgtatagcgcggaaactcaatatgagggagaagtgagcaaccagaggatggacaaacgaggttgacaagtcgatcgatccattgaaatcccttttcgatccatactccgggtgcgtcatccgactcaaagtgacggtaattgaaaggaattcggatggtgttcaagccgagctatatgcaataggcaggtacgtatggatttaaagatgcgactcaatagagttcagtcaagattcagactcctagagatctgcgctcatgagaagtatagacctacggaagcgaagaactcagcgtccttttccgtgaaaaagttctgaaggaccagcaagtaaaacattacggtactctttcttggatcaatcacctagcgcaagcatgcttcatgcgaggataagtaggaaggtcacggagtctggtcaacgaacctcgagaaatttgtcgaaaaagtattcgtacttctcctcgcccatcacgttcttgagcttttttcgcatgtctgcctcgtggcctgagacccagtttcatagcaactcatcgtgtcaatactggtagtgtcctcctttgaggatcgaaaaatatcagtgcagtaggataccgatacaaaccaggatatccggtgataaagttctccatgttcatcccttttaacaagaggagatggccaaggagtatcgagcgagagcgcacaagcttgtgtcaacatagagagactctatgcaggccaggaaagttatccgatggcaaaaacaaccgggacttacatcctcctaggccggctccttttaggataacttcttctcccttctcgttgacgatctggtttcctttacatccttttggtgggataagcaatccaatacaaaagaaaacagttcgtgatcacgatcatgtctctatatgagcattgttcatggagtggaacctggaggaacgaacgaaggataccaccatcgtaaggggccgaaggagggggcacttgaactgtataagcaggcatgttgaatgttcgactgtatgttttttttccttcgtgtgtgtctgtatatatcacaggtagatagttcacgtaagatggaaaaggaagaagatctgggtaggtgaatgctgaggtctttgccagtagggtatttatctgtttctactgatctcactgatcacaagaatatttcttctttagtctctcggagaagaaccctcattcaattatactagccccgtcggtcatctgttgggaggaagatgaacgatctgttcgatgttcgagcgaggttttcccgtcggtcggagtttctgtcgtgccggtgaatcggaccggagccgaagcttgtcgaacgactgacaaatctaataaatctccgtcatctccttctggcttggctctcgttcttgataaccatctcctttattgtccgggaaacaagagtttgccgcatgccatgtgtattaatatttttggtagttcaggttcgaatcaaaggcggaaacaaaggcatctcgcgtaacggcaagaggataactttggctgaaacgcgcacaatgtacagaatccatatcgatacatgctaatcttgaccaacagatatttctcaatagaacctgctcacgctctcctgttccatcccagccagatggaagccactatcggcctgctcgccttttcctgcttcttgccataggatcaaaccctcaccgaaccctttatcaatcgcaaagtccctcgctcgcttggcacccgctccgacggtcactccattcccgttctctgtcctcggcagaccgttgcctttcgactttgctggagctctgctcgttcctgtcacagcagataaggatgatgtcgatggtgtccgagagaacgccattttctttccggctctcagtatcaggtccgactctgggttcgctatcgacgaaaactcgtcgatgatcggaatctggagaaggttctgattgggagtgatgaccaccatcgtgtttgtcgagatctctcgccaatccgttcgctcgaacgtgagcggttccgaagcgatcatgatcaacggatccggacggatggacgaatacgacattcggtaggatccagatcctagcggatattccgtctgttcaaagacatcttgtcagtcattcgaaacttgaaaaactgagaagaagaaaaatctgattgcatcgagggaaagagaagaagactcacgaacgatgttccggaagagtaaaacagactggcagcttcttgggtcttcgagctgacataccgggttaccacaacgctctccccgtccgtcacacaaaagttcatcagactcggctcagttgctccaacttgcttggtccattcgttcagctttctgatcgtcttgagcattgcctcttgtaaaagtctagttgagaaccttccttgcgcacgcttggacttgttgcactttccgcctggcacatctgacccttcaggaaagagtaaatcctgagggagaaaggataggaacagtgcaaatgcccattcagagtcggtcgtgccctgcgggaacaagaacagattttcgggaagagattgctgaagccgacgcttgatcaagtggaacgaagcgattccgccattgtgcatccactatttaaatccaatgtatacacatttcaacctgtaagatacgattgatccttacggaagatgatatgagatatacaactcatagcttgacataccatcagtcgtccaaagttccaaggatggcagttctgttcactgagcgctccagcagtggatgcacgaacatgagcaaagatcatgggactccgaatcttttcggccaaccggcccaggttttcattattccaagcctgaatccacacgaaagaatgtcagcacacgttggtagcgcacatcctctcgcttatagatacacatatatgtcttactggagtgatagagttgaagatgcaagggttcaaacggtcttcataaacgggtggtccctcaattgcgttgatctcttcctgtggatccatctgatccagcgatgcaggagcagacactaacgcagctgcttctgtttccgatttctcttctgacgggctcatcaatagtgttgacgaaggagttgacgataacgatgacggggatgatgaactagtggaagctgaaacaggttcggaggagtcataccatcctactccaaaactgatggtatgaaaaggtagatcgagagatcagtctgatgtgacatataatcattacgaaaagagtatttaactaacccgtccccgttgataggtcctcttgtgagatccagacgaagtttagaagcgaaagcttgattgatgatggagtgggctctgtacaagaaggaggcggaatttgacgttgttcaggcaggttcaaagcagtagagatcaacaaaaacgactcacggccgtgttaaaagctgaaaagatcgattgaagaactttcaatatcgatatacatgtgctaaacctctgaggatcacgtatgacgagtgaagagacaatcagccgacttacatgagagagcaggatgggctcttttcccttgtaaacgagctgcaagatgatagtccgactgtagctttagcgcaagtccctatgcaacctctagaagaaccaaaaatcgaagcattcagattcttaccagtctgcacatattgtataggcgtatagatgttgtgttagtggtaaacagtaagaagagatgagatgatgatggttaatgagtcgggtgtgtgctgggtgctagaccgaaggatggcggcaagatggctctatcagccgtccggttactaaccgctcgggactcaatcattcaaaccgactggccaactctcttgaacaccatcatctagcaaccatctgccatggcgtcgtctttaccttcttcgaagaaggctcctctgctgccggcttcgtcgttctatgtgccttctcttccgaccatctcgcacaggcttaaccaacacccgacccatccgcttaatgtatgggcaggcgccttgccgagtgatcctggggaacttgccggaggaggagaggacgatactggaagggatgctcagatctagtacgtcgtttcatttgtatggtttgtgtcagagaggataagtaggcctatcagatgggatccaagagacatactgggtgtggaacgatctgctcttgaagaatcaccctcaaatataacacgcgtattcgcaagatctatcggagtttattcctttctttgatctgatatctgctttattttatactctgtcctctcttctcgctacgccttgtgctcgattggccgaacctacagtttcatgatggttgggccacgtcgtcgagcaggcaaggataggttgatattctggtttaatggaggacctggttgctcctcgttcgatggctcaatgatggaggttggaccattccgaatggatccttccattccaggctccataaagctacttgactatggaggatgggaggagtttagcgggatcgtatttagttcgtcctattttttggctctttcataagaactctcaatcgatcccgacgatcttgtttccttaccgtccatattctcgactctcatcacagttgatcagccacccggtacaggattctcatatacccccacaaatggatatcttcatgagcttcacgaagcttcggcgcatttcaaccactttgtaggaaacttccttcaagtgttccccgaatggcaaggtgtagatgttcgtatttctcccaaattgttttgatctcgaagaagacttaattcgagtctcaaactcgtgaaacgatagtttagtccccctcctgacatctcgtgatcttcagacctacctagctggtgaaagttatgccggccaatatattccctactttgcagacgctcttctctcgtccacctctttgccaaactttcctctcaaaggaattgctattggaaatggctggatcgacccaagggagcagtatcaaggttatgtcgactttgcgttttctcacaaactggcggtcaagggcagcaccgtatgtattcttcagtcataatcataaggtcttgctgtcaaagcctggccgaacaaccaacttaataaagtcttttctcctctcctctcctctctaataatcttaccagcatggaaatcaattagaacaaacaatgaagagttgtcagaaagaaatcgacaaatttcaggatatattgacgctgccgatcaacattgctggttgtgcagaggtcatggaagccgttcaacagcctttcactcaggagttagtcaaaactcattcctctctcttatctttacagatgacaagacgatttatttagcggctgtctcctcatctcattcttagagtgaacggaaacaaggtgtgtatgaacgtgtacgatgtccgacttttggatgatttcccagcatgcgggatgaattggcctccggaactagccgacgtgtatacctatcttcgagtgagttacatcaacgtttgtgtatacatggggacgtagatactttctactcggaaggttcgatgtcactaattgtttgattctgattggatgtgtatggcagcgttcagacgtgatcaaagcactacacgctgaatctcacggttcagccgcctgggtcgaatgttccggtcccgttgccgccgcgcttgagaactataaatcacctgcgtcgatcggactcatgcctagcttgctaagtaagattcaggtcatgctgttcgcaggagcggaagatttgatctgcaaccatgagggtatcgagaggaccatcagacgtatggaatggcaaggacgaaaagggatgggcgtaagcagggcttctctgatctttggcaccatccgagtccttctctttctaatcttggtcggaattactttgatgcacgtcttgccccggagaatagaatgctacaacgaacgactggttgctcaatgataaaaaggtcggcacatggacgacgtctcgaaatctcacctacgtcaaggtatgtttctcctcctccctcttctgcttctatcaccccctgatgtgtgttcattaatatcccacttttttttccttttaatggggcgcaactcaaaagatttcggactcatcacatatggtaccctacgatctacccaccgtggcacatgacatgatgcttcggtttatgaacgtagatttcactcaactcgtagatggtactccaggttgggtcagtcaggttggagatgacgtaaaagtgaccgctggtgtcggcaaaatgttggaagattcagataaaacactaccaggaggttcatcatcaatgggctcgcctacatgggaatgtgagtttctttctgtcttcctcttcttttttgatgcgcgtcgtatgccatgatctgaggtctaataaatgaacgaaacaaactcgacgtcgtgttatcttgaataaaaaagcggtctacaacgtcggttcagccttcatcgtcttcctcttcatccttctctctaccggtctgttcttcttcttccgagcacgtcgtcgtcgtcgtcaacagcagggatcaggctaccatcggtcgacaccgtcataccataatcacagtcgatcggatagtttacctctcacaagacgagatgtcgaatcggccgaagagcgagaacctctggaaaggagttctcacgcccatggaggtagaccgtacacacctcctttcagttcaggaggaaggtattcacctcggatgggacctataaggtccacaggcactggcaccgtcggatctcccagaagaggaaggaccgtcctcgacgagaccgatcccgatgatgacgatgacgacgataatgatgacggtagaagggggaagagtgaggtcgtgtttgacgtaggagagagtgaggatgaggtagacgaaaggttcaacagaaaaggccggcgatagatctttcctcttctgcctttcttttctcttctctcttaattctaaatctgtagtttgtggcttcgtttcccagtgtcgattgggtcttcttgtcttgttctatatcatctttatagacatgtgtttccatttttccctttttcttcctccctttcttgttttctttcacgtaccaggttgatctagtctgacaggagaaagcgaatggataccaggctggcctgaaagtagaacaaacaaaaaagaatcgaggcaaggatgggagagcatcggactcatccaacaacatggagcggttttgaaaatcaggtccgaattccaagaaggatgcactttgtcgaactcatcccgcattcttctatctctttttaactgaaaccacaaaccggatcgaatatgaagccagaattgtatacatgcacattatgtacggatatggtgtaagtgcgattttggatacgtgggcgtggatatggatgtagacgtacgtcggatacggttctacgcacaccgggaggaggacatggagaaagaagaaagcgagaagccagctagctaacgtgtacatatattgtttttttcctctcctcttccattcttccttcctttcgccctccctgccttttcccttgatcttcgccgtacgtttccgtctcgatgactttctggtgaaacgagtacagcaaaagagcccagagatggaaaccgacagagacaaggacgaggtgggaggg

SEQ ID NO: 678 - DNA, 59298 bp, Xanthophyllomyces dendrorhous
  misc_feature (58113)..(58122): n is a, c, g, or t
ggtggggggcatgactgggttcgtgaataattgatccaacagacaataaacagaacaaaagacaacaacaacaacaacgagaacgaggaaaaggtgaaaggaaaagaagagtgagagtaaaatcaaaagagaaccaagaaagaaaacatctagaagcctttggccgaaggaacaaagcctgtcgagatgatagagggagaagaaaaacaaaagaaaaggtcgagcgggtcagtctttactgtacacatctttcttggcaagagaaagtgaggaccagctgggacgaaccttggtcgtaaatcgtgttttcgaaatccttcaatagcggatcatcgctccattgacttttttcacccacaataccatcagtcagtcaagtcactcgaaaagtaaagaagagatctcgacggagatgacaagagagacaaggaaaggaactcacgcgacctcatattggttctcgtcccagacgattcccagcgggctatcgcccgctgtgttctccggcacgccccaaccttcgtctccctctttaagcccctttgcagtccacatctcctgaagtcggatatcttctgcctccttcagaagtttgatctcttctcgagtttcgtccggccgaggatcactgcagggtgacatagagaggaagatggatcgtaaatgttctgcataaaatggaaggatagagagagggaacagaaaggaaagatcaatcatacgtactcgtatctagcgtcgatacaaagtgcgctgacatagccaccgtggaagaatgcacgctatcggaagatgaaggatgacaaacgaatcggttgagtaaacgattggaccgataagagagaaaggtgaaggagagagggaagagggaagaaagaggaaagaaaagtggacgtacacctccacgctcggttgctgctctccttcggacggcctccgccgcgggtgctcttgcgtgtcccagatcatccgcatcagctgaagcagaaattatcaaacagtcaaaccgacggtaagtgtatcgttctcttcggctcgggtatgtactagaactggatcgtcgagatcagaagcttacccaacatgtcacagtcaactgtgatgagggatttgacggaacgacggaaaattcatcagcaagcgagcataaagagaacccaaacaccaagacatagggaacgcaccatctccaaatcctcggaccttatcgaacgcatcctcgtaatcgagatcatctccatcctgggccaaggctagcgtggcatcgatcacttccgccttgttggactcggactgtcctttgggtgcgatgaacagcgggaactctgaatttcaaaacggcgatttcgagatgggttaagatgtcaacactcgaggcatggacggctagacttttaatggaaagaagtacgcacgcttagttcgaccccatgagaatccccgtcggattccagaaggaacctgttcggttggattttcaccctttccttgtcagaacatgtgcgcgtaggagttaaaaactcgaacaaataggtgaaactggatggacagacctgcttcaaaagattgtagtgcacaaacagagggtccccgagatgatcgtattgcatcatggctgagtttccgtcgaatataggcacacagcatgtcagcgtacgttatgaaatgtataaagaggaaagagagtaaggctcactgagtccgcagaaatcgccagactgggttcctcttggaagtcctccgacaccgaggtttcggccgggtacaccccatctctttcgtagtgccaaaaaggcaaatctgaaggggttttgtcgaacagggaagtaagagtggggtgtgagatgtgatgctgaagaacgagaagacacaaggagaaagcgaaccggaaaatatctttatctccgtcactaaagttgaaccagaactatcaatcccaaagatgaaccagcgaacagtgagcggtgagcttgagttacgcacgcgctaagaagacgatgtatcgaccaagagagatttggaggccttactttgaaatcctcaagcatgtgctgtgagaggagcattgcgtccaaatgatactttttgtcgataaagatctggcctgtgtagaatgaagaagatatgagatgagataaagaaggatattatctataagaaagaacgtttcagcgtaccagcttccatctcccactgtgacccaggttggtttccaaggagaacaaaatcagacgcctagccatctgaccaggaacagagtaagaaaggacgacgaaggatagtttctcttacctcgtctctgcatctaactccgaggatggaccaaactgggttggcggccgcggtcttccagaaatcaggccagaagatctataggcggaaggtcaaaacgcatgagcaatgaacatagggaaagggaggtaagaacgccgagaggcactgaccgctcgaagtcgtttgtaaggcggggagtcaaacatgtattccggatccctggtcggtacattatctgaatcctgtttgtttgtttgtttgttgatccattcatgaagagttagctggtaagtgaactagcaagtgggcgaccgactgtcgatcaacctccgacacgtaccaggtacaagacctctctccatgggcactgcacgatcgccaacgctttgagatgatagttctttcttcttttctcatccttgacgcttcctttggcctctacgagttctgcgccgagttctctagcttcctggacgagcttagagtctgccggtggtttctccgaaggaaagtggtagatctgaacgggaagtttcgagtgatagactatggagagtgacgtaggaagatctgtcagcgagtgcgaaagtgacgaaagatgacttggtttggaggagaaagacaaaccgtgacgtaacatccgaaggatgtacaacactctctcaagcgtatccgcgttacctagaaagatttgttgaaaaacagccagtcagacctgaggaggaaaattatctagcaagagatgatatacgaaccggcagagaggacgatgcctcggccagatccgtagttctgggttgctcccttttggtcgagatcgtagagcctgttaatgagccgcattcggtgttcatgtatcgttgatctgtatcccggaagaaagaaagaaagaaagaaagaaagaaagaaagagagagagaaagaaaaacatcggtaagacggaaaagagacgtgtaggtcaagaaagaaacataagtgcgcaccgattcaaccccatccaaagacctattgaatttttcatcagactgagtgatgtacatgtccagaacaaggaaggaaaaaagaaaaagaagaaaaaagaaaggaagaacacaaagatcagctcctgggttgaataggacgcgctctacgcgcgagttatcaaagaaaagaacaagacgtactctgatgaatgagagggccaaacgttggcacaagattccatattgatgtgatagaagccaccttgctcgagctcgccttcgacctcaccagaccctcctggcgactgggcccaagcaaccagtctgtcctttgtagatgtatgaagaggaagcggttgggaggatatgtcgattggtcgttcggtacgattgtggtagattgggtgaggtcgtttaaacacggaagacggtacctctggagcgggctcttccaggctcgacaagaaagaagaatggatctgtacgtgcgtaggggtgtatgtacgaagagcggtgttacgtcattttaggcattggttcgtgcgagagaggtacatatgtaagtgagtgagcgaaatgcatgaacgcaaggagcaaaaaggacggaggacgagagaaaaagaaaagcagaagagaagaccaagaaagaagaaagaacggacatcgttatgccagccgagagcaaggagagcggcagtgagagcgaggatgatgagaccgaggtatcttttaaggacgttaccgatccctcttctgggtatcgattgtgtcagagtgtccagtgaggccaagacggatggtggcttggtggttgagctagccgagctatatggcgccgggaggccagcttggatcatggtattggtggtagcggtggtgatgagaggtgatgggtggtagaacaagtgatgatgacaacagatcgacgggatggtatgatacgggtcagaggaagtatcctgtttgatggatgtctttaataagaaggtaataaaaaaatataaaaaaacagaaacagaaacccaaaaaaagaagggatgaattgtaaagacaagagatggtcgatgctctcctcgcagtttcacctcaagtccagcagcagcagcagcagcagcaacaataatagcagacgtcaacggcaacaatcgatggcaacaacgtactcgatagcaacactcgtcagatcttagcactcaactatcagttgcgctacggaattgaagaacacaaaaaagacgtaatcaatttccttctataacctcatcaaccgcgctatcccaaaatatttccttcttctccttggctctgtttgctgtattcttctcatgcatcctcttgcttgctcgctatatcccaacactagctacagatctgccccctaccagacattcgacaacccccttcgatccctttatttcctttctcgtcatcttcctcgcttcccttcttgccctcgtttctcgttctctccgcggcaggtccgcgttcggttcgggcaggccgagtaaaaaaggcccggaggccgcagtcccgcagccggtgtgggcctagaactgtagggtgcgcagctcaggaacgcagcttacgtaacaatattctcggctcccaccgcctcgtgtgcctggaacacctgtgcacgtttcatccggcctccatctcacccatacctgcctcgaacgtctacagccagcatacactcacacccgacacatgggaaactgcctgtccgatccatccaaggcgtcgtccacaaaggcatcgtccacaaagacaaagccgttcaaaggccagggtcactcgctctcttctccttcttcttcgtccaacactcctgggacacaacaggcaaggcccaatggagacacatcgacgactgcgacatcaccaccgagtctaggaccggggagaccattaggtgacggatttcaggatccagtcaggataccaggtcaacaatcaaatgctagagaagcagccgccaaggccgcacaggaaagagcaaacgcagtgagcgagagattatcgttctttagctgtgtatcatctgcccagtgctcggagctgacgtctttgtactctttctttatccgcgcggaatgtaagaactcgacaagaggaatctcctcggccaatccaaagagcggacagctctcggcgaaactaaaagaacagaataagatcatcgactcgggaaggaaggcgccggatagagaggatactcttgccgttcgtccattcccgtttttcctctcgctcttcctcttctctcttctttctttgtttttctctctttctttgcttctctcgctccctttgcttttcttaccttttgacttgtcgtttctgtctaaatcgttctcgtgtcatgacatccaacagagaccttcggactggaactaagctgctctctctattttcttcaaatactaaaccaaatcaaattatgtcgaatcttgtcggatcaaacctctgactctcgtgtttccttcggtttcccctccttccctcgttctgttttccttcttaaatctggccctacgtgctactgtacaaaaaaaacctttccgctcttcttttggaagatgtccttgttgtatccaaagatagatttccttagtctttcgttctttccgtcgagccttcttttcgttccctctgttttcgttctatcctgtctacccgttgaccgtggaatgagaaacgacggaacgactctttttcataatgataataatgtatagaagaagtcaaagagcaaaggaaatgggtaattaagagaagagaacaagagtaaacagaaagaagagaaaacaaaataaaataaaacagaatagaataggggaaatcctatcgaatctagaaggtaaaagtaagagaaacagatgaaggacagagtgactagagagaatatacacattctcgccaatcttcctctctacttccgacgcacacacgtctgcccgtctcctccatctccttgtcttttgtacactactctccagaaaacgaatctatgcgccttcactcctactttccattctttttctaacgtcttccctcttttcttttttcctcgctaacccttggctttgagggccttcggatgtatccgctcactttgaccggttctgctcgagctgtctagcggctgctctctctgatagatcgattcccaccaactgagccagcaggtcgacgaagaacagaagaagcgtcagtggactacgtctatccattggtcatccgagtggatcaataaatcgggaaagaaagaagaatcctcacaatcttgctcgccttccagaactgaacgacgttgatgatttgctttcccacacagatcgggaaacaaagcaaggcgacgatcatcggtaaactcaattttccaagcactaaatctaaccagccgactgccaactttggcacaatctctgacagtccgatagaagaaagtagagagctaaacgcatgggaagaaagaccgattgttcgccattccggaccggaaccgatgaggtagagtgcgacaaagaacgtctcgttcgcaaagcaaaatacaaacagcgttcgctagagcgagataaccaggagaaaccaaccgattggtatcaaaccgttagggcacctccctcggaaacacacgaatcagccaaagagaaggaccctcgactcacggtgtcgttgtagtacagccataagatcctagacacatcagccgtcaccagtttgtgcgaagtagatccagtcgccagagagctttttcaaccaaaaaaaaatccaaagaacgtagactctttcagcagtgcgcgacactagtcaatccaactctcacaaggaagaaagaaggcctaacctgtacatgtgcatgtaatgactgctaaagtccagagcaatcaagaactggaacagcaacgcatacgccgggtactcgcccgctaaatgagcgagtagacatgccgtcgcactcctgtcgtatatgacaatcattccggaagggaaacagtgagctaatcttcgctatctcaaaagatcaccagaaggaaaacgaaccggtcggtgaccatgtcaagaacggctccaaacttgctcgtctgcttcaaagctctggccgcgtgtccatcggcgacatccaagatcgaagacagaaagtagagggcggtgaacagcttaggatggtttggcatcacccagagagagattcctgctaggataatccgcgagtatcctacgagatgacgaaaacagaagaaagtaagtcagaagagagatgacacaacgttgaggtcagaaccgcccgtctcttttcagatcgtctttgtatggacaagcagataaacacgaaacacgcggaagagggacaaagagaaactgttttgagggcgaaacgtcaagacgaaaagagaattcttaccgattagattgggcacaaaaaggaagacattctctttggactgagttctaaagtgatccaaaaaagccccatcccaacccaccatcaagcccgatggataaatttgatttcagctccaaaacataccgaccacagtctctgtccaccacggaaaacttttgtgaaaaaagggatgcagtctgaacggatcacgaacgtacgcgagatcgacggcctccttggcgtccggtccaacatctgaacgcgaacgagaccgacgacggacagtctgagattgaagaggtgttgctggcgaattaggcgagagcttgaatccctcctgagacttgagctgagaagacataggcgagaggcttcctgtttggaaaagaaaaggatcacagatacaagattgatgggtcttttccggaaaaacgggagggtgttgaaagaataagaattggatgtcgaatagattcggcacaaggctggctggctgactgattagagagacgcattctctgattacgtgttacaccgcatctcatccgccggttgccgaacataattttcaacctctcctcacacgcaatcgctgaccgctcttcgcactctcccgaacgagtggtactggcactgctcgattagtaatgctgcagaacgcagagagatgcaacatcggtttcgcaagaggaagaaatttgaagaggtttgtacaaacatatctatcatgatagaacaaaaaaaacagatggtgtgtgatgccatgattcatgcgcccaaaaggaagcccgttccattctacgaaacacacacagagagaggaagaggaaaagagcgatttgagagagcaataggagatattcatgaaagaaacgtgttgacggtggagtgaaaccccggccagtaaactagggtgaataggaacggctcgcggatgcacctcggtcgatgatggagctgacgttgtcaataacgaaccactacacgaagaatacacgtaagagaacacagagagtcagcacaacagtcagaatttagcaagatatgcactctcctcgatggacagagggtttagataggatggaacgaacgagaagtccgtgtgtcagacacgatctttaaaggaagaacagacgacagaaacgaggtcaattagaactgtccatacaagagtgtaggaatatcaaggtagcaaactcacctagcagcagataccccgagtccacgatagagctgcataaaccctttactcataggttgtgggtgaaggctatcaggcccctttgcgatacggccaaatgtctcccagattcctctataagatttgtttgataacgctcgcttttgcattcgagttttgatagcatcgaccgctaggaacgtgtcgtccgtcgaaaagaaaaggcattcaaaaggaagtgagcctcgatgagatagagaagagcgaaaaagatgatcaatatagttggctagataacttacgataaatcagtgcccaagaggatacgcctgctacagatccacagaagaaaggtacgagagaaggagtgatcggaagccaagaaggcacatctccctgctccccggacggtaggcgaccaaacaatgatcgaagggcatcatactcggcaaagtatagtcccgttcccaacgtatctcggactaagtcaaaacaaacagcatatgagcctctgcagagggatcagcgtagaggaagcgcaaacagaatacatactgaaatgaggtccaaaccccgtgtacatacccgcccaaccacgattgctgacaatcgcttggacagactgcctagtggtcataggcttagggtcaataatacccatctcttgagatatcataacctatatcgatgtgaaaccgataagtatcgtcaatatcatgagaaatcattaatatctgatatagaggggagaacctctactgacctctagttgacgtcggacctaacgataaattgtaatctcatgttagttaacgccttgcgaatatgcatatacagacaggtctcgatgatatacttttattagctcaaaaggcgttgaacatattgatatggatgctcccgacgtgcaccccgagataaaactcgtcacccagatatctctcagcgagcttgtcgccagaatgtttttccgagctagctcgttcttggtgcccgtgtagatggagaatgaggttgtccctgttcgcaaaacacaatgataacagaattggagaaacgagtggtatagtaaagtgtaaaagagagactatgataagcgctccactgatgcccttttgacacgatctctcgcacagaaaatggagacgtgaaggtactcacggacgacggagatactcaacagaggtatcagcgcacctctccaaaagccgcgtataccttcctctcggaacacttctgttgccagctggtggattcgaggcgaagaccctctggtagcttgcatcctagattttaaagaatcaagctattttgagataccgccgtcagtcccgatcaagttcattggataagaaacaaacgatgagatacgatgatagtttttgattctctctcatctgtgaagtaaaacgagaggcaaacagaaggaaacacccacaggaaaccctaggaaggtagagcatagcgatccgactgtggctgaaatgaacgtcttgtgttctgatcaacgaacagtaaacccaaagatgaaaggttatttatcgggactgatggctgcaaagcgtttcaagtgcgtcgtagcaagctgtagaggtctaagatcactcacttagtgcttcatcccagaaagcattacccgtctgctgaaactcgtcgaatgtatcttctatggcccgaccttttccctttctgttcatgacgtgtgtgagaaaaaagggcaccggttttatgaaaaggcatcggatacacgaggccggaatcgaacacagatcacgactcactctgtcgatgtagccatctcaggtcaattagtttgactcaagatcttccaggatgcagaggttttcgatgcgaggagttataggttgatgatacagaagacagagctcggtagatatcagaaggagcgcgtgaatggtaaaagggatagagaattggttcttggaacgttcacactttttttttgtcttctccttgtttacaggcgcggaattcttgatcatattccgacaacgtcacagatcagaaaagcttcaaattaccgattggcgaagagcagccacgagcaaaccccctgtctagtctctgatacaatgcttcatagcaatcttagaaaacagacactataaacatctcaacttctgaccttatcttttgatatttcacatttcaggacgatagatataggtcaatattcattgattgggaagacaaaattgctaagtagagtagagtaggaagaaagctgaaaactgtaaagaaagaaatgatatcgaccatagaaggctgcaagtgaagaagagcattgactacgaagagaataataggaggaaacgactaatcctggagctgcctgaacttttcttggatgtcgttgtagaccttgtctagagctttcacaattgcctcctttccttgtgatggcgactgttgccgtcgttcgatcaggaaagtgttagacatcagctattggtcgacaacttcttgaacggtgaaggaaaatgttacgaatagagaaattcaatactaacctcgaacttcatctgactgagagcgtacataaggtctccggtctcgtccctgattcgagcgaacgtcatgtctccagagtcgatggccttctgggcggcatcgtagtaggtgacaaagtttcgaagcatagcagaggtcttgtagaaggggcagaatcgatcgtactcggagataccgttttgttgcaagaagtcatccttgagcagccgagcgacctctaaagtagccttatcgctttctccaagagcactctttccgacaagctgaacaatttcggccaagtcgtcctctttttgcaagatttccttgactcggttcctccactcaatgaacccaggctcggtggtctcgtaatgattttcaagaatcttaatgtactttgagtaggagaccgaccagttaacagacgggaaatgctttcgctgggcgagcttcctgtgaagatccaagaggggaacagatacagttgacgttcagcacccgttggcattttaaaagggtatctgagacaaacaaagacacgaataacaagactgacttatcaagaccccagaagacctggacgataccgagagtggccgaagtgacgggatccgagaaatctccaccagggggagaaacggcaccgacgatagatacagatccatctctgaccggacttccgagacagctgacctttccagctcgctcatagaaggaggctaacttggctccaaggtaggccgggtaaccagagtcagcaggcatctctgccaatcgaccagagatctctcgaagagcctcggcccatcgagaagtcgagtcagccatcatggcgacgttcttgccctgatctcggaagtattcagacaaagtgataccagtgtagatagaagcctctcgggcagcgacgggcatattggaggtgttggcaaccaaagtggttcgcttcatgataggctcctcacggccatctgcagtgttcatagtaagttcagggaactccataagaacctcagccatttcattccctcgctctgagtggtcaaaatcacaagtggttagaatttgaatccattgtttgttcgttttctctgatagcacaaatcgcacacgcttccactaacctccacatccaacgtaaacgatgatatcagagttggagaatttggaaagagcctgagaaatgacagctgtaccatgaaaagaatgcagtgattagcatgagtcaactatacacattttggaggaaaggacttactctttccacaaccgaaagctccaggaatagcggttgttcctccctgaacacacgggaacaaagcgtccaaaattcgttgtccggtcaacaacgggtagttggctgtcttcttctcggccacgggtcggggggctcggacgggccaaatttgagcaagggtgtgctgggtggtcttgccttggaactcggtctcaagaatcacatcctacaagcaagaaaaggcgcagaaagaagaattagcatacgttatatttacgcgcttttctatacgacgacgatacgtacgtcaacagtgtatgcacccttctcggcaattctagtaacggttcccatcgctcgggggttcaacatgatcttgtgatcatccaacaaagagttctcgtagacctttccgaagatatctcctccggtaatgtggtctccaaccttgaactgaggagtgtagtcccacttggccgtacgagaaagagcatcggtgtagataccacctatatgattacgagatttataacacatttttaatatttggagaagaaaagagtatgaccaaatgacttacgaggaatgtagatggattgagactgctcctgaatagccttcaaaggtcgctggataccactatgaggaagcaagacatactgtgaattagtctatcgttcaaattctctctacatctatgtggttgaatttactcgtaaatgttctccatcaaacctagtaaaacatgacttgattgaaagtaagtcatttggcttcaagagaaaggtatccatgtgaacgggtacgcaccaggtcctagctcaacactcaacggctttccggttcgcagaacgggatctccaacagtgacaccagatgtctcctcatacacctgaataatagccttatcggcatcaattcgaatgacctctaatatgaggacccacaaggaaacgtattgaagattcagcctcactccaaatttgagatgaaaggctatgaagaaagccttttctttaaagatccggtttcggaaacgtacctccgacaagctcatcgtgtcctactcggacctgtttgggtagagtgaagagattggagtgttgtttacataaaccagagattagagaaagtaactatagaataaagagaacgtgtggtaggcacaactcacaagctcgtacattgccgctcccaccatgttctcagcgatgacgacaggaccagagacaccaaacaccgacccgaatcgagattctctatcttcatctcggatctatcatttttgggagaaaagatagtcgtacatccgagaacgaatggaacaggttgagaaaatggatcaggattatatggaagaggaggagaggagtgattaggggttaaccgaaagagataaaaggcatcattcactttaagttatctacacgttccaatcagcaaacaaggacttgaaaaagcacggacctttggcagatccttctttgcgttttgcattgccccagcctgtggaagaccatcagaagaagatgcaagacaagggataaagcagcccattcgaaccgatgagatgaaatgaaatgacgttagggacagattcggacgatatcaccgacacatatagggatgagggaaatctatcagatgggctgaatcattctatcttcagattcactcaaactcgaacacgtaccatgatagacttgatcgaaaaggttgtaagtagaagatggaaaaggaggtaggttgaggtggtagatggttttctgagaggacgaagaaagacatagatcgagcgtatcagaaagtttgtaaccttgtaaccagtgcccgttaacaatcatcggctcggctgttaacttgttttcaattaaaaagaaacatatataagataaagaatgcagatggtattgaacaagtacagatagaaataagagggatcagagtggaatattggcttgatcaacagttctataccaagtggatgtagagaacaacagtagcttagattaatcttgatagaaaacactacagattcaaatatttgaggtccaaaagcaaagagagaagagatccaacgtagttcctattgttaggcttatcgtgtaccggcaggtttaggcttgtcgagatatgcctgagcctcatctttgtcacggaacatcttgtacatggcatcagaacaagacccaatagcctctagacactcgggcctgaacgcgggttttgaggaatgtttgaaggattatcaaggacaagtgaattgagaaccaatgtcaaaggttgtctcttatagaccaacaggtaagtgaaaggatcaagacgaaccatgacccgtagattccgacatgttcaccgtgccttacagcatagtatttttgagccgcatgtttcattcctgctgtcgcagcttgccctcgttgcaaagcggcgcgttgttgcttggtgagaataatcccgtcttccatattaggaggaggtgtaggattgggcatctcaaaagagccaatttcgttctgaggaaagggaaacccgaggaaagcttgagcttcctcgatagtgttgaatttttggtaccaggctgtaggaaaggctgcggttgactttttacattgatccctgggtgtcagaaatgctcgaatcagtcaaacaattcatcgctagcgcccagaacagactgaaagaacagaccaagaagtgaatattcctgtctttcggccatgtcgaacggcgtagaaggcatccatctgtcctgtgctgcagacatcaaaatcagattagtggtcgcacagacgtagctttcgaaaaatatggctattctccatatatgtgtatgtatagatgagatagggcatacctcctaaaaccccgacaggagaacggatgaagagatctaacttgcaacaaagaggtagctcggttgagcggtgccaagatgctgattgatcgataccacacgttgaaaacccaagaaaccaaaagaacgacgcgtcaatagaacaagcctagatagaacgtattcaaacacaaggatcagaccttttagtgatgagcgtcatcagtgacgagctgaagattggtttgaagtgataagagaaattataggacgtgcttgagaatgatcgtttggtctcgtttaagcgtatggcaagcgagtgaatatgtttatcgttagggttatcatcagtcacgaaaatcgagacgagctacttgcatcttcctttcagtctacgcaatcagctatagagattagcaaaggaaagtctgagtcatttgcgcatcacggatactgtccaaccgaacgttggagcagctgaaattcttgaggcgcacgttcgcgtcgaaaggatttctcgtcagtcaaatcaccaatattagacagtatcggcttgggatcactgggtttgcacatctttagacaagaagaacaactgagagaaaacccattgaacaagttgtctgttttcactcaagatttgaacagagcaaaggatgacgtgaagtgtatgcttccagactcaagttgtttggtctcgacatggcatttgaagaaatcacggacaactgttgatgagagttctgttgtatagaattttcttttcgaaacacaaggtatatgaagcgacatccatcacggactagagtatatcactgtgtatacatgcattctattgctgatatgacccagagctatcttctaacctagggtcatcaacaattgcgggtaaagatagttagagaagcacattttggcgagggctgcgcggagagatctgctctggggtgatcggagaactcaccatcggatctttgagagttgcaacccattccttcgaaacctcaacatagagagcaacccttttccctccctctacagatacacatatacaaacacactctctttcgttctctctgtgacatatcggccatcaacgtcttctgaggtcagtttattcagatagacacctgatcaaaaccttgctgtcggctctcgtatccgtactcggtgagttgtagatttggagttcttgatagtaaattgtcgttcctcatcacattcaatcccgggctttttacacattcatagtatacgctctgcatctcattccttttcttggacctggaacaaacactctctcgctctttatctgtatcctctccttggtcctttcttttctatctttgtttcttccgctccttccactcttaggatcctaaacgacagggaaggtctttgccgatcgaatcactaatgccatcggaactaccctcggcttctttcacgaaaacatcccagtgtgtgcacccaactcccaataagttctctcctcttaatcttcttcaattcgagaccgatcccgggtcctctcactctccaggtcctccaccatcgcctaggaggcatcatggtggaggagtcctactctcaagggtgagagctcagaccgcaggattgaaaggtacgagggggctcgcaagctttacgccttcttctgactacaccggaacggatgatagtaggaaggagagtgactcggacgatgatagcgaaatagagaataggtttggaatgagcaggagtgtgggtaatctgacatctctggatggaatgcgtagtgcggataagaggttagttggagaagagcatctattccaacgtgcgaacaacaggtcagtctaccataattcaaccggtttcatctacagcccagacattatgatgtactcatggctctgtgcaaacggtgtggacgtcgaaaattcttcacagtgctcggttctactaccaagggtctcatccagacactcagcagcagtcccaaagcagtagtcataccaataacatttcctccactgattccatcaacaatgggaatatcatcaatcgcacaatcatttcttctccagaacaaagccgtccatccctttccacgtcatcctatacccagctgctacccccgccaaagcttgatcagaatcatcccgcgctctcgcctcggctagtcgtacttacacctactactcaagaatggaaccagatacagagtggacatcatcttccactcagccaacggccttctctctcttccttgaggcaaacttctcgacaaggtcgagattcaatccagagcatcaatgctgaggatgagagaggacctaggtctgatgacgaggagaatgaaggaggacttcgatggaatccccttcggaatcggcagacaggctccgttccgtatcatccgcgctcacggacattatctcgaccttcaactcgctgtcatacccgcgcccctactctttccagtcgatcatcgttctctcaaacgacttacgaacatggagtccagattcctctcaccagaacgatcacagcagaccatcttgattctgaagtcgattctttggatctatccacacagttctcacctcctggtcccgatagtgaccggttgtcgaggacgtttgatgcctcagatgagggtgctgctcattctatctcattattcggagacgaatggttccctcactaccgagtagatgataaatggcgacagaattcgaaaggagttctgttggttcggtcggagaatgggcaggatgaccagagtatggatagtggatccgatcaggaggatgttcgttctgagaacagtgaagactatggtctttgtgcatttgagatgaagaaacctcaattggtttcaaccgaatcaagctggggaattactcaaataggaaactttggattcggaacttcgaacggactccaacaggtcgacaaaacggtctcgtctccaaaaacggagctcaatcaagatctcggcggagacgggttccgacaatttggaaggggcttggatctgaatgagccttctgacaatgatgtcgattttgaggttgacggggagagtcgttctccatccggtcaaattccgattctcagccctagagacaacctttctatgagccctcaacaactacgcatttctcctgcctcaccccctggaatcctctcatctcattcttccctcacgcgctcctggtctaactcgccttcaacaggtatgatatctcctcgtttgcctgcgagtcggatcacgtcccgaaagagctctgccagtagcgctatttctcatgtccagacacactctccccatatggcggcgagtacgagctctcgcgggtcgcctcctgtaccaaccacttatacatccccaccactatcgcctcgagtatctcgtcggcggcaatcgcaaaaatcaactcggctttcagccgttgctggccgatctcttccttcaccttttggcaatcatttgagtggtgaactttcggccttttctccgttcccgtcagctggactcaactcgatgaatgggggagggcctagtacacctggctatccgttcccttcaatgtatagggagaaagaatctagcggtctaaaggttccaccttatctcagagacactgacagagtagagtcaacgaacagtgtaagtgcttggtttcctgacaaacgaagctttttgataacgtgaaattaaaagggttggttctccctccttcttacttgcggatgagaatctttcaggttctttccctggctccttcgataggaccaccagactcaccgacagggacacctataagctccggcaaatcaattgatgactagtaagcaatgtatctcgttcttataaaattcaatagagctgatagagtatttttgaaccggcaatacagtgtgattcttactgaggctggtcgaggtgcttagtaagtcttctctacttcaactagcccattatacctcttggcattctgctcttgataccgtttcttttgtactcttcttcatctactcagtggccttgttaagagagcaaaacgaaagggacctgatggcgaagccgaaggagaggaggtcattattaaaatgattatcaaggtaaatacatatttgaggtcatcacagggcgctcataactaaacacaacaatttacttgcgttggtgtgcttccacagcaacgtattcttgcagattcttggaaaaggtacatatctcgtattgcgtcctatctgcatctaagccgggtgactgaccatatgagatctccataggcatcgtttgttgggccctattccgatcgagcttcatatcatggatcaaatcagcaagtttcattatgctcctccgccccaaccgcgtccctgggaccccagccgtccacatgccgatactcagaatacagaggagggtttatccgatttcgatggtttgtctgaagagaacacgccgacaattggacaaccagagacccataaaccatcgaaatctcccaatgaaaaggtgccttatattctgggccaccccaatggcgagtcttttcttctttgctgacatgattgttcttcaatatcatatgccttaatgatgctgaagagttccttcgtgtcctttttgacttttgatcagtttgcaccattatcgacttcttcgaggatcgagaatactactttattgtcatgcctcgatttggtataggtcaagatttgttcgatcgagtcgaaggcgagcctgatggacttcctgccttcgaggttcgctctctcttaggtcaaatctgcgatggaatagccttccttcactaccagggcattgtccatcgagatatcaaagacgagaacgtgattctggacggtctcggtcatgctcagcttatcgactttggttcttcggcccactggaagccaggtagaatgtgggacactttctccggaacactagactacgcaagtccggagatccttcgaggagaaaagtacagcggaaaagaacaagacgtatgggccttgggggttgtagcgtacgtcctgcttgtgggcgagactccatttgtcagttccgaggaggccatggttgggcttcaagtcggttccaaggtggagtcttgcttgcgtgagcgatgttttggaggcaaggatggcggagagactggaaaagagcctggcggaggaggtgctttgggagacgcgatggattgggtggagagagcttgcgaagtagatttgaaagatcgaccaacagtacgtgttttatttcgctcctaagaatacatcccgatcagatgcagccactgatactcatcatcttctgccattctaccaggctgctcagctgctggagcatcgtttcctcaaaggcaacggaggctggaccggattcagagggtttgaatcatattgagagaccgaatgttatgaatactatacactctttccctagcgcttcgcactctatcagcatttgtggtgtaatgtaatagagttcgtctggcctgtacagttgcaatctgcttcttttgcctctctctcattctgtaatgctttgttctctcgacctagctctgaaatagctgatacttctcatgaatagttctaaagtatgtaccggtgcgctaacacgtcgaaactgacaggctctggacctgtctcgacgctcggcttatgttgatacacggccaggaaaagtaattgacatgattgtcccttgcgtctagcttttgggtgatttgccactcgttccttaaatccagttgggttcttttcattcgacaggcaacaggattcagctttcaccgacacaccattcctttttcgacatgtcaaatcagaaaccagaacccaatctcttgacattctggaacctcgtctcatgttctgtctgtcggcggtcgatctcggatataggcccgactctatccttgtggataacgtcttgtggacacatcctgtgcgacgatcatcgaggtgggctgtcgcttcgacattgatttgatttgacgaagttccaaccataagtatgttgttagtctcatccttgatatattctgtagaccctaggaagcgatgcgcagaatgtcagagcgagaacattcttcttcaacctcttccatcggcagataaagtacattctttttgcacttggataagacagcatgctttccttcatttcttcaatcttatcactaatatcgatttgtcttaaacctcgcaaagcctccggatcaattcgctgacttcttaggttccattcccactcagactgtgatggaagcagtcgaggttcgaatatcttaaatcattgttctgagcttatcatcaccatatctgaccgtaaagtattattgttggagctagtttcagcagagatatcttattgaccttgtcagctactttaaacggaagactataagtcaaaaggtgcgcatatagccaaccgaactcctctatatgatagcacactcacttcatgaccggtattacttacgctacctgacagaatgttctatcggatgtcaagactcgtctagccgctggcatggagtcactcgctcgaaatgcacgacttgagcaagaaatcctcgatctgagagcagaaaaccgagctttgctagctcgactcgctcatcattcggaacatggcaacccaagagaatctatgggaccacctagacgaccatcttcgacgtatgtaagtgttcacagcagtgacgagagtcggaaacgaagaagagaaggtccaagtagcgagagcggtaatacgtaaggcatcacggcttcttgattgaaccgtcctacaacgctacggaaactctgaccaaacgtgattgctttggctgcagtgtaccttctccccatccttaccatcaacatatggttccaccccgactgacaatacctccgagtcatcgacctggctcatccatacctgtaatggatacatctcaagtccgtctcagtggaagatcgagtagaccagatcgtggagaaggcgccctagccatagccccggaacgcatacagcgatcaaaaagcacgttggggtatgttctttgatgtctttgagggcttgtccaatgagatgaccaatctaagctgatgtgtcttcatgcgctgttgatccacatacctctcttcctgaatcaagcaagttgccctatgatccccgttcgagtcgacagttgacagccacacctttatcagatcgttctacaccgaatcaccggtatatgcctagaacgacacctcagccgattcacccagatatctcaaacacaactcaatacccggggagaccatcgagttctgcaagttaccgctctcagggatctaactcgacgttgatacgtcccatgccgttaccgtctcaaacaaggccaatgcctcgggttttacataccacgaggccacagtgtacgcgccatcttgttcttgtcgctgtcagataatgaagttaagcaacagtagctgatcaaccaaagttctactatattctgttgtgcggacggcctaatcgacagcctcagcacccacacggcctttccctgatccaatcatccgtgcctcttctgtaaacagttccagaagtcctttttacactcaacctccatccacaccgagatcgtggtcatctgttcacgacaaataactttattaactcaacacaaggcaatacgactcatctgttgatgaccatatgtcaataaacctctaattaacaccctttctggctcagagtgttgtctgtatagacatgtatatataattatgaatttaaggaagaggttggactgatggaacaaggagctgagattcaaaaacatagtcacgactatgatgaggcatcccccttacaaaagcctaatcggtaacactcctgcgtgaactgtttctccagaataaccttatcccaacctttctccttcatccgcctcatagcgacaagctcccaatcaattgttaaaaatttcaaaatcctctgatcgattgcgctctctgtcatatccggcggaatgtatcgatctatgggtgtcgatgtcgctttttggaccacagttatgaaatcgtcgatcgaggcatctcgattaatggagtatacgtacggggggccgatagaagctgccggaccgtgttggatcttttcgaaatcatatagatcccagccttcgggagtaggggacgggcctgaataaggaaggattacaggaactctgaaagcagaaaggagggttgaaagttattgtacatcagccatagagatcgagtgacagtttcattcgaagggaggaaacaatagctgagcttacccttgacagctagatgtacgagttaaaggaagagatagaaagatgtaagacttaatgccaagacgacggatatcgtatatttgaagactctacttacagtgcgttgaatggcgagggtgaaatcggtgggcttccgattcccactaaagctttcacacttcctaacagtttctcatactcaacccttcccatcctcgacactccttcgattccacccggcaaatcaacgtcgcccccgacttcagctgtcttgtacgctccagagatgatgttaagcccggtagattctctggtggtcgcataccaggatagaggccaagcggctggtagataaaaatattttgtcttcttggccagaagaagtattgcattctgacggtcggcgtgaggaacgacaagagtgtcggtgcaattttgaatattatatccactttagagatgacaagatgttcagaaaagagaagatggtcataagccgactcattctttgcctccatcaatattaaatgaacaaggagaaagagcacacatatatgtgatgtttccaggcatcctgtaaggacttaatgtccattctgggcctaacggattccaactccacaccttatttgaaggaacggctgcttccccataatccgtatgaacgagtcttggagggtgtccccaaaaggtcggagtgaaaagcttgtaaggcggtctaacaccattgtcccacgtacacgccaaaggttagttccagaaaacacaagagtgttggaatcaagtataaggctctgaagggggtgtcgatctactaaaaggagcttaactcacattccagagggatgagagtccgattgaatacagcgagagtttgagaaacattccagcagtaatccttcctcggaccaaacgtgggttctacagtaacgagagaaaaagagaacatggggaaaagcgaaagatagagcaaatggttctatgagatcaatatcggtcacagatcgaggttgctcgagaagtagagtgaatcggagcaacctacatcgaatgtgaaaacatatcgtatatgctagccaggttctccggctgagaagcaataaagaagaacccaagcctttgaaaagatctaatctagaagaagaaccacacaagaatatagttgaaggcgtatagtggaagagaatcgaaggttagatcatcagtctcataaatcagaagaatgttggtatgttctactaacaacagagcgcatccaaaccgcttcaccagagttctgacctaacctctcgagattgtttacccgacagagaacacaacatactcagtagagtacttttacatggctgcatacatatcttaaattgaagagaggatctatgttctcacagattgataactctacatcactgaagttttgaccgaaacagacgaacaattagaatgataagaatatcaatcgagatactgttaatttctcgagcaactaaagaggcatctgttttatggacaagagtagagagagtatgggcagcttactcagttttttctaataacgcgcacgctagatacttgtatctatacccaaattggtttcaccgaaagatagaaataggcaagaaagcgcgcacggtcactcaaaggtcagcactcgtcgtatgcataggtctggtttgtccggaactccagaaagaacttctaatcactcacccaatcaacacaagtttcaatccatgcccttgtatcccacaaaccccaccagtcgctccatccatcaaacactttctgactccatacaactgggccttattgacgatccctgcccaaccaataccctcaaacccatctgttgctcgttcgacctcctcgagctggtttagacgacgatttctttgctgatcaaattgatccttgtctagcggttggatcgtcgggtatgtctcgaaccgaccctcttcctcattaccatcatcctcactaacatcgttccagcttggggttggtacagtatatgtcgtggacgctgacggcgagggcaaagacgacgatggcactgtctttccggttgtcaccgaaggaaatgataacggatccagaatgacatttcctggtgtactaaacgcataaggtatcgaggggtagaccagtatgcaaaatgtgccgagaaagacgagaaagaagagtaatcgagcaagacgcgtccgaggcaagaaccggaagactgtcgatccttttgacttaggagggggattagagttagcagggttcgggacgagtgagaagtcgtgacgggcagtcatcctgtatgttcctcggcggaacaggaggtctttccagttatcgtttagtgctgatctttatgcttaggaggtggttgagcatagatgtgcgtatggattcaaacgaatgaggtttgggagtgagagtcggtcccgatgggtcacgtgaaaagagataagaaatcgattgactgtctaatctctccgttcggtgctcagcgggcgatcaataatctaactttttatgtacatcaattttcttttcctttttttataatatagaaaaggagagagcaaacagagggcacatgaaacatgggcacttcacgtgcagtacgccactcatatatagggaaaattgaagaggaagtaaaagatatgtaaaaacaaaagaagacgtctcatggtctaggagcaggtgcgcgctctcggtatctgatcatgtttggtcttagttggtctagtcgagtcactcctagcaggcgcatactcgtggcaatctccgcctccatgactagtggcccaaaaaatacccatagagattcatatcaggcattgaagttcacctcttgaaggacaacgtgattagaagtaaaacccactttctatgactttggacaccccttcttgaccgtatgttccgttaccatagaggaacggtctacccagcccgacagccttagcccctaggcaaagagctggtacaaggaatcaaagacggatgagcctacaaagacatgttgatacttcgaggtttgtcaagatatatcacctttcagcacatccgtcccccgtttgatacctccgtcaacataaacgtccatcttgttaaacagttctggttttgtctgtctgagttcgtacaaaacatctatcggagctggggagctgatcagaagttcagaggaagagccatgggtcatgaggtttgggcgaacagatttctcaacggacatgagaacgagacgtacaaatcgagcgaccgtcctccatgattactcaagataacaccctgaacaccatgcgatgctgcagtctccacatcatctacagactgtatacccttaataataagtggtagtttggttagactctaaaaggaggagagaggaagaaagaatgggatttaggtagcgagggaggatatgatcagcaacgactatagagatctaatcgggtcagaaacggagatgcgaacgctacatacctggagccaggtcacgtcgtcccatgagaggtttgcgtctgcaagaaatggttcccggaagtcagagatcacaagttcatgggaagagatgtgaaaaatgctcgaaccttggtagccgctaatagctgcgaggcgcgaacaagctctagtcagtcactgctctacgaacatatatcagagaatatgaggcagaaacatgagtgaaagctgaccatgggcaactcctttcgagttggatttggcgccatctccgttcgatggctaaatggaggacgggaggatgtaggatatgtggtagcgatggatgttagttgtccacaacgtacggatacttatacgatatagaactctggcaagagaggacaaaccgatctctgagtgggcttagtccttctgtccaattctctgtttcctggtaccggcgagtctacaagaaatatttcggtggaaatacaaaagtgggcaagaaaaagtgagccaatattaggaacaagagatagatgctgactaggacgaaccgacggtgaaaatgattccatcaaagttcatcgcttcgacctttttaacgagctctttgctcttctctcgatcagtgttgagatatatctgaaatagcattggttggccgtcctgcttgacgtccatcatctcttctagcgaacatgatgcgttgatagaaacctaaccagggccaagaacagaagtagcagaaagaaaaaggaaagagaaaagacaggtcagaaagcgatgatgcactgcagaactagaattaatgagagaagacgattgcgcactccatggacaattccgccttcaccagcagctctgaccaaatttcgttcaccctctggatggccgagtttggccatagcagccggtgagatataaaccggaagtcgagcctttattttacctccaagtagagatgtcgacatgtcgacatcaaccacaggaacgagtattcggggattgaaccagtaatgcgcgtatgcataggcgttttctcttctggctgaaggatgagaaaaggaagatgtgtcagcgatcggaattggaggatgaaggaaaaatagagagtgatagggaaaaccttacaatattcatcatctccagcgctctaatgacacacagaaaggagtcaaaccggtcagaccttccgagagagaaggggtcatccaacagcgaacatgaaacatacatggtagtaagcccaagcggttcggccgagaaccttccttgcttcttgctacatacatcaagacagagaaggaccggattagtcataattgagatattgattggaaatgcatacaagatactcacctcaatatcttctaaattgatgatgtcttctataggcttcatttcttctcgcgccttcttcactcggatctcatcttctgatagtttttttggcgcgggaagatctttgaaagtagtcgggtcgacaactccgaccagtttctcgggctctaacgtattctctatcatgcccttcggatggatctttgtgaacagtttactgacgttcaggacgagacaaagaagcggacgatatgagcaaagtttgaagagtttatgggagaagagtaagcagaactccatgacctacgttgcatccttgcctccctgtggtggttttcggaatagcgcaagcataagtcgcaaaaagaaaagagaaacaatcagatagattgaacagaaaaacacaaacgtctagaggcgcgctcacatgggcgagtaacacatgggctccacctggatgcatgtcatcgttcatgaactcggtaaaatcccagacgttcttctgtccagtagaaggatcatcgatcatgatccataggctgtctttggtattgtgtttcatgacttccgaggcggcaatcagcttgcgtttgccaaactgcaccccttccggtgcgaccaaagaatcgagtttgattgaaccggttggtagaagaaagtaggctgccaatgtgagagcagaggccgatgccagagctctcttccagcgggatccatcgttgaaagatggcctgggtacagatctaacgaaggatgacgacgatgctggagaggcgaacgagcgagtggaaagaataggcggaggtcgtctctcgagaactaaaccgacagctgtttggctaggtagccttttgacggcagagagcttgacaagtcgaaggcaatgcatattggagagtatggtacgtgatgaatctgaatggtcaagtggtctactcttaaaaacacatgcttcctctgattttctcttcacctatttaatcgggaacacacaggaataagtcttctgtataattcggaagttggcgattcgcccggaacggacgggccggtcaaccggttggccgtaaccatcaggctgagcgtgtaaggctcggttgttaagaaggtaaccaagtgtaatcacttggttcgcggggtgacacttaggctctggcgattaatatatctgaagcagaccaaactattaacaatatactttggataagaggtttcaacaagaatctcagcttgaggaaaactcttatccaaatgcgcgaggggtcctgatataaaacggggacgccctcgctcatttggtctgccactaaagatatacatatgacgagcctagagaggctcgagatcacgagaactaaaaagatgaagcatgaaccatgcaaactagagcatgatggaaaatgggcgaagaggcataagggatgaagggaacgaatagcctgtaggggtagcccacgtaagagaacacgtgatacttaacccgtattcctgacagagcggctgtaaccaaaagcctccgatcacgcgatggcagaaaggaagacagtctgaaagttcaggaggttgtttcctagagaacacatagtcaaacgtagacatctgggttgcaagccgagttggtttacaccacgattgacatgagctgagtaccgatttctagccagaacaatacgggatgaaacttggtcggagtttggcaaaccgatggctggtcggctataaaacaacgaccaacagctgctctacgaacttttcagattcgttcattcctgacgaaagctaagaaccatggatgcgaaacattctcaatacctcgcgccgttgccatattgtttgaaagaaacacgggagaggtagatattgactaacgaaagaagacgcctgttcaactgggtgcatgcctgctgtgagaccttttgaacccgtggttgcggccagaccaccggtggattacaagtgacccgggtcaacagaccggatcgatcattttccttcttgccgcctttggtcgtttgagtccgtccccatcgtctttgccatccttgtcttctttggcatcgttgagttcatccttggttcggcacagactgggtatcccgaacgagcacatacatacgcacgcatatacgctggatatatacagatatccatccgcacgatatcctgtatatatctttggaatcgtttcaacttcgcttacgctgaaacctccatatatcgacacatccgtttctgttagaccagcagtcccccatctgcacatcttgttcatttttaaccatgtcttcaactcctcctccagcatccgtcaagaaagtaaagagaaaggccaaagagctctcggccggtcctatcggagaaacgtcaaaccagtcagacgcacctcctacgacagttaaacgtaatagagtaaggtttacggtctgccttcatggtcctagatttgtctgatctcgtttattgatcatcagttttactcgccgttcggcttgattttttctcgttatcattcttttgtcctctttctctcaggttcattttagttgtgttgagtgcaatcgaaggaagcaaaaggtgagcactcaatgagttctcaaaagaatctgtgccatatcctcgtatgcccattgggtcgtattcggcccaatcgggattagtcttcccaagtttaatggttcaaaccgtctggccgtcttggtctccttcgatcgctctttactgacactattcatacacacacgcacacatatttcattttcattggggatgtccggagaaaacagtgtggtacgtgtgctccatttctaaccgacagattcacaacgcaaggcctggccgcgtgtagagcatctgcctcagacagtctgtccggatttccactcacgctcgacttgccttattcttttgatgtgactgtatgggtatttggactaccacagatcgagaatcgccctgtggacattgcatcacccgaaaggttcctcatctatgccggccgttcatcaatggggtacgtccgtcataaatctatgtctcagttttaaactctgatctgcccagttaatcgtgtcttcgtcacctcgcgtttaatcgtctactttgtcgacatagatcgaggaccctaatgagcaagtccctagaccatcgcgcttcatagtctagatgttgcgtcattctggagtcttgtttaaaaaaaatccttctctgatcatccctttttgcttcctcgataaactagatacgacgcgtccatccgaggtcgtttagaccgaatcgaatcacttcttcaaaacctcgtgcataccaacacctccgattccaacttcctctcaaattctggtcattccgatggggctcgtcaagatgattctgcgtccccagccgactccattagaggtatcaccccgtccgatgcaggcttgacatccggaacaggagacctcaacgtgaccggtcaagccaggttcaagggagcaggaggcacagcggtcatggcagaagaagaacacgaggacaaccatgttggcacgatgtccggaggtagattctatggaccaagcgcgatgagctcggtctccagttcacgaatgtccaagatcttgcaaaacgtgagtccctctttctccctcaacttcttgtggagatagccaggtgtaattcaagtcaagatctctgacgatagcctggtttcctccaatctctgacaaggacagtttccgacgacgtccatcggagccgccgcgaccgttctcgctcatgaatcagacagtcatcatcaccattcgcatcatcactcaaatagcacaagcagcgcgaattcttataacccgttcgaaggacctttgtcggatggattggaaggcatgttggaaacattggacgagagtggaatcggattggacaatatcgtttcccttttcgagtgagttcctgtgcagacgcgaccaaaagctgacgatgtattggaggagcgtcgaataggatcagcgagctgatgttattcccttctcgtgtgctacattgccatatgcctattggggattcagaaaacttccggagagggatttgagaaacagtcttgtggaactgtattggcgagagattgagtacgttcaggccttgaccggcgcgtctagatttctctttcatctgatacccgtctctctttgtcctcgaatagttggacacgatataaaatttttcaagactcgtttcagacacgttatatctcctttttctcccacgaaacctcgtcaacatattaccacccgccagaaaaggggtatccctataggaacctagatgttggtggcttaaaatggttgcccttgttgttcatcatggtcagtcaagccgttgaatgacgcgtcttacctctcgaattgaagagaatggcgcgcttttcttgcatatactcactctatcggttttctaaaatcagatggcgattgcgactttgactgctccactgagcttgtaagtcctgaaaacatgaatagagcctacctgagcttatcgtggtgttgaacggcgaactgactgccggagaaatcgtgcatagatttggtgacgaagataccaggcgaaaatggagcagaagtctctatggatctgccagtttgtccctaccttgcttctttgtctttatcgttcttgacaagaagtcattctaactcttctgatacttggcgctcaacagggaaagccatgaacatcgcgcaggtccgtttatcctattcttcttcctcttagaagggtctatccgagtaacgagtctctgaaagtcatatttttctcttttgctccacattcctcaggcacttcaacgggacaatcttgatattgtcatggctggactattgattgctcgttatctgtttgtggtttcgcgacctgtctcgaccatctgatgtgcgcgctcattctgtcactcttctttcactttcatcttttcaaccctatagacttcttgttcgacgggcagcagaaggtttcactccactcaccaccgccctccagctcggtctgtacagagatggaactgttctaggaatcaaagataaacgcgagatcgagatccgacgtaggttgtgggcgtacagttaccatcacgaccggtcagctccaacctcctatttttcttggatccagatgaaggatctgagtttggaacttatatctgacttcatgttttcctttgcctgtttacgggatggaccaatggattcttagaacggcctctttgctcgttggaagaccaactttgatctcggactcatggtgtgactgtaaaccaccgtaagatcgtcttttgacatctttcaattggcgcgatctctccaatagctaaaccaacgggtcaaacactatgcttttttttctcgaacagggcgaacctggacgattatgatctcttaggagacttccccgaggaaggccgacctctgtcccaaccaacagtcatgacccatgttgttctcaggcattcattggcgtctatcatgggcaggatcagtgataagagtcagtcggccttcgtcatgctttcttttttcctgatcgacctgaaaactgattgggttatctcttcgatcggtttctttaccttggggaacatgggtctatcaaatctttctcggacaaaataaaaaagccttctcgctaaaatccccatcgtattctactgtcgtcgagcttgacgcagagctgatcgaatggaaacataatcttccttcgtaggtcttcttcgacttctcggcttaatcggatttgttcggatcttcggctcaatccactctctttttcctcttctttctcctcttcggcttcctgcactatgacgagtagttacttcaagttagagaatcccgatcgatcaatggattctaaataccattacttggcgtttcaccgacagatgttggccagtgaagtgagtgttttgtggctatgtcgtcctcgcgcgcatccgtgtgacgtttgtcttttggctgatgcaaacacccttcacggactatagttctattatactaggtacgtcttctcttgtcagatctctctgttcttatgaatgttatgtttaccagcaatcttttcttcttgaacactcatgcagaattacatgtaagtcatcttaaactctgtgggcttcttccgggacagtagaggaacgatctgaactgatgtcttcgctggacaactatagtacatcgaccatacattctaaggaaacgggactcatctcagtatgagtatagtcgaaaggcggctatcgaggctgctcgagcagatttgattggtcgaagagactttcagttgaacaaaccttctcatctaggcaaacttccggtaggcgcatattgggtattgaattcatacagtatgtcgttcttccctctttctgtttatattggtgtgctcttatggatagcaagagctgagcatagatcggttgtttgatgtaatcttgatagttatcattggaagtgagtttctcatcgaacgcgtctctcttgtcatgctttctagcaacataacactttttttccgttcgttcctctgtgctgacatcttctgtttgtttggtagttgctatcttgttagaacccaccggttctcaagcagacgaacttcgaaatctgttgaatgttgtgacaggtcgagcgccggaccaagatggaagagtatccattactaccgtccgagagctagcggttgtcgaacttttcagtcaaaaggagaaaggattcgactcgaggccgccgtcgcctacgtcttcctcttctacacatccaaacaatggcaacgggagtaacggttatctccagcttcttccaggcggatcgtcaaatcagtacccaaagtctcagccaaactggtcgacgagtcgagcagctgtaccggaaccatcactctggggtcgacctgatcctgtggatgaactatgtaagtgcatgtttcgcctcgtctctttcttttaggcctctggcagagtttctgatagctctcccaacggctacgttttggaaacctcctcaacttagtgatctcataccataggtcaaaagaagagccaacggctaatgagagacaacactctggtttgagctcgtctccacgtaggagtgcaccaggagattcagcatggtccgcgcgagcagtcggttcgtcatagctccatcttctattccatcctgtttatcttttctaatatttctgtgtttctttctatcggtccttctggtacaataagggatgggcgaccacactgttcttcggccgttcgctgacgaacagccttctgttcatagatcgttttcgcaacaaccctcgcctctgcaaaacacgtctcctatacacagcacctctcctgtgcacgatccttcatctctgttgcacccatcaacaggtgtttatcggtaccctccttcttcctccatcagggacaaccaaccgaacccaaagttgttcaacaccgaccctgacttcctgtcaccgtggacgcatggcttccaggcattttctggcgcgaccggcacaaggacaggaagcgatgatggtgggggattcagtgatctactgggtgatgagaaggaggttcgtttattactttttatttccgttctcctttttttttcctcatcgtatatgttggcataggatttcgtctgatctcgagaatctttctttcccttcctctctgtctatctctcctcttggatgatactcacaggtcgcgttcctcaaccaactgatctctgctataagttccggagacggtccatccctttgaaccacatccttgacattcacccgttcggtttcgatcgctgcctctaacatcattccttccctcgtttccttttcgattgattggtacgtgaaccttactttctttgtataattactaccatatctacatagtttattcctttctcttcgtacatatgtacaaatatgattatcggaatgatgcagacgaacagggaaaagcgtggctgagcgcggtttatgaactgattgggttttagaagaggcggtaagggctaaggcatgccctctgtagccgattttcgttatgtactgtcttactgcccggatctttcttctctacgtgattcacttagtctaattggggtatctaaactggcacactcgactttcgtcttttgttctttgctgactggatttgtctgaacaggatggacagggaacatagtacgacaacgaaaagcattgaatcctcagaaaggaataatttactacaaaacatagagaacagagaaaggcggggaatttagtcacgaagtttgaagatgatcggagatgacgaaagggcaaaaagaaaaccaaccttgacgggaacgtatcggtgagcgttggtggcaccggaaccagctcgtccgtgtcggacgggcttgtatgtcatggagaactctccaaggtagtgtccggtcatctcaggcttgatctcaacggtgttgaagacctttccgttgtagataccaacgacggaaccgatcatctcggggacgacgatcatgtctcggaggtgggtcttgacgatagcgggcttctcgttaagagggcactccttcttggcctttcggagcttcttgatgagacccataggtcgtcgcttgagtcctcgctggaaccgtcttcgggctcgagcgtggacaagctgtgggaattgaagacacaagaaaggaaggagctcggtcagcacgaggtattgcaaagcgagtaaaagtttgtatgaaatgaaacggaaacgtacctccatgaactagtaatttggcaaagaccaaaaggcagcaagtgacaagtcaatactatgtcccgtaagccagccatatgtggtttctctatgtacacgtctacacgtgtatgtatcaattttcaagtctattcatatctcaaacacccacctgctcgttggagagatccaaaagctgctcaaggtcgacacctcggtaagagaacttcttgaaagatctcttggacttaagggcagcagcggtggcagcgtcggtgatttcgttgtcagccatcttgaggatctggagaagaggacggtcgggttgattgtgattcagagtggaaacccagacgtagtttttcaagaaaagacagtcaaacgaaagcgtatgatcgagcacgacagaacgcagcacacaaagtaagaaatcaaacagaaagaaacatcataagctcggtatttcttctaaaactcctcaaagaagtgtatgctatccatcccaaccagaaaacgcgcaaacttaccggacttgtcgagtgtctggaaagagaacacgccgaccccagacgcacgacgctgtctttgtcggtggcacgcacgaggggacggtgcaaaagtcatacggtaaaaaagggaaaagtcaggcgtcgcctcgccactcacgtgacccagccagaactcggggattctctcgtcggggggacactgtcgaattctctcgtctagccgtaggatccttccgtctttgaacctccaacctcgtgagtgtctttatttctaggggtcccgttgcccgtggacaggccatggagtcaaggacacagattgctcacgacttgttgtcgattttgatggaagggcatcaagcactagtcagcctcggcttaaatcgattcgtgtagcctttcaaactcgtaaagtaagtgaaagaacagagaaaaattgagaagagagtcgaacggtcgtttggagagatagcatgctgactccctatgttttcaactcatccagaatgaagcacatcgccgcttacttgctcctcgccaccggtggaaacgttggtcttatcaaacacttgtgaaaagatcgagaggaaaagaatcctgaatattcagacttatgaaccatccgatttcctcttacctcaattttacagacctccccctctgccgccgatgtcaaggccctccttgccaccgtcgacatcgaggctgatgacgcccgacttgagaccctcatctccgagcttaacggcaaggacttgaacacgtacgtcttttttccttatacttcgcgttgataaagttgtcaaggtatttaccatgtgttttcttcattctctcgccttctttagcctcatcgctgagggatccgccaagctcgcttccgtcccctccggaggagccgcctcttccgctgcccccgccgccgctggaggagccgccgcccctgccgctgaggagaagaaggaggagaaggtcgaggacaaggaggagtctgacgacgacgtgagtttcttccgtgtctcatcttttgctgcagtcttgcctcggtcgctcattctttacgttttattgatcgaccacagatgggtttcggacttttcgattaaactccttacacctttttcaaactcttcgttggctcgagaatgctttggccgtctcttccgtgtcttctgtcctgaggactgcttcattgctgtactttcgggcttgattgcgatttgatgtcgagtatctgagaattcttgaagccgtcacatgttttgtttatgaaaacagtctcgcaactatcctacaatattcatctggaaagactggaccattttctgttgattgtcactgactccctggctttggctgagcgagagcaatctgaactgatggtgatatcgtggacgtgagttgtgcctacaacaacaggggttcagtctgagccacagatcaaaatagcgaattcgactcaagaagaataagatctagaaagtcaagtttgagtatttgccaagtcgagcctgtgcacattggtgattgagaacgacagcaagactgtcggccgactcgactactctgaggttcatgttgtatacttgacgtcggatgtctacatgaacatcgctgagactagctgcatgcagttcgattcaatatatgacctccatcataagaatctctactttgtttcgtcgttcttctgtttctatgtctcgctgctccttaatttcttggtctctttgatacttgctcccagacttagtggaacagagatgtgaacgcgtcgcgcaacatgctgcacctagccctacaccgggaggagaacaagggggggagaatgccgggctttgatgctgtcgctagtgaggctaaggctggcagaaactaaacccatgacccatgggatcttagtggtctgtggtctgagggcctccaagtccaaaagggccatgtatcgaccaccatcggttgaggttgctctctagtagccaaagccatatattgtgaaaggtatatgattctcaaactacagagttactgaacaaaagcggtgtgcccaccatactaaccgcacggaagggccataagcaagaagagatcgctggatgtgttaggagcgcatgcgctgtgcgactaggagttgtggcagaggctctgtagttctcaggtcacggacatgcaacccccaggttgcatctctgacatcctgatggtccatggtctgaggacacccaagtctagaaggatcacatgtcgaccaccatcggttgaaattactctcaccatgcctgaggtatctataagcattacgtatgaaagcgccgattgtcttgagagattttctaatataagtaacaggcaacgtctttcttcacaccacatctctctctccctcttcttcctcgatatagcccaagactctcaacatgtcgtccgaagtccagactaacaaaggtaagtgcttactctccatcagtttgccttccattcagacgtacaagtctgatcggtctgctccgatgggcagcgattgccgtcgatctgttggagttctaacgttttgttttatctgtcccctactctgaaaagcttgctgcactatccctcctgtggaggctgagtacaccaacaagggtgctttcgaggtcagtctctgttcatcttgcttccttggtgcttactttcgccgcctctgtttaccttgtccgacagagacaagatgaatagggatgaacaccttgttcataaatatagactcgctctttttagtattgacgtatggaaaaaaaaaatccgccaaacagaccatcgatggcatcaagacctacgtgactggggacaaagacgctaagaacttggtcatctacgtttatgtgagaaaacattgttgaatcacattcttcgactcagcatgtatgagacaattgagctgaatgtgaaggtctgacactttattcatacacaggatatcgtacgtctagttctggcctagaaatcctaataatagacttatccggctctgatgatgttccatctccacagttttcatacactcctcaagctttccaggccgctgacttgatcgccgctggaacgtgtgctaaagtgtttgtccaattgttctacctcagaggttcctcttcacgagtcgaatctatgatctccaaatttgaacgttctcttactgacatggactggtctcatctgcaccaaatatccagccatatccctgacttctttgacggcgtcgtcccggatgccagcctcttccaacccccctttactcctgagaagtgagttgaggccgtacaatcaatcgcgcttcctacatactcttaatctaattaagagtcgcattgtttgctttcttggacgcgtgtttagggacgaagccaaacagaagctcttttctaccaccgctgcgcctccgcctcagatcgagaagctcaacaagatgatcaagcaggccaaggaagccgggatccagaaggttggagctgtcggtttctgctggtgcgctttgagggtttcttcgttactcttccttattcatccttctccaaaagacgttcactcatctctctctctctctctctctcttctgtacgaaactcttcgttcggtcaacatcttacaggggagcaaagatctgtttcaagtcacctgacttggatgccaaggcggctttccacccgtctttattagctgaggaagacaccaaggacttgaacgtccctgttgctctttggcctagtggtgacgaggataaagagctggtacgtctctctttttgtttcgcttccgaatgtgcgtcgggttgttaaacccttactctcgctgatctgtgaatcaatactctctactgcgaaaacacagatggccaaattcgagaaggcgctctccacgaacgagtttgcttccaagaacaagtacaagctctatgaggatagacgacacggttgggctgccgctagagccgactttaaagacgagactcagaaagccgacttttacgagtcgtttgtcaacctgtgcaagtttttcaccagcgtcctctagattttcggtctttgcctgtctctcttgtttttgctttctgtttctttaagagaatgttatagctctgtagttgtgcgcttgaactgagatgtatcttttgctcacgttttctttcttgtaacatctaagatggacgtgttctcttttcgagtagataggaacaaaacgaatgtagtgggtattagagaacatattgatattgttcaactcgtgccttcttttttcttttggaatctctcatattgacggtactctgtagcggagaaaaagaagaagaaagtcgttcagaacactcaagaaaaaagagaaggatgaacaacatagaaaaggcatacctctgttcaaccgtttctcctcatccttctcacccgtttcctcctttctccaacctctgccaccttcgtcctcatcctcgaccccatcctcctgtttggccagaccctgcttggccctccaggctgccttcttactctttctgatcctaaccgcctcggcttcctcgctgtgggcaaggagttctttgacggacggcacggctgaaccggatagaggaaccagccggccagatccggccgtcggtggaggtgtgggtgaccgggaaggcgagcgggagtatagccttgtagggttgtactggattaaaggagatggcgatcggttcatcctcgtagaggtcgtactcgactctggcccaggagcaggcacagaggcggagacaggggctgagtggtcgatcgaggatgaagtaggaacagaggaggaagtggtaggattggatccgaaccagtcgcgaccagacgaaggctgagcgattggatcagtctcggtcttgagctgatcatgatcatcttgagcactgccgtcatcatcatcgtcatcatcatccgcgtcgggctcgtaatcactgacgcctccgaagatgtcatcctcgtccaacgaaggctggacaagtggtttagcgtacaccttctgtttggccggcaaaggcgctggaagtgactccggggagggtgctttgatggggtcgaccatagttgccgtagatggatcgacggatgaggcgtctggcacaccacccgaagtactgacaacagatccgtcctcgggctgaccatccgtcaccttcttctttttctttctcatcttcttctctccctctagtccgacggcctcgttctttttctttttctttttcttctccttttccttctcgccgatcggcttaaacttgctattcaatctaggtgcgtccgggacggaaggagcggccgatccgagcgcgcgcttcttgctgttgaccgcagcgagaatctcttctctcgatctcttctttgtggccggcaagggatcagcgttaaaggtgctggaagactgtccgtgattgaacgcctgttcaagttcgtcgtcgtctatctggttttgggatgcctcaagttccgccttgtttttagccagtaaagcaaagtccaaccctgattggatgtgaccatcgcgacgcgacgcgataagagaaagaagacgagaatgagccaacgaaacaggagcctagaggatcatttcttaacacattccctgttccttcagacagatgttattgaagggagaagaaagaaggtgcttacctttgaccaagattgaatggtcggcgtctccgcccaagtactttcgtttttcttccaacgcggctgcgtcctcaccctctgctgccgctcttctctcgaattcatccttgagcgcgatgacacccgagtactcatcttccagccctgctcgtctctgggatgctcggtcttgatacttggactgttccttctcatctgtcggtttcctgactttccgaggcttgaacgcctgactagatccctcggctctatggtgggaagagagaaataagtgattggacgcgttgaagtgaaaagaagaagcaattcaacgaacggtttctccttcttggaaggtggaggctggtagcctcgtttgggaccggctcctcctagtgaccgagtagaggatgaacctgcagaggcggccgaggccgagtctggtcgcggtgcagacaagaattgacgaaaggattcctggaagaaaaggaggagtaaggtgagttcgatatcaattgaagggctgaccagatgtatacattagagacagaggagaaggagggccgacctggttcatctagaggatgtgtgtgtgtatagaagacgaggaagaatgtttgagtgagctgatggaaactgaacggaatgagatcatgtaggttgtatcggactgtgttagggttagtgaatagatatatgaatcgaatcaatcaagtatgtataattacgtatatataacataagtagtaaaaatcaaaaaaatttcagatatagacatatgtacttgtctgtgtattcatctacacgggtgcctgatcgactatccatctatttattcaaatatatattcatctatctacctatgtccccgctctctcttaaccttctctcccagccttgtcgtttttcttttctactccccaccggaaaacacacaaagcgcccaccatagcgacctcacgcctcaatcagaccctccgtcacatctcttcttccatcgtcaactcccgcaccatgtcctacacccccagagttattggagtacgtctctttctttcttttttttggtttgctcaaaagcatgcgcttgttgtcgttctcttctctcttctattcgttcataaagctaatcacgccatctctcttttccttttttttttctttctttcttttctctcgttcctcttttcttcccttctctaggctcctaataccctcggtaagctagcctgtttggtgtgttgtacccttcggacgttgcctgtgacttatcgcacgaattgtgcgttgtgatgtagagcaccgagtgtacatcgagaaggacggcaaggtcgtctctcccttccagtaagatctttttctcttgtctcgttcagagctcctactagttcatcttagccgacaggaatgctcaagctcatcgtttctttccgctcttctctcccttcagcgacatccctctcttcgctgatgagtccaagaccatcctcaacatggttgtcgaggttcctcgatggaccaacgttcgtactcccttttaaatctcccaccagtgcgaccaagaacataccaagtctaagtttttctctttttggcaccgcatacaggccaagatggagatctccaaagaggagcacttgaaccccatcctccaggacaccaagaaggttagcttgcattcatccccgcttatagattaaaccggccgaagtctaacatatccggttcatatctttgtagggcaagctcagattcgtccgaaactgcttccctcaccacggttacatctggaactacggtgccttcccccaggttcgttctcccttttcctaccacgtctgacaacccgttatcatacaaacatcctgctgacctcttgctcgctcctatccttacctttctctccgcgctaccagacttgggaggacccctcccaggttcaccccgagaccaaggccgctggtgacaacgatcccctcgacgtttgtgagatcggagagcaggttggatacgtcggacaggtcaagcaggtcaaggtcctcggtcttatggcccttctcgacgagggagagaccgactggaagatcatcgtcgtcgacgtcaatgatcccctcgcctccaagttgaacgacattgaggatgttgagtcccacctccctggattggtccgagcgaccaacgagtggttccgaatctacaagattcccgacggtaagcccgagaacgtcttcgccttctccggagaggccaagtccaagaagttcgctaccgagatcgtccacgagtgccacgaggcctggaggaagcttatctctggagagagccccgccaagaccaaggactacgatctttccattgccaacaccaccgttgagtcctcctctggattcaccaccgctgccaacgttcccgaggccaacgcccagcctgctgcccccatcgatccttctagtgcgtgtccctgtctgcctttcctctgtttttatacggtcgttttcaagaatttaatagctgacctggcgttcttgcttgttctttcgtgatcaatagtcagcaagtggttcttcatcgctcagaactgaatgtagagttagacgcgcccataagattgtaatccatgattttttcttattactgtcttcttccccgctcgaaatcttctcgtgtcgattcccattgagacactgtcaaagtctgctccagaacgtgaacttatgacactctgtctgactgggtgttgccctccttcgggaagactatgctttattcatcatatctagcaatgcacacatcttttcgtttttgtcttttcaattttcaactagcgagccagccggcaagccaactctggacccagatcggccaccagatcacccagaccccgacccaacaccaatcaccagagacctcaccctcttcgatcaatcggatcacaccctctcggacagactcaaacccggatagactcaccgagctgtccgagtgagagtcagatcgaaggagagcacagagtatgaggataccaggtggcgagaagaggatgatggatgtttgtttgagtaggaccgtcgtctttgctagaactttttgtgtcgtcgatcgttctgacacagaagggagaggattggaagggaaagggtggaagaacaggggcggaagaaggacggatcctagtaatgtcgcttgggggaaattcaacattgagagtgtgggtatcaagagacccgttatgagatgagtgaacgtccggatcgtcacttctagtgtccttctggatcctttttccaacgccgtcgttgttgaggaagaagagagaggggaaaaggtgatcaggctgaaaaggagggcgagggttgtcaagagcgcaggttggaaagtcgtcgtttgctaattcgatatcccacgtgaatttttttctctccttatgattaacctctccgttctcaacaacgaggaagcaagtagagaaacatcaaaaggactagacgtaccaacatggcacggaacgttccggatcgagtcagaatccagaaagtcaaccaaccacctaaatgggttcccaccaccagtgccgccgccctcaataccggtctcccgccatccgccacctgcgcccaacgtacgagtcctctgatggtgatccctgagccgatcaacactcctgcaggcagatagcttcccacttggacggtccatcctgggaatgggtacagataaaagaacaaagaggcgtgcagtctctccagcaggttgtttgtcgatcggagggaagcttctaacagtctgccgagagcatggaagccgtgtgggccggaagaaggtcgagcaaacaaggtgatagcgtcgatccgatatctttacgacataaaaacggagggaaagaaaggacggttaaggtttctgagacttctttttcctcaaaaaagtgagagaaaaaaaaagaaagaagaaaaagaaaaggaacgctttcccttgggaaataattaacatactgcaagaaagcgccatgaacgcctgagcttcgacccaagccagcccaaaaccaatgctcccagaggcctctcgcttctcgcgcataacttgccaatagatgccacgtacccgatgagcggattatcttgcttagcctaggccatgctgttgagaactcgtcaagtgaaggtaggtcggctgagagtttataaagctggacaggaatttgggtatagtactgggctatggtggatacactgttgagcacatcctggttaggcagccgaccgttggtgccctctttctcccgtatgccattcatattatcaagatgagaaggattgagttccagggggcgagtacaagatcatagagggaatctacacaccgaaatataaaccaatatggctgaaactatgacctgggtaatccacacagagcgcggtccaaatgactccctttggcattcctcgcaagtcaccagcaaccaagtctagatgaattagagtttgtttgaaacaaaacatcagatccgtgttcaaaacaataataaggagaaagaaaatagtaacgcactcgactgatgggttccatggtaggaagaaaggaaagcctgcatcccttcgagatggtcgtctgatatgacaaagatgatggtcttagcgtagtggttagtgcctggagaatattcacgaccagatgtttgagaagacagatgataagatcagctcaatgttggactaagaaaaatgctggaagaacggcgcaacagatggaaaacgtgactgacctcggaggtactctgctatacttaataacatagcaactcctcgtatgttcctcatcctctctcttccgttattggatcccactgtgttgtactcttcaatcccctctgaaaaatcacctttgaaagcaagactttcccaactggcggctagaacgatcgcttccgttccactcgtccgaggtgggacaaatgccgcccaggtattctctccggatttagaaccaagggatgtctgaaaagtgtatggctgactcgaggtagggagtccgagcgccgcaaactcggcttgaagatgggcgcttagcctgatgatcaaacgaaaccaaggaagaaaaaagaaagagtattctcagatcagttcacttagatcgcagtgaagaagggagaagtcgagatgacgaaactcgtgcgaggacatattctgggcgtgccaacgagatatcttttcaagataccggtccgctagctggacagaatcccaaccgtacttgatgctagcctacaaattgatgggatcgttgtagcagtcatcagcgcagataactgagcaagccatcgaggacacgaatcttgccaactcacctggccgggctgcagggcatgttcgtccacccgcactctctctcctagctgttgtacaggaatacagagcaaccacaatgagccaatcactattagcactgttctggttgattaaacgaagacggaaagtccatcagagacaacagaaacatagtcagctgctgattgactgcttgccaggctggctacagacgaaaggaaagaatcatcatcggaaatgacatacgaaactagggagccataactcttgagtttggtctccattgactgtcttctatcataccgagcaatcaagcgttgagactcggtgacaggcggacctgaagaagagcgtctgagacctttcaacctagctagaaggcccatacaggtgtgatggctgatggctaatggttgacgattgatggttgatggttgatatcctcatcctcgctttcaccctagatgttgatcagcatacccgcttacataagccatccctccgagagattagatttttatctttggtagttgatgtgttggctaaacaccatcagcccaacaacacctcgtctggatcctcttcaatgtctttcgttcagcctgggcagagcccacacttgtcaccttctcagatcctttccttgaccgctccgccaactccttctcagcctgctccgtcgtccccggatccgacggcatacatcctgtcgatcaacccgcttgctaactcgccctcactccttctcactcatgcgacgtccaacctgacggtcgtcgacagatcatcctttcaagtggttgataagtggattgctcctaatgggagtggagagatctcaggtgttgtaggtcagcatggtgcggagggtttggtgtggacgtgcggaaaggagggaggaatccttggttgggatagcagggtcaaaggaggaaaggcaaccaacaaagtgatgcgaggtgggtcagcgtattctctacttgttcttcgagtctcgttcaatgaaattatatgagatgggattcattcattcctgtttttctcgttccctgtgacacatgaacaaccacacaaacagttccgggaggcaagaccgtcccccttctatcccttgcttcttcagctgagcaccaccttttagcagctggaaccgagctcaccaaccacgaagcgctgatagcatactggtagctatgtctatcttctctggaatggtctcagaaacaaatacacatgaacgatgtctgacctctatgaaccatattcaccagggatccccggtcaccatctcaaccgctctacacgcattcgaccctccattcagatgacatcaccaccctctcctttgcgccctcttcccttcactctcttacatttcctctgcaaccttcgaccgatccagatattccgccacccgctcaaccgcagtcatcggctatcttactctccggttcgaccgatggcctgctcgcgctcagcaacgcgctcgagaaagatgaagacgagagcacactcggtgttggaaacggagaggccagcgtggctgcagccggatgggaagagaacggaggctggggagtctggatgagaaatgatatggatggagtcgagaggtgggatgccagcgacgtaaatttccttcctttctcaaatatagcctggatctttcttacataaagattattgacaaaagcattgtggattccttttgattgaacaaataacagttcacgcttcgatcgaaagccgagtctctgagactggatacgcctgaaggcgttccttcgacccaggcatggacaaccgactatctgatcgatgttgtaccctctttatcgacagcttcgtcttctagaatcggcggttgcttggtcggagacaacgcgttcgttctattcttcttctcctttttccttcttcctcattatacgtatgggaagtgatttgaacgctgtttcatcaaatcaattttcagtggaaacatcgcactcttcaacgcatcaaacggagacgacgaagacatggtcatatctaaaaccttccgaggcggtttcaggggtcaccgggatgtcgtccgagctgcctactatgattcttccgtacgccgcatctttctcttctctactcgttctgacgactccgtcttctgttcgtcgggctcatgattgttctcttcatgatgggtttgtccaaccctatgcattcatgactcttttggtccggacagtctcagacgatgtacactggttcagaagattctgtcctttgctcttggtccctcaacgatacttcagggaaagacgaagacgaagatgtcgagatggacaagcatgctcaagtagatggagatgatgagatgaacggggtaaagcgaaggagaccggatgagcccatgttgggcggcgatgggggttggggtaaaaggggacgacggtagagtatttcgaatgtcaatgtagagatgacacagtatcacgagctggacgagacagaagaaccggaaagagagtgaaaggaaaggaggaaggaaggacaaaagatgagaatgcaaagcaaagcagttttattgagaaaccaagtatcttagataggcaagagcagtccctcaaccctagaaccctgtgggacctctcctgaatcgcccgcctcaacaagcaccaacacctcagctcgcttcagactagccactcgggacgaccgttgacctccagtggaagtcactttgggtaatcctgtcgggctgaaagagagcgtgcaacgatgatatgtcggtcgatctgatttgggaagcgcatgagccaacttgatagagaagtgaccaattgtggatgtgcaaacgaaagctcaatcagtacacaacccaacctagcgagaaggaatacgcgcacagacgaacctcaacccagattggttttagacctctttctttctctggccatccaccaagcgctcgaagaacgggtacaacaaacacccagaacgttaccagcgcggatgcagggtttcctggaagggcgaagaagatcctgtctccgtgactttctttcgtcgatgatggtgatgatgacgacgctaatgatgggttaggaaccgaagcgaatgtagtaggttttccaggagccatggcgactctcccaaagtgaatgttggctttgaaagtatgttccaagagaggctgaaagtagaccaagatgaggaaccctcggtcagttcagagcaagactttgtctccagcttagtatcaggtcatctcaagacctactttgacaagatcaccctctcccatgctcgtccctccggtcgtgatcactacgtccgccacttccaatgctttcctcatcgcctcttcatgagcgccaatttcatctctcaccacacctatatctataacctcataacccattccctcggccgcacatctcaagcttggtctgtttgagtcatagattccaccccactggccagcttctgtgttgatcgtcgcctccgcctccgaaggcttgtccagtgaaagattaattaactccgatccagtactcagaagggcgatcttaggtttccttttgaccacgactctttttctaccaacagaggcaagcacaccagtttctccaccgcctcgggtgatcaactcaccagcggacataacgatctcgccctgcgggatatcggaccctggaagtcgaacgttagcgcctttcttggtggacgaagagagtatccggacgatgagttcttcaccggcttcagaggcagaaacaagctcggtatcttcaaccatgatcaccgtgtcggctccttcgggtataggccccccggtgttgactctttcgatctgacctctttgcaaaggtaacccagatcctcggggcctcaccaaatattctccaggaccgtcttctacatgaaccgcgtatccgtctacgttggtcgagtgccaacggggaagagggtgctcggcctcgaccgactcggcaataatatatccggctaggctagagtccaactacatgaggcatagttgatcaacacagatgataaaacagaaaatatgattgacatcagacaacatatcgagtggtgaatttacctgacggatttcggttcccaagccgatcatcgctcctatatcgtgaactatttgaaccgcgtccttcaagggaatcaaaggatggggcgatttgcgttgccgcgcggagactgcgctagccgaagatgatcatcaggagatctcgcacgaaataagagaaacccatgatcgaatcggctaaacttacctgcagtatttggtttgggatgatgtctatgatgttctcccgctctatcggaatgatggatgcacgtatggccttgattcttgaaaggttgagtgtccaccggatcactcactgttctcggtccatgttggctctcgatctgcgttttgcactccggagactcccccaagaaggatagaccatgtaagagcaaaggcgcgaggacggccatcccatctttgacccctcctttacttccaggaagagcaacaacgagtgtacgggagagacgagtggcaggactgatcaggccacagataggattagaaagagaggccagcggggttttggaaagaccatatgccgtgatggcttgtgagagcgccggaaggtgtttactgaacagcggagccaacgcctgtgatgtggtatgcaatgtcatcagaaaagagttagataggagcatgattagagcatcgaagcgatatgtaaactcagcatacttgcctgaacggtcacatctctcgctccccagccagtccctcctgtggtgatcaccaagtcaactccttcgtcggcccatgttcggacgatcttccggatatcgtcctcgctatcagacacaaccgcttggcttaccatatgatcggaagcaaaaaggccttgaatcccaataagttgcgagcggatatagggtcctgtagtatcgagagatagatcgtgaggagcggccgccgccgtatccgagactgaacgaaacgagcggagtagaagatgattgatgaacaagccgactaccggttcactctcagaaccaagagcctcgaggaatgcttaccggtgagaactgctgctctgtatctggaagtggacatgctacgaaaagggtataagctctactcgaagatcctcggacgcacaagtgctgatggtcatttcaacatgatctgtgtctaggctaatggaataacgatgatgcgcgcagtcacgtgtttttcagccgtggtttccttaacattgcaccatccgaccaaatgtcttgcactcaaccaacacctcacatatcagccagcatgtccgactccactgcctctcaaggagctcctgctatgatgtcttccatcaagtttggagacgatggagcgattcttatcatcaaccagcttcttttgccgtgagtttgctcgttcgacaagagaggctgggtcgagtcatgctctccttctatatatcgacgtttaaggagctgacgattgatactctcgtcatgtttgtgtagccatgtggttcgatgggagaaggtggaaactctggaggaaggctacgatgccatcaagtctatgaaggtatgcttggtttcctctattactctccccctaatttatgattttcattttttttttctttctgctctcattcaacttcatgtatactttcaactcggcctgacaatgaaaatatgtttagatccgaggtgctccggcgctcgcctctctagcctgcctggttcttgctcagaacatttcacgatccctcatggcctctcctttgccggatcacctcaccgatcagcagagtttcttgacgtatctcaccaagtcgaccgaatacctcaacggagccaggccgacggctgtgaacctcggagaaggcatgaagaggatgcagcaggctggagaggatgccctcaaggccggaaagtctgctgaggagagtgcgaagctcgtggttgaggccggccagcttgtgagtacctcggtctggatgagactaggacgagggtcaccaaggttgcgaggatgttgatagagctgacaagatcatgggcgctgatgaggaaacaggttcacaacgaggaccttgctcgaaacatcctgatgtccaagcacggagcggactggatctctaaagtaaccggcaagaaggacgatatcaggatcttgactgtatgtcgttttgtctctttcttgtatcgtacgcaatcttcgttgacctaatttctggcccttgtgctcttcaacggtaccgctttcatccaggtctgcaacactggttctctagctacatccggaatgggaacggctttgggagtgatcaccaaccttcaccagaccggtcggctcggccgggctttctacactcagactgctcgtgagaataaaattttgttatacagatagaccccgaggtagttgtctttttagtcttctaaacatccgacctctccttgccttctttgacatgcttgtctatctgtcgttgacacgatagcctaccaccagggtatgtccttattttttctgtgaacagttcacattcaagcgcttgaacgctaactttttcctcctctgaccttgaccgctaggatcacgtttgacgtctcttgagctcttgacgctccagattccgtctactctattggctgatactatggtcggctcgttgttccagcaccaccagatcgatgctcttgtggttggtgctgaccgggtggttcgaaacggagatactgctaacaaggtttgttctttgttgagtttcatcatgtactttggcggatctgtatccggatcgtcggctcaccgccgtactttctctgctcttttccgttcttctaattctcgtccggcgccttttctcctaccgataggttggcacgtacaatgctgccgtcttggccaagaggcacggcgtcaaggtcgtcattgtcgctccagagacgacgattgatgtgtctgttgccgatggatccgggtaagcgctgtgtgttttctcggagttggcatcatgtcgcgacggctgacacagggatttctctctccctctctctctgttgtgggttgtatgaaattcaacatcagcattccgatcgaacagcgaccggcgactgagctctgctcggtatcgggtaaactgctttctatcaacggggaggcccagacgtcctctgatgtcagtctggcgactgtgcagatcacgccgaacggagttggatctttggactactctcaatgctacaagtgagtcttgtgcaggttgaaagaggatattgtgtgcaggccagactctgactccgactctacccctctctctctctttaaagccctgcgttcgatgtgacgcctgccggcctgatcgacgccgtagtgacggagacgagggtggtggagaacgtcgagggaaagatcgacatgactagatagatagatagatagatagatagataggtgcacagacaaacgatcgaacgctatagatgaccctgtgcacgcacaacatgcgaccgagagacggacgtaggcaaaagccgtaatacgttccgtagtacatttcctaatagcatatagcccagttgtgtaataaacccgaaaagtttctagaattttctcggccggctcttgacaaggtgggcgattacgaaacttgtcgcttttttccgccgcctttttttccgcccgctgcctttttttccacccatcctcgcctccaccgcaccacatccatccacctcgcatcatctaccttgcatccaccacatccttctttttgtctgactccttaaacagtttcttcaaaagatgtactctgctctctcccgatctgttcgagccagctcgtcgtcccgaatggccttccgagccgctaccgttagtgcccttttttctctttttcttcttttttccttttttctttttcttcggctcgttctctttccgttttttctctttgccccaagtccgttcgctcacacccagtcttccccatctctctttggctacctctctttccaactctgcccactccacacatcccgtactccgccatcgatgcgtccggcttctttctccacccgatcggcccacacagcgaactcccgtcctcgcccgacctatgtccaacggcaaggttaacggaccggtcatcggtatcgatctcggaaccaccaactcgtgtgtgtccgtgatggacggaaaggttccccgagtgctcgagaatgccgagggaggccgaacgaccccttccgtcgtcgccttcaccaaggacggtgagcgacttgtcggccagcccgccaagcgacaggccgtcgttaaccctgagaacacccttttgtgagtttcgggttttcactctccgatcgatctcgaaatttcatgatttgatcataaagactgatctcgtctacgctttcgcgctttcttccttccttctcagtgccaccaagcggtcagtccaacacactttcgattctacagttcactctccaagaacagagaaagaagaagaaggaaaagaaaactgaacatcgctcttcgattttctctgtctatacatcaccaacttttatctctatcagactcatcggacgaaagttcaaggatgccgaggttcagaacgatatcaacaacgtccctttcaagcttgttccttccgataacggagatgcctgggtcgaggcctttggcaagaagtactctcctgcccaggtcggagccttcgtcgtccagaagatgagggagactgctgcttcctacctcggaaagcccgtcaaccacgccggtaagcctttgttcccttctcttgacaatgtaatttgactgtggatcgaacgctgatcatcgcttctcccgtacgtcgatttagtcatcaccgttcccgcttacttcaacgactcccagcgacaggctacccgagatgccggagccatcgccggtcttgaggttctccgagtcatcaacgagcccactgctgccgcccttgcttacggtctcgacaagaacgactcttccgtcatcgccgtctacgatctcggaggaggaaccttcgatgtttccattctcgagatgcagaagggagtcttcgaggtcaagtccaccaacggaaacacccacttgggaggagaggatttcgatatcactctcgtcacctacctcgtcgaggagttcaagaaggagtccggtttggatctctccaaggaccgaatggccatccagcgaatccgagaggccgccgagaaggccaagatcgagctttcctccacttctcagactggtcagttctcttgtacacgtagttgaacttgaaggccctcagaaaatgactgacaattgactttttttttttttttcttttnnnnnnnnnnttttttccattcccttcctctctccccagacatcaaccttccctacatcactgctgacgcctctggacctaagcacattaactccaagctttcccgagctaagctcgagtcccttgtcggtggtttggtcgccaagaccgtcgacccctgcaagaaggctttgagcgatgccggtgtcaaggcttccgacgtcggagaggtcattctcgtcggaggtatgtcccgaatgcccaaggtcatcgagaccgtcaagtccgtcttcggccgagagccctccaagggagtcaaccccgatgaggccgtcgccatcggagcttccatccaggccggtgtcctcgccggatccgtcaccgacattcttctccttgatgtcactcccctttcgctcggtattgagactctcggaggagtcttctcgcctttgatccagcgaaacaccaccatccccaccaagaagtcccaggtgttttccaccgccgccgacggacagaccgccatcgaggtcaaggtctaccagggagagcgatccatggtccgagacaacaagctcctcggaaacttccagctttctggtatccccccggcccacaagggtatcccccagatcgagatcaccttcgacattgacgccgacggtatcgtcaacgtttccgccaaggacaaggccaccaacaaggaccagtcgatgaccatcgcctcctcctctggattgtccgactcccagatcgagcagatggtcaaggacgccgagtcgttcgccgaggccgataaggccaagcgagacttgatcgagatggccgtcgggtccgactccacctgcaccgacacccagaagtcccttgaggagttcaaggctcagctcgatactaaggaggtcgagtccgtccagaagttgatcgacgagctccgagagctcgccaagcgaggacaggagggtgaggagggtgtcaccgctgaggagatcaagaccaagaaggacgagctcctcgaggcttccctcggtcttttctccaaggtccaccaggccaagcgagacgccgccgagtccgagcccaccgttgaggccacccccgagagcgagaagaaggacaactaagtgcctgaattctttctagcttttcccccccttctcttctcggttctcaactctgttttgtcccatctgtttttcatgac

SEQ ID NO: 679 - DNA, 11712 bp, Xanthophyllomyces dendrorhous
cccccctgtcaacaaaacccccaaatgcctctcttcatttgtcttttaaatattacacctagtgatcattagcgtattagcacaaatcaactttcccgtttgtttctttgacttttcaatcccaacccccgcctctcaaccttttctacctttgtgctctgcttctctatacatatcactgtctccctcttaccctccccgctttcaatctaaaacgttttgtttgtaaaccttttttttctcctgttttcttaaaaaaagggatattcatatttatgtatctcaactctcaaattccttgagccacgacattgtggtgccgtggtactgcgacagcgttcatacaaagaaagaaaaaatgaaaatagaaaaaaaaaaccggccgggccagacggagatcgtgtaaagagacggtcagtccttggcgcaagaggaaacgaaaactcaaactagaattaaaaaaaaaaggttgttcccgatcgacgtccgatgtcggacgtcggacttcccgacatacaacgtgttgagtgcaccggtctcatcaggacgatgatcatcttcccccctcctttctcttccatcggtccgttctctcctcccaacccgtccggtccttcacattcgggtgtcaaaacacacccctgttcttctactacgcatacgggatcatcatcgtggtatggtcatgtatattcgtgatagcgtgaactcaaccaagaggtaacaaagcaagcgataaggagcgagggacgaaagggaagggaaaaaaaagtccgacgatcgtttggtatgagggttgaggatcatagggttataaacgtggattgaaaggaaacggccagtaactagttaggtgagagatgagatcgagatgcggtggggagagagagagagagcaagaagacaacatttctccatcaagccgaaagagagaatctcaggttcaaatgaaagatcatcgcttaagcgctctcgagctccttgaggtaagcatctgcctcagcgtttccactagccttggagagaacctaatcccgtaagaaggaaagaagtaaagagaaaggacaagacaagcgcatgttcagatctatcatccgcgagacgaaaggacgtcatagcatagtgatccaaaacggacaagaggaagaggcaccgggaagaaagcaagaaaagacgaacccgcttgagctgctcaacatactcctttttggcatcctccgtagactttcccttgacttgggtccaagcgttccacttggccttaccaacaaagtccactaaatgcgcgttcgaaagaggaacggaaagagagggaatgagtgacagttccaggcagtctaatcaaggcacagatgatggtctcactcaatccaggcttgggagtgttgcagtctccaacagaagctgttctcgtccattcgcatcaaacgagaaagaaagaaggcggaaggagagaaaagatggcagaggacatccggataggtttagaagggaaggttctggtcagcctctctcgtacggtttactttcgaacctgaagagaaagcttagaggagagaacaaaccctgcttgaacagagcgtagaactgatcgaaagagaaagaagagcatgtggtattagttctttgcgctctccaaacagaaaaaaaaaccaagaaacattgcggggaaagactcagaaagagagaaactcacgatgagtttatcgtcatcggaaggcctaacatctccggtcggaggaagcttagagacgatggcaacggccttatcaaattgagcagcggacatatttaagagagtatttggttgattgagagagatagagtcttctttcgtcgtcgtcgttgatgagatgagatcggatggttgacaaagagaagaaggacaaaacttttttctctccccattaatttgtgaactttggggtaaacggaatttcccatcggaacgtccaggggagaaaaaaccagaacggtgatgtaattctcgttttaggcgtaactaagccgtgccagacaaagctcacttgctctttcacctttctctatacttttcatactaacaaatggttctcaagtggctttgtattacaaagaagaaatagtactgtatgggttggaaaatgaatgtggcggactataaggagaaaaagagaagaggcacgaggaatgagatgtaggggatcatgggatgaggaaaaaccagtcgaaacgataggatgctgttacgacggcattttgagggagagagcaacgcttggatggatgaccggataatcgtgctcgtgaagatggctcggagagggaaagagagataaagaagggaagaaaagatcgagatatacgacaaaagccaggaactagagacgactactactaatagaaactcttggctgaaatcaacatttcttccatatcgagaggacacactctacttcttctcagtgatgacggcacttccgtccttgccttctcgaacaaccttcgagtctttaccgcctcggacgtcctttccctggggcttcttgtaagtagatttgaagaaactgttgggggaaagagtaagatttaataagataaaaaaacaatcagcaatagaagagaaatacaagaaaacaaatcatggctacgtacgcaataaacaagaacaagtaactgctgatgagagcgcaaccaaaggcggcagctccgggcgaaccggcgcaatcaccaccgctggggagccaaggagcgtaggcggtagcgaatcgtccccaacctgtaaagtagatatcaattcagtcggaaaggataaaggtcagtggtcggctcaagcaaacgcgcacccctggtctgtaacgatggcaggtgtgtgattacaacataaagtatgtaggatggtcgacgagaccatgtttaagagtccaagccaagggaacagacgactctgggacgttgttcacaccttgaattcagatatccgtcatgatctctgaatttaagaaaaagggaagaaatcgaccaggggatcgaatactacaagactatggtctgtggaattcaacgcgttttcggtttgggaaggacgaacgggcaaggaaaagcaacgtgctggcatagtagatgatgcaaagatcaatgacgaattgggtgatctggaaggtggtcaggtacttcttccactatggaggaagtgggggtcaaaagtaaacgcggtcaactttcatttgcactactggtcgataaggtccagggaaaggaagattcgggtacacacccagagcttctttcctccagcagtggcgaagtagtagtagtctagtagtgaaatgagtgaacatatcatgtcgaatcagagttggatcaaacgaaaagaagaggaatgctcatatgaacgacatacacatgatggtgtgcaccaagaggttgatagtgatcacgacccattgctaccggagggtcaagaagcagaaaaggcacctcgggtcagagccaggtactgataagagacgatgctggaaagagctgcagcactcaccacactggtagttccctcaagctgagtgaagcacaggacggcggtagcagagtggtggaagacgtggaggaaagctggctcaaagtacgatagataggtcaaaacccgacggtaattagagcgtattgaatctaaacagataactcaccaagaggcttcttcttgagaaccaaaaagacggtatcgatgagctcatagtacttgaagaagtagttaatgatgtaataggtctcaagtcgctgatgtgggaaagggaagggagtttataaaaggcagctgggtgagctcttatgcgtctctgaactgattgtgatagaaaggtaacggacaggagtgaacgctccggggtggcagatcgagtagtggaagccacttccgccaatcatgggaaggctaaacggcaagaggcagaaaggaatggttcgccgggtcaaccagagaaacctcgtggctgtagacagaaagccagaacgaagagctcaaagcttgacaagtcactcacagttcctccagcatgagggcgaggaggagaccggatccgagggagagaagcaagttgtgtgcctggaagaggaactgcatcttgaaagggggcatcttcctgtggaacggaggaagtgagagagagacgaagcatcgaggagagagagagcaaccgggatagaaaggaatgaagatagaccgggttgagtcgggggagcgaacgaaaggagaggaagaaagagtgaaagaaaaagggttgaaacaacggcagatcagccatcaatgcagacgcgggaaagaaaggagataggcgataagtttgcacatcggcctgaagtcgccctggacgagttcagggaccagcaagaaggtgattctagcaaaaagatgaagaaaaaagacaacgacggaagggcgcggcgatgtgtagtctttgggctcatccccaaggaaaaaaaaacaatacaaaaataaaacaagaaaaaaatagaaaaaaagaacaacattgttttggaaaagacacgaacctcatgagttccctaccggaaaagatgacgataaagtaggtaatcatcgcaagggtgacactcttgacggtagataacggggtggaaccgggagtgtaggtctgccaggactgtgggaggtgcaagctttcaggcacattgttggccaaaagttcgtagagcattacgacgggagagcgagtgaatggaacaaggaaaacgagagagattggaaacgaaggaaatgaactgtgaacggatagacctgaaagagagaggaagaaggaaaggaaaaacgagggagaagcgagccaacgaagagaaaggagaaggagagaaggaaaggtcgaggtcgagggttgaaagagagaagagcgaggagagcagaacaaggggccaacgtgtacgagggagggaccagaagacttaaggtaacaatcagatatctatctattttggggggttttcctcctagctcccttagtgtctgtgccttaaggtctgcatccggacccttggtgttcgtgccctgaagtctgttggacattgtctatgatatatcgcctcaatgggtctgtctctgtatctgtgctcttatcgggtgccctgggctctatggtgtcatttattgtaggcgaacgttctggcgcgcgcgcgcgcgcgcgtatgtgtaggttcctactgtacatgcccttgttgtcaatgtgctcgtatcggatgtctctccctgaggtgttccaggcagcattcggtgatggcctgtatgccctaatattagtgccgtacctgcgctccatcttgttccacagatggtgtatgtgcgcgctacagacactctcgctttctctccatctctctttttttccccttccccttctcctcacccgcctcctctccttcaaagagtgcgccctgttgtctgtgcgtagtgcatgtgaatgtctatacaataccgctcgaggattgccggacgacgcgtcgagcgttgtttacggcgtgtcttgcgccagacacgctctctttgctctgagtccgagtctgagcttacgccggtccttttccatagagatctactcttcctcttcttagcatcactatgaatgaaccagagggtgtgcaatttgattagaccaacagcttgttccttctgatgtaacatcacgctcttcgttgtcggctcttttgaattctcattcttattctttcaataggcattgatgatatgatcggtgagcgggatggatggatggatggatgaatggacaaacgaatataagcgtatagagcgccctcgtaatcgaatcgtaacccaagctggttacatcactcgtttgaccttaccttcctcactgtttctctcttcctctctttcgatctttcgtcgctttccttcaaacaaggtctttcctttctagatctccttcgccttcactcttctcctttctcctctaaggatatccctggagtgttttgacaagatccaatagaagtaatccaaacgagagcttgataagtggccggtagatacacctcccatcggttcatgcactcctggctcagtcgagttttccataaaccgagcacctcgtttagacccttctcttctaccctcgaccggacatccctcctgccatcgattgcaggcactatcaaggtcgccactcccaaaagttacatgcctatagggcacacaaatctttcattcaactctagaacacatctgtcctctctgccaggtttgtgttgtccagacgagcatttcagtgatcatcgttccgagctgacatcaccggtttttttcttccttttctttgcttcttctctttcttttcttgtctctctggcctcttccctcatcttccttcatcttatctctcctcttcccttctttctccgtctccagactcacccgtcaactgtgtaccaaatagacctccccgcttgtcggtcagaccattgacagcctctcacgaacaacttgaccttcaagatcgtctcaaagcccagtccctcaaacttgttcagtctctttctcctgaaaacttcagagtaccttcaactcactgctcgcgtcaagacagatctcttgataattgcctatctagctcatcagtcactcacactagtcgtcaagcccctggatcagtagatttcaacaaccccagagatcatagccaaaatcccggcccggtcaccaccaccacctcctccgtcaacccctcatcctacagatcatccagtgctaaaggccaaaagagtgaacgcaaaagagatttcaaccgagacgtctcttccgaaccgttgatagatcaagagagaagatagtgagtcccttgacgggtcgatactatctctagcaggtccttgattgacactcatcatcccctctcaactgcttccatagctctcgacctcttttactaatccctcagagatcccgttctcctcagcctcgcaaaagatacgcacgtccgtcgtcgcctactgttagtgctcagtctctcagacctcgctccatttctcattccgctaacctttcgactccaacctctccccggttctctatacctcaggccgttcccaacaaagtttcacagcctatccgagcattctccactaccgtatacaaacctgactcttccggtcgcaaaagatcttttgactcaagtaacgcctctatcgaccagacctacgatcacatctacgataacaacagcgcatacgacataccatacagtactcttcgcgacatgcctcctcgatacaacaacaacaacaacaaagctcgatacggcaagcactctgcgccgaaagccaacaagccatcgctcgaagtgctcgaaggtcctctccacacccttgacactgtccaggccctatatcagacccaactgaagtctgcttggttggttgagccaaagggaccgctcagcaattatattctctctagaacaaacagccataaaggtctcgccgccggtggaaacagattcaagaacgtgaagggtatatgcgagggcacgccgatcgtcaggtatccatccatctttgtcttctgcccttcttacatcagtctgttgaccaagtcctcttgggttctagatgctccgtcgttgccgatgaagagctaggcatcatcggtgtcggcgatcatccggtcgcaaaagaggccgaaaagattgcctgtcttagtgcgctcttacagctcgcccaacagggccaggtcagtctctccttcgttccaattgcctttgagggtgtacgcatagatacctaacgcaacctcctttgctaacccggactcgtccttttccgaccttgatatactcatacacccactgcgttctttctcctttgtctctaggtcgatactggctttggcaaatttaacccaaaactttctggaataacactaatgggcaatcaaccccaggaggctactatcatgctctccaacagagagaccatcacccattctagagctcgtcagttcatggacttctattgcaaccgattcggtttcggtaagcccatcatcacttattccgattcggcccctcctggtcaacttggaggagccggcaatcgaaagagccgggtcccacaaaccaattgggacgctgtgatgaccgtaggcggcaggaagattggcatgggtaccggctctagtaagaaagatgcattgacgaaatgctacttggatgtgacccaatacctcgagtcttcggatccgccgttatggatcgagttcaagattaagaacccattcgaagccggcgctagcaataccgcccatgtcatcttttctatctcggacgaccttgaagaggacatccgagatctatcgaagaacattcaggcttccagcttgtacgctaaagcgatggacgcctcaaccgtcgccgctgtggagatacccccgccagtagaagtccgagcggcggcaggaacgccggcatcgttgttagaaacaaagtcgaaacggctgatggctcaattagaggcttaccaagccaaccctcggatcagcaagctccgggaccaacgggcaagcctaccggtatcttcaaagtccgatcatatccttgcaaagattgagtccaactgggtgaccatctgtatggccgccaccgggtcgggtaagacgacgcaaatcccacagattatcctcgatgactatatccgtcggggggacggcgcgagctgtaacgtcgtttgtacccagccccgaaggatcgctgcgatctcagtcgcccaacgagtggccgccgagcgagatcaacgactcggtgagaatgtcggctaccaggttaggtttgacacaaagatgcctcagccgaacggatcgatcacgttctgtaccaccggaatcttcctcaaacgactccagtcggctctcggaaacgaagatccaagttcaaaaagctggctcgacagcgtctcccacatcatcgttgacgaagtccacgaaagagatctcgatgttgacctgctcatggttgttcttaagcaaatcctcaaagaccgtagagatcgaggcctccccctccggatcgtcctcatgtcggccacgatcaatccagcattgtttcaacagtattttacagaaccttccggtcgacccgcaccggtcgcagaggtacccggccgatcgtacccggttgagaaacacttcctagataccttggtccccatgttaagaaacctgcctcagaacagaggtggctgggtgtttggtgacaaggacgttctccggttcttgaatcaagaattggttcctggcgggttcggaccaaacccgccgtcggacgagcttaagacgccacacgcgttggtggccttgatgatttctcatatcgttcagacgaccgaagagggtcacatcgtgagtacatcctgtttggagtttttcttttccttccttcttgaacattctataatgacgtctttgcttgctctttgccgttcttctcttcaatactcagcttgtattcttggatggaatcgacgccatcaaccaagtcaacaaagtcctgattgatacctatcgatacccgctcggtgtaaactttaacaccgaccaaacccctattcatatcctccattcgtctgtccccgtggccgaacagcaaagagtgttcgaaccctccggccctggccaacggcgaatcattctggcaacaaacattgctgagacgtcgatcacaattcctgacgttgtctatgtcgttgataccggccgagtaaaggaaaaacgatacgactcatcgaaacatctgtcttcactcgttagtgcttgggtcggtcagtctaacttgaaccaacgagcaggtcgagcaggtcgtcatcgggagggtgaatactacggagtcttgtcccaggcgagactcagagtactctcagagtacgcaatggtagaaatgaagaggtctgatctaagtaatgttattatgcacatcaaggtgtgtatctctcttttttcgctttctttgccgtttatcttagcttgtcaaccaagataggggattcctgctgttattatcattttcattcctgttgttgttggtctgtctctgaccttacgtttgttttccttcctctcgcccacgacaggctcttaacttcccaaacatggaggtggaggaagtcttggcggacgcaatcgagccaccaacagcgactgctgtagaaaatgcaattgttcgactcaaacaagttggagcgttgacagactcgaagcagctcacctcgctcggccgggttctccaagagttacctgtcgaagttcagatcggaaaactcgtcctctacggagcgttctaccgatgtctagactctgcgcttaccttggccgctgtgatttctgatcgagatccgttcttggccccgatggacaagatgaccgaggcgaacgagatcaaggatagttggtcccctcctggattcagatctgatctcttagcggtggtgagcgcgtacaactattggttccaaatgcatgcctccggtcggttcagagaagcctctgctttcctccaagcaaactttttgaaccgaacaaacttcttaaacatccaaaaggtcaaggaacaaatctggtttgccctggtagacactggagtgatcgcgatctgtgcaggtggaatgactttgccaaggcatggcggtcgaagtttgacggccatgccggcggtgctgaactcgaattccgagagtctaccattattggcggcgttgattgcgacctcatccgctccgaactttgccatccgagtcgatcagaaacagtaccgaacctcccaggacaaggttggtttcctcccctttctgtttatgcctccttctattctcatgacttactcgacgcatggcttctctcattctctttcggcgatctcgcgctttcttctctaatagaaatgtcatatccatacgagcagtgtgaatcaacatcgaagagagaacccacatggagagtctccggcgattatcggtgaaaaggcaatcctagcgtttgttgaaaagacatcgatcggaccggtcaaccagaatgcgccttcctccctccgaacgacgaccaggctggatcccatgacatacatgctcttcggtgcttaccatctcaaagtaacagcccaagggttgatctgtgatgattggttgccgatccaagggcaatctagtctggattcgttggatgaagtgcaacggttgaaggatctactcgagacgtgtatgcttagagtgtttgagggtgttggtcaaggactcgttaaagggcgaagcgaacggtcccatcgaagagacgcccctcataacagaaccgccaccaacaccgccgccactccttctcaaaacaacaaagataacaacggtaacaatggtgacgagaacgatgatgaagactcagatgacgaaggcgagcatgaagtcgagaccgaacgggacgaccgaaagtctgatgatcgttcactctcacaaaccgaaatcatcgaactagacaacttaacctcggatgtcgtcgccattctcgatcgatacgcacaggaaagaggagcgggtgtctctagagcgagcaccagaccctcgacccctgctctgatgatgccttcgatgtcgatcagacagcaggagggtcctgccggtgtgccaccgccagcttcgtacgcagcttacgagaacgcgccgtatcgacctccgtcgatg

SEQ ID NO: 680 - DNA, 4739 bp, Xanthophyllomyces dendrorhous
ctaccggacctagaggcggtgctggccctatcaaaagatgataggaggaactaccagaagaagaagaaaaagaagataacagttgaatttcttaacaaggagagtcgcttgttatcttcccttgggcttccatattctttccgttgcatgtttatttattccccccgtgttgttctttccttgttcttctctttttactattttaatttaaatctctaagaagaaatttgtgtattcaacggttcttacttgcatgaatgaatttcttttgctcattcgattggagttcgaataagaaagtcaacgaggagtatgtttcatcgactttctacatgaattaagaaaaacgaagaaagaaaggtatgtagaagtaatgtagatataagtataagtagatgtgtgtatcctaatatacatggagcaacgaatccagatcaccaaacaacacaggatcacagtttttcacttgaaccaagaactgcaacaggtgttcttctccgatcaaccaactagaaggatccgaacttgccgactcgagttctccttcatcgttcaagccgatcgaacgatcgaacgagccggataccccgaaggttaatgtcggccttgagctacccccacgttcactcaacagaccgatcgtctcgcctagtcggccggctacgaaaccgaatgggttctgggcaagatcagccgagacagaaatcaaccgatggaagaacctcaataccacagcattacagcctatctttcttctcatctctgttctcaagctcgcagaggctaaaaagacaagactatagagtgaatgacaggactgagcgacgatctggaaccaacccgggtgggtaccgaaccgatgaaattcttcgacagacatcggtagatgttgaaccaaagattcgtacaaccggagtaacttcccacctggaagccctcccaacacagttcggttgtggtcctggtaggccacttgggtaaaagcatcgatggcggtattgagcagttggggaaactgttcatgttgttgttgctgagcctggtagtccccggcttggttcgatcgatcgaacacaaacggaaggctgtcggtcgagttgtagataaacgaagtgatgagatccagccaacgatcaatgaacgttggcggtaatccggccaagctaactctgatcccaatcccgatattcgcgtagatctcgagtacctgtttccgaactttaatcatgtcgaaaacagtgaaaactggttcggggcatgaaggatcatcttcggcaggagaaaggaacccagtggaaggatcgaacgaaagaccggctagtcgagggtcacaaatgtaaacaagtacgcgaagtaaccgggcgaaagtcaccatcgggtggaggttctccttttgactggacaaatcaccgagaatccccaggatagccaatgcgatctgcgctcttcgagcgatcgaaaaggttgatattaatgacgacgaagaggaggaggtggatgtcgaagaagaggaggaggaagctctggtgggaccactcagcgtttccctcgcttgaaagaccaagagtgaatgacaaagtgttaattcccaagctgtcccatccgtctgtttctgttccttttccttttctttcaaagggtctctgtccaaaaactcttgggcttcgtccagaccaccttccccaaacacgacttcctccaacagatcggcaagctcctcgaacaactctgagcagtacatgatcgggagcatcccttcgaacctctgctccgcctctaccggcgctggttgagcggccaacatttgcacggccgtcagcgcgtacgaaacttcggaggcaagtctcgaccgaagtgacatggtgagaccctcgatgtcgatctttcctaattcggctaacgggcgagtctgtcgagtggctatgattgatgctcgttcccgctcgagagcgtcaatgtcccacccaccgtacgtttgagattcccgacaaagaggcatataggataccttggctcgcactctagggggaagcgtaggcacgacaacaggtgcaggtgcaggtgccggagccttcacaggagcgctcgtcggaagagaaggcggtggcggcgttggctgtggtaaggattggtgaggagatgatgctgtcgggaacggcgatggggtgtcctgaagaaaagaggagggaagaaaagaaaggataggacaagaatgtcagatgggcgaaactctcaatgaggatatagatgttgaatgaagaccgacttgaaccgatgcattagctttggccagcatttcgtgagcttgacaagaaataatatgttccccaaggggtaaactcataattaatccaacatacccgcaagtctcgctatgaaattagagattaagagaggaactaacctttacgtttcttgcttgaacctgtctctttttctccactcgtctgcgctctctcgtctcctttcgagctcggctcttgcctctgccctggtccatgcggtgtagataaaccaggaagcgcagtcggagcagacactggagtctgatatgctcctggcgtgagcgcccgactagacaaacctgaaggaggaggctgcatcgaaccgatcgccactgatgatactgctggtatcggcgtcactgctgttgcaactgttgaatcgacgttggttccagtcggacctattgtaggcacagatggaccggcggataacataggaggctgtgaaggtatggatgatggctggatctgggttgagatttgcacagacccaggtggaggtaacacccctctagaaattccatcagatgggttccctccttgtttcggtatgctgaccaagtttgaggcgagagttgagggctgggacgagtcggaaggcgttgccgttctgtttgaagggatgtttccttccgaatgagggtttctgtcggagctgggttggccattctcattctgctgctctgatggacaaggtccagaactttgtccgccaattccaccgttgatatcgctagcaccaccagtaccagccatgtttggaggagaggacgcgagaacgtgcatatgttgctgctgctgttgtttctgctgaagctgaagctgctgttgttgtagctgttgtcgttgctgtagttgttgaatctgctgctgaaaagattgctgggatgtggaggagtttgaagattgttgcatgatctgttgagcgagctgttgttgctgtagcaactgttgctgttgcagttgttgcagttgttgttgctgctgcgattgttgttgttgctgtagctgcaattgttgtggttgctggggttgctggggtggttgctggggttgctggggttgctgttgctgtggttgctgctgtagtgaaggcggctgttgctgttgctgctgttgctgctgctgctgctgctgaagtttgtttgcgatctgcctagccctgaagtcctctagaggatagcagatgcttgaataagcggccacgatgacttcgagcgcgttcgttgtaggtggtcgatttgcgaactgtggttcatgtgccaacattacgaacggcgttggttcgggtagtgtcggcggaagatggaggagagtgagaatcttcacgaaatggggatgtttcagagcctatgtgtaagagaagagggaacaggttattggatgtttgagattcctacagctcaagggcggacagaagagtgtatgctcttcgaaaaaatctggtatgtgattacttacctcttttagccctcccatctgggctattccggcccaaagtttccagacttcgattcggcgtccaccccctgatccaccatcgctacctacgccttttccaattccaaatgtgcccaataatccgccttcgacgccctccccatgtgtgaaccatctgggaagcggagtacctcgtctgatcatgaactcagtaatcatcttgagaaaatgagctgcctgagcttgtttggcttggagttgctgttgagtcacctggctaagttgaggaggctgctgtgcagactgagattggggttgaagcttctgaggcaattgagattggctttgttgttgctgctgttgaggattttgaggttgggatgatggtcggttcatcggagggttgctcaatggggtcgacatcggattctggtttgttggttgcgaagcaagctgttggttgacggcgtgaggggtcggactcgacgccagcagtggtggcggcggtggcggtggctgggaagaaggttgttgagacggctgaaagggagaaacaggcgcggcggaaggaggtctaggttgtctgaacgcctgagactgcgattgagattgagttgagtgaaactgctgaaggttgacaccggtcaggcctgctcctcctgctgttgtcgaccctccaccgccacctccggaaggctcggtcatgtgagaggatgtcgaggccgaggaaagtggtctgggcggttgattgagcgaagctgagctagctggtggaggaaacgcgttggattgcatcattggactaaatcgggcagccattgcttctcgaggcgattcggttgctgtcggtgggttgccgctaaatggggacgagtggtgactggcgttaactggactgctagctgtagccatattggatcgttgacgagctcgccattcttgtagagcttgcatctggagatatcgccaagagagataagattaagaaggatgcagcgaaaaaaaaaaaaaaaa

SEQ ID NO: 681 - DNA, 6657 bp, Xanthophyllomyces dendrorhous
gtctaccattcccctccccatggcagctaaccaggacccattggcttcgacccttaaacctaagggcttcatggatcagcccttgacttttggaagtggagagctcctcaagtaccaggtgtacgacagtttggaggatgaagatgaggctaacgagagcccagatgccggtcaccacggaggaaagtacatcattcgagtcggatgggatgatgttcgaggatggttgggcgaggtatgcctctgttcttagtctctttatacatctgcccagccgtgctaaacatcttcatatactccatactttccttctatacagggaggaacccttattggaacagcccgttcggcagcttgtaagttccatcagatactctcgttcatcacattgttcttcgcgttgacccaatcacacacctcgttaatcatctcaatctcatctgaactccagtccgaacccctgagggtcgacagcttgctgcccttcacttgattgaacagggaatcgactgtcttgtcgtttgtggaggagatggatccctcactggagccgatttccttcgaaaggaatggaccggaatcgtcaagattcttttggagcagggtttgtctacctgaatttttatagcatcaaagagcatcggctgacagtgtgtttgtttgataggtaaaatctctgaggtccaagccaagactcacaaccacctcaacatcgtcggtctcgtcggatccatcgagtgagtttgatccgttgttttgttagctacagctgtctgcttgattcgactgacgatgcctacttaatgattctgtagtaatgatatggcgatgactgatttgaccatcggaggtctcaccgctcttcaccgaatttgcgaggccatcgattctatctcgtccactgcttcttcccattcccgagctttcgtcgtcgaggttatgggtcgacattgtggatggcttgcgcttttggccggagtgtcgaccggtgcggattacatcttgatcccggagaagcctcctgcgagtgatgactgggagtctgagatgtgtcacgtccttcagggacaccgatcgcttggcaagagaaagtccatcgtgattgtagccgagggagcgctcgaccgaaacctccagcccatcaaggcagcccacatcaaggacgtccttaccgaccgacttggtttggacactagggtcaccactctcggtcatacccagcgaggaggagtgccctgtgcattcgaccgaatcttggccacccttcagggagttgaggccgtcaacgctgtgttggaggccaacccggagactccatcatacgtgattggtatcgttcagaacaagattgtcaggaatcccttggagaaggctgtccaattggtgggtattccttgttgctttctctttctttttccgaaacacttatagtttcgacacaggctaagcgtaacgttttattcaaatcatttgaatacagactcaagccgttgctgaggctatcgagaaccgagatttcgacaaggctatgtctttgcgagacgccgagttcggagacaccctcgaggctttcattgccagtgctacctctacccacgatcactctttccgattgcccaaatccgagcgaatgcgagtcggtatcgtccagtgagtggcctattttattacgtaaatgcaggtgttggacatattaatattctaaatgctgacattgggattctgtttttttttttccttttccgaaaactagcgtgggagctcctgccggtggtatgaacgccgctactcgacaggccgtccgatactgtctctctcggggccacacccctgtggcgatctacaacggattcgccggtttgctcgacggaaacgtatctgagcttgactggctccgagtggacggatgggcaacccggggaggttcagagctcggaacgaaccgaaccttgcccgatgttgacctcggtcacgtcgctacggccttccagcagtacgagtttgattcgctcatgctcatcggtggtttcgaggccttcaatgcgcttcacattctcgagcaggcccgaaagtcttacccgtcgttccacatcccgatggtccacttgccggcgacgatctcgaacaatgtgccgttgaccgagttctcgctcggaagtgacacctcattgaatgcgttggtcgaggcttgtgatgctatcaagcagagtgcatccgcgagtaggaaccgagtgttcgtggtcgagaccgctggtggaaactgtggctacatcgcagcgatgggagctttggctgtcggagctctctgcgtgtacactcctgaggtcggagtttcgctcgatctcctccgaaccgacgttcggttcctcaggaagcgatacgagcttgacaccaagggaaagagtgaaggtcgactgatcatccgaaacgagaagtcttcgtcggtctataacaccgagctcatcaccgatatcctcaaggaggaaggaggcgctctgttcgacgcccggtctgcctcgctcggacacacccttcagggtggaatcccttcgcctttggaccgagcgcgagccgtccgattgtcgacccgatgtatccagttcctcgagaagcaccacttggctaggaaaacaaagactgggctccacaaggctcgacatgacgagccttcgccagagtacgttaatgagtctgcggctgtgatcacgattcagggctcaaagatcatctttgccccggtggaggatgtgttgaaggagacggacatgaagaagcgacgaggaaagcacccgtggtgggcggacatccgggctcttgtcgagcttatgggtggtcgaaagggtatggccgagggttaccatcacgacgagttgaacctttaaagaagattacaaaaacaaagcataataaagaaacaaagaaaaagagtaaaggaggtggagtttatagtgtctcgtgtgttttccaccatgttttctttccttctctccccctcttctttttctttctcttctcctaatcacctccttttctcattctcttaaccggtctacttttaaatgtatcttgtagcgattttcttttccatattagagtttgttatttcccaagggattgcctgagtgatggtgaaagcattgccatagagagacacaaaacaagggaaaagggacattgtttcgacgaaagatatagagatagacagataatacaactatttgacttgagcacaatctccactgtcgaggaccgagccaggaagtgaaatcgagttagatccgaggtgttgattcgaaaagaataagatgagaagagacccagatcagaagaaaagacgattaggagaatccggtcacacgattgttgacacaacagaatacctccgggcgataaagagcgagagatttttagccctgacggaaagagaaaagaagcgataagcatgaattccatcctcactgtggagactccagtagatacactgtgtcctcacagcggtacaccggcacgtctggggcatctgggggcatctaaggtcggcgatctagaattcgaaaaggtagagttttcatgaatcaaattcggatagcggtccgtgggcgtgcgcagcgatcaggcaccttggcagaggcacaggtgagggggacaggggcggttgaaatttcaggcggttagtgcgcaaatcgcgctgggcacagaccgcttatggtcggtcactcaccgtgcctggctggtgcctgtgtatctgtgcggattgactcgatgagacaccatccacacgatacttaaagaacacgctgtgtttctgtttctccttcgttctttccctccatcctattcccccatccacacgtacctttctcgttccttctctctcccgtactcttttcttttccttctcttgtccactccgctccctcccgttctatcatgaagtcctctacctctgctcccgcgttcgctcacaaccctgctcttttggctccgtatctgactctcgaccagggaggaaagattcaggcagaggtgagaatgtccttcaacattgccttcgtgtactgcctctctctctttcgctcgctctcagactcacgcctttcttccttatgtttttcgcacttgtagtacatttggatcgatggtgatggtgtacgtcccgttatctctctgggtcgtttgacaatagaggggctccctcgcgctagaattaatttcccgaagacgtcaagctcacttcttattggctcgtttcggtctctgtatccgtgctcgtgcttttcgaatcttttcagggccttcgatgcaagaccgtacgttttctctctcttgcctttactcgttcgcgcaagatcgtacctctaacactatgttcttcctccttgcctgaccgttctttctaggctactgtcgataagccagtcaaggatgttgccgagctcaaaggtatgggcgtttgattgccttcacttttcctttgctctttccccaaacattttccgagtgttgttcccggcaaccaacccataatccttcaccttctccgatgttcgattctgtttttcccatctagaatggaacttgtaagttgttcagcccgatctctgtcttcctcgatttaaagaaatccttatctcaattcgattgtcttatcttttctccctctcttagtgacggatcttccactggacaggctcctggacatgactcggatgtaagtcttacactttgcttctcgtttgcttgattatgtattgacccccaccttggatttctcttctatttcaggtttatcgtaagcttccaacttgaaaggtccgaactgtcaacgatagattcatcgtattaacatatcgtctatgccgcacgatcttgcagtccgacccgtcgccatcttcaaggatcctttccgacgaggtgataacattttggttctgtacgtattcttccttgttgtttttcaatgttgtctgccgctcatccggccctgtttccgatcgttcagctgtgagacctacaacgccgacggtactcccaacagtgagtgcatcgatcacctatcattcagcttagtgtaattactgatctctcaatctaccttatcgtcttgtagagatgaaccaccgattccacgccgccaaggccatgaaggccgccgctgaggttcgcaatactttccttcacgctattgctcctttcaccaatctgatgtccttttgtgtcgaatatagcacgagccttggttcggacttgagcaggaatactccctcctcgatgctgatggctggccccttcactggcccaagggcggtttccctggtccccagggtccctactactgtggagtcggaaccggaaaggtctttgcccgagatttgatcgaggcccactatgttcgttacacctggcaaacttcttttattctctaaccactgttatactaatcgaactcctttcttacatcaaatctagcgtgcttgcttgtacgctggtgtgaccatcgctggtatcaactctgaggtcatggcctctcagtgggagttccaggttggaccctgcactggtatcaacatgggtgatgagttgacgatcgctgttcgtacctgatttctctattcctaccttctttacatcaaatccttgtttggatgtacatgcttaccatcattgtgtatactatctcgtttatcagcgattcctcttgcaccgagttgctgaggagtggggaatcaaggtgaccttccaccctaagatctgcaaggatggagactggaacggagctggttgccacaccaactactcgaccaaggagatgcgagcccccggaggaatgaagttcattgacgctgccattggcagactcgccgagaagcacttggagcacattgccgtatacggtgagggcaacgaggatcgactctctggaaagcacgagaccggtcacattggtgacttcacctccggcgtcgccaaccgaggagcttccattcgaattccccgacatgttgccgcccagggctacggttacttggaggacaggcgacctgcttccaacattgacccttatcaggtcactggtatcatggtcgagactactcttctctaaatcaaagtggtttttctcttttctcgcatcctttagcatcgtgtcgggtttcttgtcgtttcgtttctcttgtcgtcttctctttcgcatccctcgttcttgtcgtgcgtggccgttcttcccccctcgtctcttcacacgaacgacgttcgggtaatttgttccttctccttcgatcagttttcttttgagttgtattgtttcagttttcttcacatacatcgaccctagtcgactttcatatctatcaactttctttttctctttcgggccatcggcttcgtttgccttcgtctgtcttttcttaatatacttctcttacacaatggacacaatacgcatgtcttcatcaccaacagcgccgatgataagtggtggaagcacagacacacattgttgaaaattgatgccagtcttggaccaggttgagctcagattcagaacaggttgatccaatgagcacgccgccatttctcttttttctctgtctgccgcccgtttacatcaactcgttcattcatcctctcatcctcctctctcaatctctccatgtt

SEQ ID NO: 682 - DNA, 727 bp, Xanthophyllomyces dendrorhous
gtgggtgcctgttggttcgttgtgtatcagaagcttatctgctgggcctgtctttcttgctttcatccgatctctatgtgacacaggcgttcaaggggttcaccaagaacaagcctgctgtggtctctgtggctcgactaagccagatggcctttgctgtaagatccttgtctacatctcatcttgactgtgtatccgttgatcactcttctgacaagagccctttcggatccttatctgtttatctggaaatcgtatctaggatgagctcggtttcaactaaattagattcgtttgcaagccgggaagaggatgtctggagacgtacagagcgcacgaaggccattgttttcaccccgtgtgatttccgttgatattcgagggagagggagcagtcgggaggggactgaataaaaccatgaatcgttctttccttttctttctttttgattcttcttgacttgtttccacctccttgggtccaagagagctttcgtttctgttttttgttgtctctttcttttctctcctctctttttgtttttttcacccacctcttattgttcttctgcttagtcgttctttctctcttaatatctgaacttgatcttgatctttgatgtcttccctttccaacggtcacaatggcaacggcaaggaaaagagacaagagacaaggagacgaaagaaagaaaaatctaatagcacgcgtggatgagatgggggt

SEQ ID NO: 683 - DNA, 197093 bp, Xanthophyllomyces dendrorhous
  misc_feature (116212)..(116221): n is a, c, g, or t
gctgctttccacttttttggattcggtcggtcgacgagatggcagcttttttctttctgggttgttcctgtgatggtcgtgtgatacagtattttgttagttcattcaaattgtcaattcagtgcagttgagcaccttcgagattcggacgtaactgatttctcaagatgctgtagtctgaaaagcaatattgatctgaaatgttgtagcccaaaaagaaattgatcttgaagattcccttagaagagagataaagaacaagaaatagagtttatgtatgtatgcgtatgctatgtagaaagatcaagtctacccaggcaagaaaaaagatatatagaaagaagagcaagaagcaagcaaccaacaggcgaactgagatgactgtacagaaagaagggtcgactacatcttccagactttgttgtccgagagatcctccaacgatttggcatcgacctcacccttttcatttcgtctggcgagaagttgatcccaccagccaaacaggaagtctcgggcaatcaatttgaaccaaggggtaaatgagttagactcgtcctcaaacatcgcctggagctcgggcttggtgacatatcgagtgtcagagacttcgttagggtttccagtgtgttctgtaggtgtggttgagaagagaatgtagtcgactacagattcccagagagttccaaaggagcatgcgcgacaaaagcatatattttagtcgggccaaccgagagaaactatttattatcatcgtaaaagaaaaagaaggcccacttactctcgtgttctccccagagtccgtcactcggagcgaggtaatgtatcctagtgaggtaggtgaacgagtcgggcggagtcgacgatgtaggcacgccaagctcgtgctccaactttcgggacgcagctcgtcgaacaccttaccgattaagattggacataccaccaggtaagaggaaggataagaggagaaaatgaaggaaagaaaaggccatatagtgtaagcaggatatatgcacccaatctgtcttgataccaggaaagtctgggacaaaccgatctggttctcctcttcaacctcgcccttgatgctcaaaggatgactgcaacacgtgttggtccacattccagggaacgtaatcttctcgtccgctcttcgctgaagcaggagtgctccgtccgatgggcggaagagaaacacggagaatgctcggtggaggaggtccttgggcgcgttgatgttggacatcaagtggcctggttacatagcacggatatgttccagacgtatatgtatgtacatcgaaacgacgcagaaggaatcaaagccaattagtggattggctcaggttgttcacggtgtccggtaccatagaagtgaaactgggttcggagaaagggcgacagcacgtacaggtctttttcgaagcctctccataggccacatcgtccgggttaacaagaatacatcgctcctccatcagcctgaccctatgtggggtgaagagtgagaggagcattggttcagcaagcatgatcaaagtaagacctagcacccgacagtcggatttgtagccgaagcatcttgtctcatagaacagctatagaagaaatacgtactgctcctcatcgtactcttctaaactgagtccttcggttcggacctcggcggggggaacaatgttgggcatggacatctagaatatatttcttctgccttctttcttttcggttgactcagaacttgttctggaaggaggaaagtgatatatgcgagatgtggggtatgagtaaacgagtcttcaacggcctgccgaagaggtcgaggaaagagaagcaggtaaagggagaaggagtacagagggaaagagaaagaaagaaaaagcgaaaaacactggcggtcgtgtttaccgacgacgagagaaaagaatgggacgatcgaccaaaagatactacaaatgcgcagtcgactgaatacaaatgtgagtactcaatcctgtagtcgattcgcctgtcacgtatgactacaaaacagtgtatatgccaaactacgaatcgcttggaattaataaactgaatacggaaatatatcggcacaaatgactacaaaagaatacaaatatactacagactgtcagaaaagatgaccatctcttcccatacttttttacgccatctctcctctttcgcagctcggcttctttgactctcctcttcattgttcgtcccttcagtcacctacacctcgtcttctttcttctcttctcatcccaaccacctttcaatcatcgttcagttcgtctttcgccatgtcttggaaactgggaaaaagtatgtgttgtgctcttctgttttcgaaccgttctctcacatctctccctccgttgggtttctctgtcaattcggcctctgtttcagtttgttttcttgtcaacccccccgggacgatcttgactgacgattctaattccaacatgtctccttcattcttcacttccatatagagctcaaagaagtcaatccactgttctcgtcctcctctcggtcaaactcaaccgtgccctcgccggctgacatctctagatccaccacgcctacccctggaaacccacaagggcaccccaaagaggccgtgcccgttggtagcaatggtggagacacgaagccagtcgccaagactggattgctcaagatcactgttaacgccgccaagtcgttgagcttgcctagtggaggtacgtcctctcaataccttccatcagggtttagctctggtcaagagagaagagcgaacaagaacgtgccctgagcagaggcttccctggctttacagccaactatgctgacacagtcatctcttctattcatctgattctcttgacacagtcgatcttcctcctccgatattatctgccctgaagtcacacccttcctcagtgtcatcctcgtttggatctcttccgaaaaagtccaatagggactctgtccagagaaagcagtgctggtggctgccctatgtcgtgttagagttcgataagaatgaagtattgattgaggcgcttggaggagagtggaacggacccgtttggagatacaccgcaacattgtgagtatcttttctggaatcgacgatctgaatcattggatgactgaatcacgtatcgatctcgcttagcgatgtatcccgagcatcagagatctctatccagacctacctccgatcaagcccgccttcgtcatcggacgaatctggaatgggtaactcagatatcttcctaggcggtgtcaagtttatgcccgattttaccgttcgtttctgctctgtccaatgttttgtctatctccgcttgtcaatttaactcttttttctttttgtgataacactcacaggataagccccatagcgacgaatggcacgccgtcacgggtggaaccggtgatattaacattcaggtcggcttcaagccacagacgaataacgactcgctcacgatcgactcgttcgaactgctcaaagtgatcggtaagggttcatttggaaaggtgatgcaggtccgtaaacgagacacccttcgaatctacgctctcaaaacgatccgaaaggcgcacatcgtgtcccggtcggaagtcatccacacgctcgccgagcgaacggttcttgctcaggtgaacaacccgttcatcgtgcccctcaagttttcattccaatcgaccgaaaagctctacatcgtcctcgcctttgtcaatggaggagagttgttccaccatctgcagagagaaggaaagtttaacgaggttcgaagtcgattctatgcggccgagttgttgatcgcgctcgagcatcttcacgggtttaatgtggtctatcggtacgttagaatcccctcttgtttcctcatgtcatgtcatgtcatgacgttcgctcgctaatctgttcgagtcgcgttcctgtgagaaatttacagggatcttaaacccgagaacatcttgcttgattacacaggccatattgctttgtgcgatttcgggctttgcaagctcaatatgactgaatctgagaccacaaacagtgcgtctttctcataaaccttctcaatcgcttcctcagcagacttctaattcggggtttctaccacatgcgctgattttgaaccaacagccttctgcggaacaccagagtacttagctccggagctgttgtccggacacgggtacaccaaatcagttgactggtggacgttaggtgtgcttctctacgagatggttcgtctttctagcatcttcttcgtcagctcttggatggaacagctgttgaattcgactcaatgttatcttgccgatctccatcatcaccacaacccaatagctcacgggtcttcctccgttctacgatgagaacacgaacgagatgtatcgcaagatccttcaggagcctcttcggttcccggaagaagttcattccgaggctcggtcgctccttgttggcctgttaaaccgagacccagctcatcgactaggatgcaatggggctcaggacatcaagaaccatccattctttgccaggcacatcgactggaagaaacttgtggaaaagaaaatccaaccgcctttcaaacccgctgtggtaagtcgttttacagttccgtcattttgcagagtaattcgatcggttgccaactcgtttctttttatcctccacccctgcttgtgtccacctcttctttatcatccgttcgacaaacgaacaaacaggccagcgcaatcgacacatctaactttgacgaggagtttacctcggaacttccaatggactctgttgtagacgactcgcatctatcagagaccgttcaggctcagttccacggattcagttggtcggcctcgaatttcgataaccacaactgagaaaccgaggacgaaagctgaacctctcaggggcaggatagatccggggggtctagttttctagtcaacttcctcgattcacttttcttagcttggctctttgattcgagtacgtctctgttctctctcttgtgtgtgcaaaacaaggcaaatatcaaagtcctgactgagcgctctattatattgactgtactagaactcttgcataaatcctctactctctcgccttctcttcattatccatccctctagattcgctcatttctcttaaacggagaaaggaaatgaaattaaaagtaaaaacgaaaacacaggctctcttatggtctaaactattcgactctttgccctgatttttctttctcctatacaaccaaacctcccttctttgtcgtttctttctgttttcccctcttcgcgtcacggtgtactgcgatcattttcttcttcttttcgttcctctctctttcttactgaatgtatcatcatattcctttcatcccttcctcatcaccctccttcttagcctcagccacatccgcgttcttgacgtctcgcacgtgtcctttgttctacattctatatcttttccttctctcctttctcagctgttgttctcttgtggttcatctctatggtccttgttctttcccatcccctccgcccttcattcaaagatcccgtggcctgcttctctctttgttatcattgctgctgttgctgctgctttttttcccgtcttctccggatctagacttctaaatcctttccgtttctctttcaaccgatttccaacccaatcctcctctttttttattccttctcttaaacaaacatatcctgttcatgccttccttctctgggtttacaaatcccgtcgtgtgtttctgttgcagagatcgacttgtaagaagatcttgagaaaaccagtgtcatcaatgggaaaaaaacagaatagagggagcgaaattctccgcctgagagaaccaaagttgtgagagcacgtccagaagatagggaggtgaatgaagaacgagtatatatatccaagtctactaggccaggaagaaataagggggaactggtgtgagatattcaagagggaaggaaaagaaaggttggaggagaaaggaacgaatggaaagtgagagaaaagctagggaatacattggttgtggtttataagggaatggatgaggaaaaaaggtattaaagaaggaaataaatcgaaaagtgaatattaagaggggtcgtgatgcggaaggaagaacaaagaggaaagaaacaaatgtagaactgggattttgaatcgtgaataaatttgagatagtaagaagcatggagaatgataatctggaaacagcccaaagacgaagagaccaagaaacattgagggaagaataagaaggacacatggaggcggtgtcaagttttgaaacaaggagatatttagatgcgattgtctatccgaaacgaaagagacaggggagggcaaaagagaaaagaaaaggtaggaagagtgataaacaagaacgcaaggaagggagaaaaacgaagaaaaatagacaaaggaacaaaaggcctaagctctcagaacgttccatcaacataagcagtctcaattggacgcaatggacgaatcaagtacgagagcttaggcctgcttcctaatctacttctttgtctgcatccccgtcttcggttcatcttcatcatcccgaccatcctcgtcttctatccttggcaccccttccacagtcgaatcgtagaccgctcatcgcccataacgtctcctccgtctatatactcgataacatccagcagttatcctacctagaaaagcccctcgtctccctcctcgacgttggggtcaagatgatgcgccacgaataaaggaagaaggtttccgaaagaatatgaatgaggaaacggaaccatggggagggaaacaagaatatcttcaaggtatgataaagaggataaaaatcccgagtcttgatctaagatcttcgatgatcaaaataaatttagaaataagaatggataaacaaacattgttggttaatccaagccgaaaagatgacgaagcttacctgatttctcatcctgaaagaaaaataatacgagcaaaacaaaaatatgccaacaccaccgttctaaacccattgacagacgcttttcaacacggaccaatctatgtcttcgcctaacaagccgcagccgtcctgcctgctccgaagccgatcgtgccaaatgagggattcatctcgtccctcttgactaaccaagcggtgcccgaactcgagcccgagcccgagctcggcccagaaggagtcatcgagggtgaggtgggaccagtcgagtccgaagcaatccgttgccattccgggagcgtaagcaacgggtttgagtgcgtcctgcccaaccgaggctgcgggctcttggatgccggtctgctccatgggccactggacggtccggccaagggtgtcacttggccgatagctaatagagactgagggacaagatgataccgggcggacggacgaacaatctctagcttggtgttggtggacaggccagaaggaaccttgctcgttgcagggggcagcatagcttgtcctccttcgtttggcagaccggggatgaccgtgccctggagaactttggccaggaaccgggatcctctgcctaggccggatcgatgagctgacgttcgaagtcgactcatgttcaactccttggtcgatccactggaagaacttttggatcgaaccatcgggctcgcaggccggtggggctgttgtactggttgggatgccggagatccgggagtactgatgttcagcgtgatggatgggagtcgcttgagtgacggcgggagtcgacgagtggagaatgagttgagcgtcgtgatcgatgatctcggtggaggcaggatcaaaggagacgggggcattgaaggcgaggaagtcgggcaagacggcgaggtcgtcatcgatgggggaagggagattggggagattggcgaaccaggtctcaaacaaggtgttgtcttggcagaccttgtcttggtcgtcggcccagagagggaagacggcagggcaagaggagtgacaacttgggaggacggaagggaagaaggaacaatcgattcgagtgtggaaacccgctgctgggaatgccaccgtgctgatggcgtgtttccgatcgatgattgttcttccattgacgaccctccggtttccatccccttgcctaatcgtccgggcagagagtgtgtgacagtagaccgcgttcgaccggccagacaggtatccaatcctagagcagacgaaggaagcgaagccggagtactgatcgtagccgttgtcgaagaagatgggcaagcaaagtcgtctgaggcaaaggacataggtgagagatcaagaaagtcattatcgtcgaccgaagagaaggaatctcgctgacgagagagtgaagtagaaacagagaccgatgcattctgagaggacgttgaactgataggttcgatgatgggcgttccttgtgatggcggaaggtttaggaacgaggcgtaatcaggagaaagaggcctggtcggatcgagggcctctgaggacagagtcgggaagagagcgaaagcctgagaaggcgatgctgatggagagagcgacaggaacgatcgggaccgattgtccggagaaccacctggagaggacatggtcgccaatggaaaagaggagtcgaaaggggacgacggaggggagaatgaaaagtctgaaagggcaggagcagctgatgctggcggttgagaaacttgatcattgacgagctcctcctccttggaggtcaaagacacggagaaatcggcagctgaagtgccctgatcccggacaagctcaggtccgtcccaggaaaagtccaagatagggaattgatccttgtccttgttggacttgtcaacggcggaaacaggtccggcggcgggaggattccattgaagagctgaagcctgaactcctcctctctccaaaaatccgacgaggcccctgatgagaccctcgagtttgactactctagttcgaagctcaagattatcgttttcaagttcttgccgaagaagaagagagtcaggtgtaggcctagaggtagtagtgctgactgaagtaacgaccagtggggaggccgactcggaagaaagactagaagaagtcgatggctgaggggcggatttgacaggaacagaagatcccggaagggacgacgcagccaaaagggcttcgagttcttgaacccgctcttccaaagcagactgatggtttttcttggcgtcccgacttcgttgggctgaggctcgattacctgagtgatttttgacaaagagaagaaaggaaagactgatgagaaatatgcacttgagatgcttggatgacagcgatatggtcaaaagaaaggagactagatacttacgaagcactctagctcttcgtctcgattcgctcctgtaggtagaagaaaatcgagaagggacgacaatgcatcatatcagcatgccatttcgtcaacatacgcatgcccacacgactaggggacgatagaaacagctgaggtagaagaaaaaagacgacagaaggaagaaagagaaaaaataacaacttacacgctgatgccgggctcattgacttcaccaggtcctgttcccgatccgatcctttctccaggcccaccacctgccctaccagagccaatggtaagctcatcatcgtctcctccatagtcgctacccccgttcaaggaggaaggactgggtgaggactgtttgcgcttcttgtgtccgttagcgatagactcggtgtctacagaactgacagtcgaggcagaggcggatgcgacaggaacagaaggtacaatcgctgtcggattagaggctgaaggcacggtcgaaggagtagtgtgctttgtgggagcgaaagcagcagtgtttatgtgaacagacttgggaacggactgaacgactgttgacattcagtgtgtatgtgcgtgtgtgtgtacttgtgcttgtgtttgtgtgtatgagtatgtatgagtatgtatgagtatgtatatgttcgagggtgttggtctgtagatggtaggaacaagacaaacaaggaaaggacgcaggatggggaagagaaaagagactggaaacctcgatggggagaatgaaaaggataaatgacagcagaggccgatcgagggtcgtccgcttaatcaacactctcggcctgctctcactacgttgagtgtttacgacaatggttacagaatttactacttccagcgtggaagtctttgtggctgtgatgtgatttgatttaaaaaacgttctggtactttctatattcttttcatctcttacttgcatttggttgcttatttgacacgtctcgacatatatacatgcactgcatgtacattctcaatccaggtctctctttcacttcagaaactcaaaacaacctctcaatacagatccagcacgcacggcgtgaggtttcgtctaccgtttcctttacaaaccatatgatagttggggaaactaaaccgagcggaggacggcactcagcgagaaaaatgagacacaaaagagcaggacgagcaaggggggataacaaagaagcaaagacaaccagtgttcgagacgtttaatcctttgaagggaaagaggatgaacggaaagggcggtcaaagccggcatacgcagataacgaaaacacatttttgtcagtttgcgtgctctcggtctgttctattcaattcagatttgagaaaacatatgaaactcacggccttggtgacgtccttgtaggaaagagcgaactcctctccaagggcggaaacaacagtgacaacgagctccttaccagcctcgaagaggtcggtgatctccttaccaaggtttccctcgggaaccttgacatcatccttggaagctccctcatcgttcatcaagttgaggaaaccgtcgtcaatgttgacgagctggaactcgactcgggtgacgactgggtgtaaagagggagaaacggcgtgacggttagctaacaatgatccaatttcggaacgaaaagcgaaagaaacttactgggagactccatgttgtgggtggagggggagatatcctcaagcttcttgttggtgaagatctaaagagatgaggaacgaaaccacctatcagtatcgaaccaaatcacaggtcagctcacgagaatagacgtatgggcttacatcggtggcaatgagatgaactgataggaattgatatcagatgaaaagaaggaaagatgagggttttgttctttccgatcattcataaacgcaagcctggcttacccttggcgtgtccgtgctattggtgccgagaaaagacgagtaggcgagagttgtcggatgggatgcaagattaccatgataaggaacaaaagattgacctggtcagtaagccaattctgttctgagcgatgacggcccgaaggcctacttaacgaggttaaaagctaacctttccggtctgaatgaaacaaagaatgcaatgaaagatatcagtcagtctgcgtcaagcctcaaatcgatagggaagaaagcgtaccttggaagtggacatgtcaatgatcttgcagggtcgtcccttgatgacgacgtgtcctcccttcctgagggcggagcactaaacaagatgaatagtagagaattctgtctaagctttttgatcctctcggtttttcttgtactgagttcaaggcgaaaaagaaagaagctggtcgcagctagaaagagaaaaaggactgacctggatggggtaggtgagggaagctccggcggatcctccaacgaagtcgtgatcgtgctcagtgtcggacatttttactggaaaggaggggcaagcggggaacgtaacggcaagtaggtatgagagttgagggaaggaaaaaagaaggcttctgattagtatcaggtagtggaaaaaacttcctaggcaatcctaggcaaaagcttgatgaattcccccttcgttccgcaacatccgccattctcgttcaatcttccccagttaacggcaaaatagaaatgcccggtgaaactattgactgggaggacgaactgatggagaggcgagagaaagggggcctattgagaaacgttgggacctacagagttaaaaagagagaaggggaatggtctaagaaacttcaaaggattcaaagggcgagaagaaggaaaaaaaaagaaaaaaagaaaagaaaagaaaaactagggaaaaaatgaggggtccaagcgaaacgtgacacatgtaacggaaacacgtgactattcacgtgatcagacgcccgctgctcgctccatccgtcggataccgagatatattgacaaaaggcgtaaaaaatatagtgatcttctctttctcgggggcacatcaccgaacatcatgctatagacttcatttgttcgataccactatgcctcgaaacggaaagactccctgctagagcaacgtgctcattttcgtctgcattatagctacgggcaaggaggatacattcttcatatagacagaggagaagagatcagagatggcacagactgaagtctcaaatagttgacctaatggtcaaattagaaggtctgtaatactttatgtatatatgtataggtacatgcattgattacgttgagcaaatattcggattatgccgctccaatcttttggtctaatacgctctattcaagtcgatcaatcaaatttaaatcttgagcattcctcgtgcgatattatcaaggatcaaaagctgtacacattttttgagaacttgcggtttccatacttcttatccggtataccgctcgacacaaacacacacatatacttcttatacaagaatacatacaacatgcccaaaagagaccaaattgatttctcatacaagcaggaacccctcggagcgcctcggcatcgaaagcgggatgctaaaccaaaaaaggagagattaggtgcggtgagcgtcttgagagaacgttctcctgctcccaaaaattggggctagttctctggtctctggaagtctttgaatactgactacattttttcgtctggttctttctctgaatttctctctgtaattgtctcttgctcgtgaaataccacatccgtatcacactcgctactcccatgcccacagtcaagcaggaacgagtgttgaacgcgcctaccggacgacaggcagtctctgctgagcctaacggtccgagctcccgaaatgttcatatcgatccgaaaccatacctgacgatcctttccttcctcggctcgctttctgcctctacgatcagctcggaaaagtaccagactaatttacaagccgtcaagggcgcattgttcgatagagactacgaccgggcgttcggcagtcggtccaagccggattggctctgggcgtatgttgctcgatgggtccctgggcgagcgctcggctaccgagctatgctaggtgatctggatgagtacgaaggaggctgcgccgtcaaggctgttggcaaactttttgagccacttgagggagaacagaggtttgctgttacaaaggttgagagtgagcaggaggagcaggacgacgaagaggagggagatgatagcgagaacgacagtgacgtggacgaagggttggaggacgcggtagccacgttggatctatcgagtcctccttccgattcgaacggcaatgagccggttcccgaggtgatcccgacccgaacgatcaacgttctctgctacggttccgggcccggatcggagatcatcgctttggcagctaccacccgtgaacggggcacgcctgccaaggttcacgtccaggcagtcgactctggaaactggggtccgattctgtctcagatgtcatccggaatcgagaccgagtggaaccttccgaaaagtcggttcgaggtagactttattcaacacgacatcctcaagccggcggatgctactcggatcgacatcccccgagcgaatttaatcactcttctctacactactcacgagctattgacggcttccaggtcgacgaccatcgcctttttgtccaacctgacggcacaggcccaaccggggacgttgctgatgatcgttgagtcggccggctcgttctctgccatgccggtaggcaaatctgagaagacgttcccgttggagttcttactggacctcgttctggccggtggaaaggatgctggaccgggctcgagaggcgagtgggaagtcgtcaagaagagtgagagtcgatggttcagggtgccagatggagtaggcaagggttaccccgtcaagttggaaaacatgaggtacggttgatgttattttgctcaaatcctgtccttttcttcttttcttccgtgaccgatagctaacaacgatatcactctctcaatttcttatagacatatgctccgagtgtaccgacgtcgtgcacctgtagctgtttgagtgaaaacacgttgtctcttttgctggctggcttacttgctagctagctatctatcatacgattatgaaatgtcaacttatagaattccttcctgtttagggttacaattgacgcagagcgactactaagcgccagaaaagatttgcaaatcagacgattcccagtcagtgctgacgccagagttgtgcgcacctgttaatccgaatagatgataagcctctcagagtatataaacctcaagagaaagaagagaaaggaaggaaaggaaaactgttctgagaacacatacacacacatacatgcacgacatggatcttctcttcaactcatcaatgttgattgacctcctgctctgatgctctgatgctctgctctctgttttcttacataagctgaatggcaccatacgtcgcccgttgccaatattcttcttctcttatttgtcttgttctctctggttcaatacttgagctgaacgtgtgcgcttgcctcgttgccttgcttggattgtgtaacatactgttagagttgtattcgagggcttactcagacttgctggattgtattcatcgagctttctggctgactgacatttggctcgtctccccttggctttaaaattttcccctctgaaattccctcaggcttttccttctcccttcttgttgtgtccaccctctgacttgcattcaaatttcttccccttgaaccgtcacaaccaacaacacctgaagcacaaccactcacccatccacatttacttttcgccatggatactaccaacttttctaacggagtgctcgattctgcccttgatgccgtcggacagacccctcttatcatgctcaacaacctaaagaaggatcaggaactcaagtgcaacctcagtatgttttcatttcttccttgtcgacctgatccttttctccttcatccgctccttatacttctttcccttcgttttgccacacttgtcatgtgtggtcagctccactgactcaactaaaacgttctatcaaattcacacagttgctaaagccgaattcttttccgccggaggctctaccaaggatcgaatcgccagagccatggtccttcgtgccgaacaagaaggtcggctgatccctggaaaatcgatcgtcatcgagccgacgtctggaaacactggaattggtttggccatggcttgtgccatccgaggctacaaatgcgtacgttggctcttgtttggttcctctttcagttctctgttctaatcgccacctgttccttaataatttgtacttgattccgggctcctaccgatcacagatcatcacccttcctgaaaaaatgtctctcgagaaggagatgacgcttcgagcaatgggagccgagatcgttagaacacctactgagaagggctcattcgaggaggggtctcacatcatgcttgctcgattgctcgagcagcaactgccgcacggagttatcctcgatcagtactcgaacccatcgaacccgtcagctcatttcaacacgacctacccagagatcgttcactcgctcgccacctcaaatttgcccaacaagaagctctcggtcattgttgccggcagcggaaccggaggaacgatcactggtatcgctaccgccatgagaaacgccgccggagggttggacgatgagagcacgaacgcccgatgggccgagggagagttcggtgtcgtggttggtattgacccgatcggaagtatcttagccaccaatggagagggtgacgtcggaggatacgaagttgtaagcaacttctgtgtgtgctcatgtcgtggtccctgggctgatttttcacctggctcgcaccattcttccgattcttaggagggtattggttacgatttcatcccagcaagtccccttttcatcgctgtcacctttcttgtctcgttcttttgcagagggctaacttcggaataattggtattaggaaggttggctcagtttttcttaatttaaggaattcgaacccaatagagatacacctgaatgtcgactttcgcttaagagaatcatgcctagaacgcaatgaatctcttgctccagcctgtcgttgccctaacccttttcttcacaacgagatgtactcaattttggcttttcattctcttattcacagtcttgaagcctgggcagggcttgatccaccactggatgcggtccatcgatggaccgagtttcgctatggctaagcgagttcatcgattggaaggtaaagacctgttcattatgtgtcggtgaaagagggacgccaagcgcttacattgattggcttcattctctcttttcttaggactcctcgttggaggatcatccggaacggccatctactctgcgatcgactggctcaaggatacccggccgtacccccaggggggttgggagcgatttggttctaacgagaacgcgaacgtcgtcgttctttgcgctgacggaatcagaaactacatgggcaagccttggttcttggcccaggatccggaaccgaccgatctgttgaaggaaatcgaacacatcatcggtcgaccggcaggaaagccggtaaagaccgttgttcaggaggccgctactgaggccatcaactcaggtttggccacccctccgacaacggaataaaatgttctcttcctctttcttaactagactctcttcttgcatatttcactaccacacgcttgttcataatcttgggatgtcgccattatttatccctagcccccaatcctatctatacagtcatatgcttcgcttctactcaactcacagatattcaacatggccttatcgtcttatcctgcttgggcctctcctgtttcctctcttttcatactctgagtctgggagagatgtttcctggtgaaacatgaacagaagtacattcaccgcttcatgacgaagggaaagacgagtgataaaaaaacatgaatacataaagagaatatgaatgaaacacaagatatcacctagaaccaagaaaggaggatgcatcgagattaagccgaaatgaatatccatatagtcggggacgcgtaaacgtacattacagaccacgcactctcatgattcaattgactgcaaagctcgacgctcggattttcccttctacaacggaaactgtcacgctgttcagtccagcccagcccaaaccacagtgccacacagcatcccccaatcaatcaagaaaaagcgcgcacataatcagacatcttctctcaataactgaaactccaaagagaaagaaagaagatagggggcaagataggaaagagagtgatagagagaaaagaatagagaactaagacgaacgtcagatccttcccgttcataaattcctctcttatgttttccccaatctttccgtcaggcagcgggatatccgatctcgagttcctatccgcatctgtaagcgtcaacattctggatttccggcgccatccagatcggcgcgggaagattggattcagtttgctaaactactcggaataagagctggagtcgggaagcaagtccgaggttaaagaagactaggggaggaacgagaacgcactggttgggtgatatgtccagaagagtataagcctggatcgtttgatcaaccggatcgatgagacaagacagaatgagcttcactgtttctactcatgagttttctcccgacggatgttgaatcccctcgggagaggagcaacggacgaccgaaggatataatggacagataagataataaggattaaagagggaagcggaaggatgcttactttatcaggcatcgtgaatgactcttgcgcacgatttggttcggtcgactatcgaatggttcagtccagatgtggttcaaggaaaagagcgatgaagaggaagaagaaactaggcacacccaggctgatatatatccatccttggatccatgtctatcggggcgtctcagatttctccaaatagaacgaggttgggcgcagagagtcggtaggtatacggacgaacggacgcgacgtcatcccgcaccggttgagacctcaaccgtcgaaggctatttttctccgtttctctccatcccgcgcacatactcaacttttcagtcctctgttgcccactcctacctctctctttttctatttaactgactctttttatttctctcatgggaaagctcatccgccggagctggatccgtggtaatcagatgaaactgcgcggaacgccttatatagggatagagaatcggacatgattgaatcaatcaacagatctgtgccgtggtcaggcaggcagccgagaaaatatagctgcttcttccctcgatcacaagcggttgtggcagtccatatgacactcctgcaactgatgcccagtttaacaccacactttctcacatccacgcccacatccatttccacacatgcgcacgcacactcgcatacccgcgtacaccctttctctccctagatgtgaacttaagacgaaggctttttctgggataaaagatcatttacgtctcacgaggaagacctttgctacattaagatctacttgaggaaacagtaaaatgaacgaacccgtcgagatagacgggaaagaggggaggaggggggaatgaagtatctatctggtgcgccatagcatgcgcaaacgaggaaccacttaagcgtacaagagaacgacagtgagaaaagatctttttgtgtggtgttgggacggatgagtctatattagagggatttgaaagaagcggaaatcttgaagggaataagcaaaacggcgagaaagaaggaaaacagaacgagcagtgagcagaaaagatgggaaattgctgagtagagaaagaaaggttaacaaacaaagggaatatttggaaaacgatgacacaaatggaagagggagaaaaaacaaagaaaggaacgaaggacatcaaacaaacgtcccccaggcgcccaaagccgctccaaacaccccaaagacgatcaacgaccagtcaaaccaaccttccacactccaatttactcgcttcctagcctcctccagtcggattcgactttcctccgacaactcacccggagcggacgatactaaagaagaaaccgaggtggtcatcgaggtcggttcggctggtacatgatcatacaagtaaaccttcttggcggcaagagggatgatgaccgagacaaggaatgcaggggccgaacccatgaatgccaagaggagctcgaatgaaggaaatgtaactgtgaaaagcaatgattgaaagaaagaagagcgcatgataagaacattgttccgcttcggtaatgaaaatccgtagatttaagttaatgacaactgactagagatgataacgatactgattacaagagaaatcttgctaattcctcgaatccatgccttcctgatctctgcccttcgccaggctttgacctgagtgacaatgtcctcctcctgagcctctgcctcagcgttgataacggtctcatcatcatctccggtagagccggctgcaacgctcgcataagacttttgaagagtgggcgagggaggtcgagtcgaactaggagtctgctgagcagagagcgcagggtttggctttggcatgatgttgaacgcgatttcaaccatatcgttaagctatagtggggtttcaaaacaaaccctaatcagtatttctttaaaacagaacagaaaacagaaaacagaacactcaccattttcataccaatcgggacctagatgtaagcacagagtcacgttagtttgcggcttgtatgcttgagtatagtggcgaggttgacttgccttagtcaaagggtttatagccacactatagagtgccatcgtgctaatcaatgaagagaatccagggatcttggaaatatccagactgatctgaacgaggaggatccaagacaaaccgatcagcaaaagaacgttatggactcacgtcaaaaagatggcgaatcagacttacttcgtcgctgacgtcccttccgaacatcaaatatccagccgagccaattcccaagcagacagacaatgcgaccgcgtaactcaagtcaaccaactttctccacttcgtagtgtctttcatgtcagaaacaataacaggacaagccgcgtgaccaccctatcgagacgcgccgaaagaagttgcgtcaggatccaagagacgtgtttatcattgttaccaatgatttaaaaaggaagagggggacacagaagaacgaacataagcactcatcatcagcccacccgcgacaccgactttagcaagtccccaagccggccaaatatccgtcggctccgggtgaagaatcgatccaggcgagctagtagccatgaaaccatttagaagcactatggcgatcaatatgaatgacgtagtgatcccgaggaaggaggtataactcaagaagtggagcggcatgaacgatagaggtgcaatgatgaagaatgaaacgattttccactcagtcgacgagaagaacgggagaagggcggatagcgtgtcggagtaaaggatcacaagcgcgatggtccaggcaaagatttcgaacacaaacaacccggtgagccagggtcggacgttgaatcgtttatcaaacgctttgccaacgatgtctgggtatgtgtacacggtagggtcgtctaacgtgaactgaaccatgacgagaagcgttcggtgagtgataaaggcgaggaggatgagaagaatcggaccgagaacccatccacagtaagctgagagaaagttgagcgagggtgtgagtcatgagtgagtgagggagcgattgttgatgatttgcttgtctctgtttgaaacacataaaggacttaccgatagccaatggagaggctaacaaacccgtgccaacaagatctccgataacattgaagagctggatgggagcggagaagaacacgaatgacaatgttcttgtaaatcaggtattctaaaagcgacgatacagttggatttcagtgtactaacagcttgtagaaatgtgctctttccaccgtgggtttcgccaagacctaaggcaagcacctcgaggtcctctctagctctcaagtcgaatgcggactcgtccgcgtgcgcatttggctgagaatgtttcttattggatctagcgtggacggtagtagcgttctggttttgaagaaggggtgtggtctccaacgattgagaaggcatcttttaggacgaacgagattgataggtgggaaaagcgaggggataaccgaagagatagagggggttttttacacaagaaagagaaccggaagaaccgtctgtttaatcttctcctgttttctcttctctctttcgttccgttttctatgtttccttctcaatatgtctacaagcgaggagacagaataattggatggagagtaggtcagagaaagaagaagagagtcgttgaaggtcggctgtctataattttttctgattgggctggaatgaaacaaccggccagttcgggaaatccaaattggcagattagttacgttgaacatcaccatcacagctttgatccggattctcggtcggtgtgtttgtggggacaacagcgttaggttagacatatagtcgaatatgtagacgccacgatacacctgccacgtgctttggttacaaccatttttttggttgccctccacactcgactatcatcaacgaggaatcctatacctgaaacttttaactcattcatacacgcacactcgtatcctatcaaacaactatgccaaagatgggaaggaacagttcgtatctgtttatatcctatttattagctatttaatcacagctgttatcaaagacaaggagaggatctgacatacctacgcatgcacactctcaacagaagtcaatgctcttcctacacccggagctagttcgtgaactgatttttgagacttcctggtttacgccgtgttcatgagaatactcctcctggtagctaaccacatgattcgactgataaataactacttctagaaaagagaaaggatccgggagtacccaagtttgcccaggcggctgctcgaaaggagcagctcaaagttcagagcaaggccatagagaagcaagtccatcgagaccgagcggctgctgtgcgtgactctcatctcggtctcaccctctgactctgaagagtagtgcagagataacttactgagtgttttttcctgtttgttttactttgcagagaaaacctcaaacgttcgccagcatggggtcaacctcgacattgaagtatgatccagacgctccttctggttcaggcctcaatggattcaccgacgatattcagacggctgattatcctgaggttagcgaacctgtttcttcatcttcttgggcaacaggtcactgatacaattgctgatcgattgtcatcatcaaacgtatatgaactcgtcttgttcttagcttgatccagggatcatgctgaaggattcgagtgcaaaggcttttatgaaccatcttcgaaaagttattgatcaaagtgatgtgatcattcaggtctgttcttcttctcttttgcgctcttaagagctcacgagcccgaggttgtatctgatattttcctttttcttcatatatctatctacctatcaggtgttggatgcaagagacccgttaggtggaaggagtaaatacgtcgaggatgaggtgagacgtcgggaaggagacggcaagcgtttgattgcggtgatgaacaagattggtacgttcatgctattgttctctcgaggaggacaactagacatatataccgactagggatttcttttttctctttatcgaatcatcagacttggtacctcgtccagcggtcgagcaatggcttcgataccttcgacacgatttccctactttacccttcaagtcatcaacccaatctcaaaggaatcatatctcttccctccatctgccgacatcatcctcatcggcgtcccactcgcaaaatcagactggcggaaggacagacgactcgaatttaacgactccggtgaccgctctggcgctcggttcggctccgttgattcaacttttgaaagggtacgcccgacatctaccgacgggtcagtcgttgaccgtcggcgtggtcggattcccgaatgtgggaaaatcttcgttgatcaattcgttgaagaggagcaaggcctgtggtgtcgcggctacgccaggaaagacgagggttgtccaagaggttgcgcttgacaagtcgctcaagatcttggattgcccaggtatcgtttttgacccggctggctcggttgaagggttggatgagcacgagcgaaggaaaaagagaggagaggttattttgaggaattgtgtcaaaccagagttggtcgaggatccgatttctcctagtaagttttcgatttttactttcaaatcttattctccttctctcattcctttgcgtggtctctgattgatcaaccatgtcatcttcatcaaacgttcatctcacagtggacatcatcatcagcaaggttgaacgttatcaactcgaaaaactctacgggattccaccgtttgagacgacgactcagttcctggtgtccatcgcgttggtccgaggtcggctaggtaaaggaggtgtgcctgacttagaatcttctgccgtccaggttctcagagattggaactctggaaagattgcgtatcatacagtccctcctgcggttcatcattcttcgattcttcgaacaacgaagaatcccaatgtgcctgttggtgatattggtgatggcgtcaatgataacaccatgtcggaaacgaccaacggcggactcggatcaactttggggtcaggaataggtacccagacgggagatgccgccatcgttcgttcgtttgctcctgcgttcgatctggccggtttgatgggtgccgccgatagagaagtgttcgaggaagaacctatgacggaggaccctatggatgacggcgaagcagacaggcaagatatggctcaagacgaacccgacatgatggatgacgagcttgacgacgaggccgacgaagcttggggtggtctggaggactatatcgggatgggcttattgaagggtggtgtggaagaagaggttatcgaggacaaagtagcctcgatcgagcaggccagaattgaacatgaaatcgctcgagaagcttcgtgagtccatctctttctcttcccccccccacatatgcgaaccgatatgtatcattcgtggagaatacaaaaataaattggggcccaaaaacatctcaccgttacgaccatgcttatcgttccgctttcatggatcgaccatgccctttttatgcttaattaattccgatcgatactattgtttcccccacttcctaggcggccgaccatgccgacgagcgggattcagtttcctaacccttctgcccttcctcgggtcaagacagcccagctaggcaagctgttcacgccaaccgagatggaccatatgtcgatgacgaatccaaacagtcgaaagaacttgaaggcggagaagaagcgaaaggagaaagaactccggaggttgatggctcttgctggggagaatccaggagatggagaaggggacgacttgatgatgggctaagacgtcgtcgaaatgtccgtgtgtatgtgtttgagtgagcggatgagagggaggtggcatgagttgcatggtgagccagcgtagggtttatgatgtgaatgcaagtgtgtgcaattgtacgtactgtggccaactcggcaactgaacgatgagacctgttcgagaccaacggtggtaatctctaactgattagatctgttttgacgatcaattgacgtcttcttgtgtatattcgtcgatcacctttcctgcagcatagagggattttttagaggagaaggaagaaagaaaataagggtgctaatggttatctgaagccaccttgttcttttgaactctgcatccttaggactcaaaacaaccatttagcctcttcgggcgatgttctttctcgtctttgtttatcgtctgtatgtatatgttatacgtgtaacgctgggtctcctctgaattctctcagcgttcgatctatcttcggtcaacgttctctctcttctgaatgttcgggtagaggctgttttcggtctcgttaaataaaatataatcctcgtaggcccgaccggcgatctttctacatctgtatttacatccattttctgattcaccgtatttcggtctctgatatcctttcgggatggatctctcgttttcctgctctttttgacctttatatgctttccaaccttctacggatggaccttctgattggaatactggggaggaaagagtaccatttgtacggatatgagcaggatgcaagggaaaaaagggtagattcggcttaaagctgtgctaatgcgcgactgttttcgttcatctcttggttcccatggtatatgcgtgtgcgtgtatgctccctccggacaccctgattgaccatatggaccggggatcgagtcgatgtccatatctgtttatccgctctatttatcgaagcaaacgggatctatgtataggaagagattgcaagaacgaacgtaaacgcatagagagacagaaagaaggcaggatgagaaggttgaatttttttttccgttaaaaacaatgtacacccgctcaatcttcttccatccgacgacggcagtcttctttttctttttccttccctcctttgccttcgagagacgatagatccggacgttgcttcaccctggttcctcatcgttgtcttgcttcctggcgttctgtttgattcgcttcaagagaagagttgcagagaaaacccgacagcagcaacgactgaatacattcctttctatctctgaccattcctggtttccctcgactggccttcttttcacctcgcttgcattttttttcttctcgttcctcttttctctttcttccatcggatcttcttctcagtacaaacctcttgttcttggaccatcgttgacaaggaaaggagtccagttgtctttcattttcttgccttgttctatctcggccgttgtcaacaataccgacatctcgtccttcgagtccataccctatacctcggctcatctctcccaaaactcgatccatcataggccatctctattcactttcagtcccaggctttcatctcaatcaacacatcatcaggtgcgatctcaaaactgtttattctctgtcttcctcacattgtgtgtcttaaccttgttctctgtcttaatatgctttctctttattcgtttggaccgaacacatcttgatcggaaacacttttcctctactctgccctctccctgtttcctacctttcgcgaatgtcaacagatttatcctgtagatccggaacttgcattctcgctcctcccatctgcaacccaacgctccttggttggctgtcggctctgtcgatattcgtttgctcgaccgagttgcccgttctcttcgctccgtaacgctcagtcccatgtctgatcatcctccaaacactcacactggatccagctacggccctttgtacgatcagtcatcgtccctgcctggagatcttcacgatgctgccggtcatcatccgttctcttccatcggccgggtcattccctatagctcggccttacctacccaaggccctccttcttatcccccttcccaggtctctctacagtcaacgacggccgtaacatgctcatcaccgtcatcatcatcaacagcagccatgccgacccggacaaagataaagctgacagccatccagaagaaagagctgtgtggaattcatgcgcagtaccccaggaagaagcaggaggaccttgccaaacagtttggaattgaacgaagtactgtcagcaagattttgaaagacaaggatagatggctaggaaacccaacagaatgggttgcagagaggaaaaaggaaaaagaatgcggcatcagtccaaaagttcctcggtaagtactcgatcctgaactcttttcttgtattgtcttactagcaatctcttccttgatggaaactaacgttcaaaacatatgttttttcatttctctccccgcacatatgcaatctatctcagctccttccgattcatcgagattgaggagcatatgagtgactgggcccatcagatcttcaagtctggccagacggtctctgatggtcagatcagagagaaagctcttggctgcgcacaggttctgtcctggccggtcggaaaattcaaagcatcgactgggtggatcgaaaattttcgagatcgacatcagttgcgcaaacagccctcgttcgccagcacctcatctggtagagatctcgccggccagcgtatccagagctactcccctcgtagtattgaggggtccgtcagtcctgccggatcgtctcctcggacggacgccgggatttgttttgttcaacgggacgaaggcggcaagtcgctgaggaaacgagcaagctcaaactcttcactaagcctgcgaggtggtctgacggctctaccaaccgtcgtcgagggaacacccacttctggtgcgatccatggaattgctagcttcagccttgatgactctccttcggctgattccccgtacggaagctatcaatcctcaccatccacctccccacgatatccgcctacctcgttgttttccacccttgaggttgccggaatctcacctccctcccagcggccttatcgggccagccctcggtcgagttttccactagccggtcgaccgggaatgcatcaccggacaaggtcccaaccgtatatcctaccatcctcccagctgtccagcacaaatggcatgcccgcgacgccttgtcccaaccgaggatcatcggaagatccatacatcggtctccttccaaccggtctaggcccccaggttggtaccccgtcgctttcccaatattctgaatccatgtttcatccatccccggctgtgctgtcagattgcggctcgctaggccctccactctcgcattattcacattcatctacgtcttccgtatcatcgttgccccattcaatctcgttcgatagcgccctagttgcctcacccaccccttggtcgtccacgatggtccacacagatgatcttaagtcagaccatctgggcgctcaaccatggcactcggagtatccctcaccaaacgagagccgtattcaggatggcggaggacaaggcacgctggtcggctatcaccttaatcacctgaacatcagaagaggatctgctggtggtagtggcgaattgtcatcttcgtcatcctcgacgggcggaccactcgctccatcaacgttacaacctactattggcttaggatttcagatcgttgatttatcattgcagccgccgatgaaaaaccttgatccgcaatccaactaccttcctatggagaatcaatcatcatacccgttgatgacctggcctcagcaaccgctccagcagcaacaacgacgaccatctcctcaacaacaacaacaacaacaacaacagcagcagcaaatctaccaacaactcctcccggcttatcaatcaggccagactcaatctctgcagtcttccatgctatcgctttcaccactccccgacaatccgactttggaagacggatcatccgtgatgcaatcgaattcctatcctgccccagctactacggttgaaaccatcggtcaatcggtcccgatgggacggtctgctggttcaacatcgtctttccggaacgacaagcttctgggcggaacaacctcggcttcgctagggaactggaaccacgtggacccaaagttgttggctggctagatcgtttacttctttacccttttttgcttttctcaccccccccttctccattcgctttgctttttcatacaaacagaaacccacttttatagtccttcctcagatgttcagcttcttctcttacttctgttttcctcctcgagttttggtcataaaatcagactgtatatgtagcgcattcatccatcatcaagacgtcgttcattactcttcttcttctcctcttttcttcttttcttcttttctcccccttgacaagaacacacccaacctcatcaaagcatattttcaatctcactctatctcattcttctttgtctcattctttggtcattcacattggttggtcgttttgcttcctcttctctttcctttcttccttctcggcttgaagttttcgttccaatcctaaaaaaaatcccttccttgcttgtttccatttcttcgtcatcttttgcccttcttaactcccaaaggattttctaatcgcatagttcagtcaatcaatccttcttgttctcgacacttccatctttattcttcgtttcttgtcctctttgacagaaaacaaactcaaaagtaagaataagaaggaaagcttaatcatgtcttcattcgcgattatgtcatcttctcgttctcctcgcccctttctaacatatttcaatttcttttgcgcttggcttctctagatttctagtcattcgaggtttctattctgtcatcttggtaacttcttcctgttcttccccaactatatcctcttctttcctcttcttcctcttggacggtggtttttggtgtcatcggatcatccgttcattctagctttaccccctctttccttttgcttgtcattccttcctgtctatggtttccgctagttctcgttctctcatcagataggaagcaactcttgttgctcgctcagcgataaataatcatgcctatccgatcttcgatatcatttcttctcttctgtactctctcttgacagaagctatgggttccccgggaatgacaaaacttgcatgtaccaagccaggttacatatattttccaagcgcccgtgtactcatcctgcccttcgcttgttctcaggtgcagctcccaatactaccaccaccaccaccgcctccgaagaaacttctcaacgaaccctgtttaggatcgaacgctccgttcccaactccgccacgttgtctttcgagtccttttagatggccggtttggttcattctcaagatctcgaccttcaatcttatctctctcccatcgctcttctccaagattgatccggatggggtttctagtgcggacccaggaacgggtttcgttggcgcaggagccgcaggaacggatgaggggttcggagcggtcgcggacgaaagggtatcggcatttgcagtcgcagtcggagaggccgagcgcgtaagagagggcgaaggggaagtagatggtgtgaaggtcggtgtgatcaatactttgtgccaacctgtatctgcaaagtgcgagcgtacgctcaatgtcagccatcatcgttatctccatcttaattaagaggaataacgaaaggacaagaaaaagagaagattaggaaaaacgaactggtcatcccaacaggattccatgggtcgttttgtcgtctaggccgtctacggagtagtgtacccataagctcggagctgtaatgatcgtttgtttccgaaaaccaaaaggaaaagaatgaacaagaagaaatggtaagacgtcgtcatttttatgatagatcttgcttctaccgacaagagtgaaaaggtttcacttgaaaatcccatgagcgacggctactatgtgtatattttcttgttcggatgactctagatgatgattaaggaacccgtcgataaatcttgttcagaaagtcaaagacgggcgcgcaagatacaagcgaaactccggatctactttagcaaactcgcaagaaagacattcgagggcgagaagatcagacgaaccgatctgctctcttcccaacatcatccaaacactccccatcttcaaatgaaaatgtccttccggcaagtcttttataatttccgctcatgttgttccatgacttaccctcggcctgaccaaagtttctttatgacagcgtttccagcaaatcataagaatgatcagtcaactttctctcctcccgagtaatttggagaaattctactatgattgttctgtcgtaaaataagccttgaacgtactgttcctgcataagaggcgagaatactataggcggcaaattttcggaagcttcattctgctcaaatatctgctctgctgtccattttgctcgaagctgaagaaatcagatttaaatagattaacattcaaacgaccgaaacaaggaactttttgtcagcacttgcatatcctcagtgtcagagaaagtggaaaagatgacttacaagcggactggcatatatctgagtgatacgaactcccttgaatgatccacctagagcctatgtgaggaaaatgacagtcagattcgttttttttgttccttcaatcacccttgaacttccctagcctggaggaaccacgaacacaaaagaacaatgaataaaaaactgactcaccttcgcttgattcattccatggtttgaaagtggggtatctcttgaacctgcccagatgtccctctaagcaacccccgaaaagcattgcctgtgtcaggtcagcccttgtttgctttttcttttgttctgacttagactcttctagaaactagagtagaagtgaatctgaatcggttcaaactgacaagattatcctatcgggtcacatgatgggcagaatatacaggcgaatgtataccaatcagtctgcgtgtaagtctcaccgaaacagtcccatcgttgtgctcatcgatgctggagagtcaaactcacggtagattctccatgccggacctggtttgatgaaacatagttcccagaaattaaatctttcacaaccccagaactggttcacactaaattgtagattgatgtacgaacgatggtcagatacatagtctcggttctcgaattgtggtgatggtttgtgtctcgagtcgtctaactgcatgactaatcggttgaccggccttctaaattcatcaggatcattagataagataacaacatctccattttaaactcaatcttgccgtttcggaacgctctgaagtttgtaaacacaagacaataacggagcacggggcacaggtaacaaaatgtcccgtcaaatttatttctacttgtacacaagatctgtctgtaaatatacgttttgccgcccaagaaaaacgccgatgcgagtttatgtatcattcatatcgccagaggccaataggctgggttcattgcggaggggaagagggggaggaaacggggccgacaaatacatgacttgagaagaggaagagatgagcaagagaatgtgggtgatgtaacatcaaagttaaggaaaaaagagaagaagaaaagagggaaaacagatgtattgagcgatctagccaactcggaagataatgaacagaaccgatagagaaaaaccgaaagggcgtggtgacagaacgtgatgaaggggaaaacgtgaacagaaacagaaacgaagagattgaaaagaaaaaaatgagagcgcgcgaaacaattctcagatttattggttgtatcttcggaaagctggaaaagaaatctcgattcaatcttagttcttggtctctactcgatattacaggacaagaaaaaaagacgcactgtaacccaagaaagcaagatccttcccagctccagctcccccggtatccggttgttgattcggaacgccgtcaagatcctcggtcggaaagtatgacgtatccgtgatagatcttaaatgtggaacgaagggagcgtcgatatttcgaatggtatcccagtcgactccgtagaagaacgggtgagacttgatctgagcgacgttcagtctctgttccggtgatgtcagaaggctgggttggtttcatagagcgaagtataagtaaagaatgatctcagaacgacacaaccaataagaagagccaaggcataccgcttgatcaaatcttcagactctcgagaaagatgaacatcatcagggaagtacaaatcttaggagaaacacagagaaccaatatcagcagctggaccagagccgagacgaaagatgaaacaaaatagaaatgaacgacctacgatttcgccagtcaatgatctttcggtaagtgtcatgcgcgttctccgagcagaacggggggtagccgaccaaacactcgaacataatccctctacaccgtggccaaacgagagtagcttcaatggatgatatgtgacgaacgaaaagaaaagaaggaaaaagacacgaacccaagagaccaccagtcacattcgttggagtatccttgctgcaagaagatttcaggggcgatctaaagcgatacaagtttttttcaataatagaagacatgataagctaaggaaagcttgtttgagttggagaaatcctgaagttgtgaacgtacataatcaggtgttccaacggtcgagtatgcctgtcgtgataagaatttcaacaaaggccatgaattagtacgtctattacgaaccttattaacgtcctttaagtatctccactgctcgtctggctttcgagacggtgatatctcagaaggtagattgcataccaattttctcctattggccttccacgttgcgatcgtgtccttcgagctcattgtcagatggatactgttcaccataaccgagttcctagcccccggtcctgcgccggccatggcgtttcctcccggacccgttcctgcgcctgctgccgcgcccgatcctccatcaagaagtcgttggtagtaagctgaatcgtgttgcttctggaagccagtagacagcccgaaatcggaaagtttgatgtgaccctgagggtcgatcaaaatattatccggtttgatatctcggtggatgaatccaagtttgtggaccgcctcgatagcgagaacgcactcggccatgtagaacttggtcacatcttccgagaaagtgtcatatttaattaacctgactcaacagatcaccccgagcgtaggaaacgtataaagggtatttcctcagatcagacacatgtacttgtgatcagtccagaaaaaaagtctatgggatgacctacattgtcattaagtctcctcctggcaaaaactccatgatcaagtacaagaagcttggatcttggaatgaaaagtagagcggtacaacccagggtgagttggactctgctagaacatctcgctccgctcgaacatgtgccagctatgctcgagaacgaagtcaaggttgagacccagaacagaagataattattcaaaataaacaaaatgagctgtctccatccgaaaagaaagttttcttataaggtaggcacgaaaaaagaagtacagacctggtcttttttgaacatctcgctcttcatcagcgtcttcatggcgtagattcgaccggtatcgattttctggactaggcgaacctacacgatcccaacaaaacatatgacaagatgcgataagcgcatgtagttagttgacttgtcactccgctttgatggctttcaagagtatgattgatctctcgacgatatagagcgaacagaaagaacacacctctccgaatgctccctttccgatgactttgactgttcggaaatcctgaagactaagcttcgttcgcctcatcctcaggaaacttaatatgcaattttagagccagccagagatcattcagtgatcgacgacatagatgaagagagagtaggagcaaaggcttcaagagaagaatacttacttgctctctttccgaccgtattgagcgatcagccgctgcttgagatggtccggagtaagatgatcttgagtgagtgcccgctcagttgtgatacgcctgtatgccacgagagcaaaatgagtcccggtagatagtttttatcatgagtaagtgacaggaatagtatagaaagctcatcagaaaatgttgttctatcctaagagagagcagaggtatatgaaaggaggacagaagagaggatgatctagtgactacgatctctatctcccacctcttcaccaatgtccttttcgggttaatatatgctcgacacatatccgaaagagcacagcatatttccgaggagcgcaaggagatgaaaagaggggaagaaaagaaagagaaacaggagagagattgagaacaagatcagaacgaacctctctcgcctggccaccgcgccctccacaccgtccttgtaccaaagctcaagtctcatcctgacctcagtagctttctgtctagcaccttcgaacttctccggatgtctctcaaaatacacatagtctggcccatgggcctgctccgagcttgctgctcctccactgccggttgacaaggtggacacaggatcgacgtccatattttgattgggatagtggggctgggattgaggataaggaggagaagggcggtgaggttgttgttgctgctgttgctgatatggctgctgctgctgatacggttggttgggacgaggctgatacgactgattgtttgagtaagccatggtgggattccttattcgctcttcttttagaaagaattgaatggatagagtggaaaatgctcgatctattcgggaccacaaggaacaggaataggaatctgaggggcgagagatgagaaagaggcacacacgaaaaataacaagccatcacgcacgccaatcacatcacacaaaagttacactcttagcctgcgttgtctattgcctttgtacgttttatcagaaattcataaagatacactgcaagacgcatacacaaacacccccaaacacacatacacaccatggccatcggtactccatacctaactgatcatcagtcctcagcctctaaggaactagcttcctgcctcaaatcgttcggtacctctccatccctctcctttcgactcattacctcggcttcctcagccttctcagcagccacatcatccgcccggacttctagatctcgttggccaccggggaaaatatgtgacaccacggccacacccttgcctagatatccaatgtgggacaaagaaaagatagaggaacgacactggtcagcaaaccatgatctagaatatctgtttgtcttttgcgcgcgcagtatcagacataccctgagtagcttcagcgacctgttgaagaataagcaagtgtcagtagtcgttcgtctgttcaaacagatatatagaacgagaaatttccctacattttcgtaaagatttttcccggtatccccatcgcttcttcccggacccgtccagaagtggaacgctctcgagagaactccactaaggtaacacacagtcagttttggtcgatcaattgagaatatatgaacgaaaccaagagacccactaggaagcaggcacgacctcgaccaggtcacctcgagcaatctctacggacgggacctcgttcggtggcaagccgaccaaataagccaacttaagaacacagcaaccgacagcggtgatggcaggacaaggatgtcgttaggtgcgaatgatgaacagctgaatgatctaacgaagagaatcaacaaacataccaaacaacgaatcacagaagcatgtccgataattagcaaatcatcctgacacctttccaactcgaagatcacgctttccaatcggactgtcgacaaaaagaattgagttagtcagatacacttctagaacgatagaaaagtgtgctcagcaatcttttaccaagacgtaccactcaaatcgtgataactttccgcgcgaggtgctcggtgagcgtaaggatcctttaagaacctttcccactcatctgggtacagtctcttagcctcttctgaagacaaaccgtcccagacaccaggctgttgaaggacagttgtacaaagatgcgtttgagaaggatttagaagagtatttcggcataataaggaaggatatgagatgaacaggaaaatgaacagacgttgatctctcccatctgaggcttctcctcgactttgtagtctaatcgaacgaatggccaagcggtatgatacgcccttctccttgcgctcgtccagatctattagagaagctgcgatgagcgttgatatgaagagtatgaaaagaaacactgaagttcgagcataccgttagcggccgatccttcgcgacctctcctcttcttgtcctctcttctttgacctgccgtcgcctactgagtacggcttccttaagcctctccgcatagtcccatccatcagcacatagatcggaatcagctttgtacgagtgctcgatgatagattggccggatctggcgaagtagattgttcgaggacggttgtgaatgttctgaagatgtggcgcacaaaagatcagacaagtcatcagcaaaggtaagtgcagtaagcgtaaagggacatcatctgagaacttcaagcataccataaggaagaagataattcgggattggagatatcctaagatatgattaacgagtgcagaagacagtacatgactgagtcagacagaccgatctgttcatatggccgatcaggcttatcatcaagaacataccttcaattcggttaatgacgatgcgctcgccaacgttgatgactttgatccatgccgcatctggatcgacaattggctcgtatgatctttcctggtctctgattcgcgaccaatagtctcgaacagcatcatccgagttccaaccccggtactatatacacgcattcaaatcatttaagcgaatcagtatggaaattcatctcaaacaagcgatcatgaagtcaaaataaaatatactgacgtcgggcgacgagagcttgacagaacgaatattagcttcgacgatttcgtctctgtcgcacatactttctgttaaacgcgtaagataaacgagtgcaagtaagagatcgtcaatcgagcagatgcgtgaacagtaaactgacctaggaagatgactttgataccagcctcgttgaatcgtttccacagctcatatctcgtcttccgaactccgttgttggcatcgtatatgacgacttggccgccctctttctgaaagaagtccagtgcttgctgttccaaaccaagcttaattcggtccctcaactcttgcgtttctggccgcttcgctcctgatcatggcaaaccgcaagacatatattagacatcaaagcgcttgcattgacacattggctggagccaagcttaggatgagatatgaagggaaaggaacgaaccgattgcaaagtaatctccaggcagcttgtctgctcctcctatgatctttcttctgtaatccccgagagagaacactccagttttgactcctagccatcgtagatacctctcgagcgatctactgatgtgtgttttacctcgagctgtgtttagaagatgatccacatagaagacggagccaatgaatgattagccctccggaagatggtcggctggccacttctacatagaccagaatatacaacttaccaggtaacccgacggttactgaacaacgaagtaaagaagatgcatgtattcagatcgttgtcgagttctctgtagagctttgaaggacatcataactcaccaatgataatctagtagacagtgtccgttgataagcgaaagtgaaaaagcagaaacaattggtgaatttctattatagatacaaaggaggaatcctcttgatccctgattcgattcgttccataggaaatcctgacgacaagttcaatcaagaaacttacttgaccagcatgccagagtcttcctgaatctgtggtgtatagaggagccgccatgtgatggatgaaggatagagatgacgatgatgatgatgaggagaaggagtaagatatcagatccagtcgcaggagagatgttcagcgtctaggacgaatcgatttatctaagcatcgtcattcaaatacactacataagtctttttcgcggtggaactcatcccaatgtgttggaactcattttagccatctctcactcccatccctccatcttactatcgtcttgaacctcttctctctttctcatctatcacctttctttagatgtctcgcttcaatccatactctgaaaatggaggaaccgttcgttctagttttgaaatgatttcgttgccagctcaacccttggcatacccttctggttgccctgttgaaatgctttcgacaagacacgatctttcctaacctttcctccgttcctcgtctgtgtttgaaactagatcctcgccatcgcaggttcaaactttacaattatcgccggtgatactcgtcagtcggaaggctactcgattcagacccgatacgcacccaaagtgtttcgtttaacagacacctgcgtcatcgccgtcaacgggttcgctgccgatggaaagacgcttgtccaaagggtcaagcagcgattggaggtatgatattcgtttttgcaaaaacttctctctttaaggaacaagaaatagagagaactatccgtttctggtctgatgataccagacagcgactgacttgtcgtgatttcaattcctcattccattagtggtacaaccatgcgcacgctaaaccaatgcctatcaagtcgattgctcgaatgattcagacaatcttgtacggcaaccgatttttccctctattcgcatacgtgattcttggtggagtagatgagacagatggtaaatttctttactttcagttgcgggtgtagactcgaatgaatattttgaatctggagggaatctttaatgatctatttgatcgcagggctgattcggagtgtctgtatcttctttctgggcttatacaggctcaggagcggtttactcattcgatcctgtgggaagttatgaacgagaattctgccgagcggcaggcgccgctcaatccctcatccaacctttcctcgataatcaggtgagtttctcctctcttttatattgatctcctctcttgctatgttttcatgtctctgtttctcatacttgtcaatatatctttatacgcttttcgtgcgacctgcgcagatttacttcaagaaccagacacagctcccacatcttcccccccggacgcccggtcaacttccgctgccccaggtgctctcgatcgtgaccgacacattcacctccgccaccgagcgacatatcgaagtcggtgatgggcttgagatgtttgttgtggtaactcgacaggttaccggagagaatgttcagtcttggaatgacgcgctagccggactgggacaggaagaattaagggaaggagcgagcatcgagtggttagacagcttgggcgtcgttggtggtcgtgagacgaaatgctgtgtggttaggagagaacttaagaaggattaagacttctttttttcttctcggttatccattctgatttctactctttcggttctttcctgatcctttcctttgttactagtgtagtccttccaccttgttctgaagattaccccgatgtgctgcaaacaactcttttcttcttgcttctttctccatgagtgtgaatgttcgcgatcaagagatacactcataaataatttcaacaaacaaaggtaaaaccttacaagagaagggaaggaagagagatagaaaacatatatgaaacagagagaacagtagatgtatatagaattataaaagtgatacaatatgggcagagtattgttttatgatatttgaattgaaaaatcgaagatcgaagaaaggggaagatgaatcaagggacacttgagatgaagatggtggtgagattgaaagtccaagaaatttgaaagtgagagaaccgaatgtccaaggcaaaaagagagttccaaagaaatatactagagagcagatcggaaaatggacgcgcgcaaagaagggagacagaagaaggaatacgggaaggaatatgttatttcgtggtgagaccaaatgcgttccggttgacaaccaggcgagtctactaatctattgatggctataggtagaacggggaagaacccggaggtaaaaaaacgggcattcagatgggagggcggtaagaagggaccggagagatggagcaagagatctccggccaaacggcacgaatctatgtatacgtagaaagtatagactcaaggtctggctccgaccagcttcaaaagaatgagaccaatgagaagtatactcgtaaacgcacacgccctagccagtcgctcgaaccagctctcgaaagaaagtcttctacgggacccaattaagcgtttgcctttgccatcgcccttttcctcctcggccgaattccagaatgaaattgtcacaccgcgctcttcatctgagggggtgtattcttcaggaaacgacggaagccgaggtctgaatgatttcgacggcggtggacggtacgtcttgccgcccggcgagggtttcggtcttgatggcacgagaaacgagctgggcgggccgggaggcgggcaagttcgtgaggtaaggggcagagaaaacgatcgtttaggttgaatcttatgagacggaactgtcgatggatctgacgaacgtcgagcggacgagaagggtgtggccggtggggagatactggttggagaagccggggtggtttgtacgtgtggagggaatgaccatgacctcgtcggtcttaccggttcgaatgagttcatcctcggaatctcgagtgtgagtgagggtttctccgtgggcgatacggtgatctctaaaggatcacagtgttgagacagaatgtctaataagtaggggaggaaaagacaagacagagtcagaacaaaggagtaagaatgcagacactttcatggacggaaggaactgaactggtctgatgcatcgttcgttctacaaaatggcagagaagaaagggttggagtgaaaaggaagggagagatttctatagttgagacacggggaggtccaagaggatgatgattcctggtctgtccgtcttgactacgcccgagtgtgtgtacgtgcgagcggtctgtacctgaatgaatgacaacagataaatgggtaagctaaatacgtcaccaaactgatgagagcacggagcgagagaatgaatataagcaaggtgaaggaaattgtgcgtgcatgcataaggatggtatgtgagagggacgatgtatgtgcataggtgtgcatgaaactatgcccctgcacttctgacaagtgccgccgtcctttgtcggaccgatcgaaggatatctgtctctccgccggttcatctgtcttgacgatgcacagttggtcgtataatcaagttgattgacgagctatctgaggtgcgcgtctgactctcatgtcgatgtctgctcttctatcctgacgaagatagaaaagatcgagatgccagcagacgaagaaaaggagagataaaggaagaaaagagagaggagaggaatcaatctcactcaccgagagctgagcagaatgagtgtttgtagaagtaaggaatcaaggtaagaagaggaaaagagtcgaaagatggaaaagagatctagtgaagtccactgttaaaagtggtttggaggacagatcagaagaagaagaagaagaacgaaagataaagaagaatgaatccgatggggagagggagagaaagcgttcagtgagcgacacgcaccccttgatagtgagcaagaagaaggatgtaggacgatctgtcgcaggctcgttcgtaggcgctttcacaggcacactcaccccttactcagccgatcggacggtgtgatagcttctctctacctctcttcttttgatatattgtctcggccaagcagacgccatttgttctgtgctttggtaactgactgagattgtgcctgtcgcctggcccgagcggacctaaaagcggatgatatcactctgagggagtaaagatttcgctcgtacgggctcaatcacgcactctcgtccgaaccctgaattattccgggcctggaacattccttcgttgatcttgttcggccatggcgatctccggggccacgcttttaagctttctagaccaagacaacgtttactcagactcaactctacttattacggtcttcaagctccgcaggtagccggttgtaaccgcctgcgtaaccggtatcgataggcacagagatttgaggtcaggctttcagttgatttattaaagacggaaagaatgatatttatgaaagacaggaaacgacaaacaagaaatagaaaaagggattgatagattgcaaaacaactaggacgaaaatatacacgaaaaaggcaagtaaaagcttaggtggcaagacatacaatcctcctcataaagagtctgtaaacaatatagctacgtaaacgggtcgagttctatacacgggatatgccccacaagaggagatacgtgatatacagttcgcatctcgtaaggcatctcctccctcctcccaaaacggctaagtgaaagatttgtcagaacggggagcgaggctgggaagttgttcgtggattacatacatgattctggacagctgtccttcgatcgaaactacccatcacgcccgggagttcagtatggaattgataacgacagcggcattgtcattaaacttaccgttaaatatacagtggtcaaaacttaagtcaaatcattttatctaaacgaggtgttcgagcttttctcgatggatccgagattctaggatttcttcggcctcatacctctcgctttcgtcttcagagacttttcagcaggcggtgatgtgacctgttgagccgatggttcgttttgatgatatcgctcaagttgcgagacgtggattaccgggtggcggtccatagtggccggaaagtcgagtcggaaagcagcgcggcctactggctcaagaatcttgaacggcccaagcaccttgtaatcaagtttgtcgtttggtccgtaagtcttggtgactatttgtttgtacaagactagatcgcctggtttgaagtctggagcagcggatccatttggatcatcatatccttcttgtgtttccgcggcattcttcaagaccgcttggcagaaagactcaatgtctctcacctgtcgaacgtgtttttgagcatccagaaccgggcagttaattcgaatgtggccaggttgaccacaatacaaacataaattgagttctcgtcgacgatctcgttcttgagctgttaggggtccacgaggagaggaaagattgtcgatgtctatcataatcgaaccgtctggtggatctgcgtgaacagcaggtcggtccgctggggtgatccagggtggtttctcgtcatcaagaagaaaaggtcgatgaggtatggttgattgtgtgccctcacccttgagtttcttctcgcgttcgtagaatcgctcatcgatttgagtagcaaggttcctaagctcctccagagtatcaggtctttttaaaaagtcgattctatccttgatcctgggtttgagtccggagtagaactgggagatcagccagtcgtcgttccagcctgtgaaggcgactaaagatatgaactcgacgtaatattcatagactgatcgggtctgagtcaaatattagatctgtcgtgaagctgaatatgtctcgttaacgaggccgaacgaggtgttgagacgtgcttcgaattgtctaaagtctttcatccagtcaggtttcgtgaacgcgccttggctcttcatatagggctggaccagtttgaatgcgggtccccggaggtggtttatggcgtagtatattttagattcctcggtagggaacttgcgtggataaaccgtgaaattgagcgtgcagagacagaaaactctctacatgcgctcggatctcgtccgtcaaaaagtggaggcgcggagatcgtaggttcgttcgaccgttcggctaattcggattggagggctaggactttggcttccaattgagcgatcctggtggagttcgttgcgttggacatatcggatgctttttgcggcagagatggccgaataaagaatcctaaacaggaggtgtagattgatgaaccgcaaacgaagaggatagggttgcacgcaagaaggtatacaagggcttagatggcaagatggaaatgacaaagactcgtgctcgaattccgatatcaggattggacgaggaagcattccttaaatactataccgaagcctcgacacagctgggtgagtatcaggataataaagtatatgattctccacacaagaatgcatggaagagaaagaattttcgaaaataatagccaggtaaacgggtcgaggttcgcagctctgatgtgctgttaggaatgtgacctgggtgctacatgcctggaacctataggttacaggtcccttgccgttattgctacttctcttgcaaagcattaacttccaagtatgtagtcgtacaacgcatgtgcccctatcgcatcccatggttccttcttccgtgcaaccctgtgatacaatccttccgtgcaacccgccaacgcagtgtaatttcttagctcatcgtctgcaagtagtatctctgtagtctgaggatcaggtatacgaggggcttcctttgccctctatagcatgaccttttccagccaggatcttttgttagtttccttgctatctttatcattgctctctattatctgtccttgtgttccatcttgatatattaatatcattttcttgcgctcctgttctcagccatcctagtcagagcctaaattccacactaccaatcctagcagtcattgtgggttatacagctcgtagtcttctccatcacaggtacagctcacgcccctcacaggataccacattcgtttcaacactcaaccttacctaatcaagatgatgtttacctaatcacatatataaattaagcattcaccgtcttccccttgttgacccgccctcttaggagccccacaaatattgaccctgttcatcgaatgattcaatacccaaacaaacccattactttcttcttgtccagaaacacttctggctttctctatttccttctcctgcttccctaggtgtcatttgcatatagagcacaccaggttgttcgctcacttattttaactcaactcatccgcacctacctgcagcccatggcgaccatccaagacaggcagtggacagagtgagtgccgtcgcgtattttctccgataggcattcattcggccttaaccctaacgttgctatctcccaatacagagagtactctggcctattgaccaacctgtatgtcgctctcgcagtcacaggtatgcccttttgcttaagtggatagtacagcatatctagtctgatcatatcaagcctaatatcctccctttctccatcccaggcatatgcgggcttagtacagagatcatgaggggacggagaaggcgtcgtggtagactagggaaagatgatcgatctgggaacatttccagcagagacagctgggagtttggatagtaagtctctctcggtccatccttcctttctattcgtgttttccgattctctgacttgtttgagctttctctgccttgctcctcaccagcctgtaccaggctagagcatggtccaagattccgtccccgatgcatccaaggggtcctctcatgtcgctctggcaagcccacaagtttccagaggatagactgcccgcacttatcggcatggatcataccgttcatgttcgatttctccgtgcttgctgttagtcaagattctatctttcaattcagatccccttggcattaggttgacaattactatttttctctaaaattcacagtctacttcctgttgattcatattctcacaaccctacctatcctcctcccgtatgttttcccttttgatgatctagagcgtgtacaattctcatcgactgattcttctccctttactctttaattcttttgcgcgtactgttcctttcttcctctctttgtcgcccacctgtgctcgcttaataggattcacttggtgtatgctccttccaacgtctcacgaacgagtatgctcagagcgtcgctttccagtctgatcttaagcgtgaccgctcaaaagtatctctgggttcatttgagcattttgctttggcttatggtcacttgggtcgctattcttctctggttttcctggggttgtcttagatgtaagcctttgtccttgcctttgtttcttcttttctccttcttcttcttcttcttcttctcgtctctctacatggtgcaaatactgatcggtgtttggctggctttaattcaatcacagaccgaaggatcaacatcgaagccgatcttcaagcagctgaacgatccgcctatccaccaaagtctccttcctgttctcccccatcggttccaagttacgatggcaataacatgagccagacagatcctacgacctccatcgcaccggacctgtccgcccagtccctccaccccacccggtctgttctacaatctgacatgtatttttccgcgccgctcgtcacaccagatcaaaaattgatagaaaatcttggtccgaggggttggcgattccgaacgctcatggtatctaacgttccacccgatatgagagatccagaggtactccggacgtactttcaacaggggctcgaccggaacgatatacttgtcaatagaagtaaccagagggtgtccttttttggcaccgatcccgctcaagcgacctgttctctcgatattgaacggcggctggtagaagaacaagaagcagaacctatcaccgaggtcgtcattgtccgtcggcttctcgagctagagaaactcagagagagaagggcggacgtattgaaacggttagaagaagcgcatgtcaagttgattaacaacgtcatgacagcggtcatcaaggagctcaaagggtcggcttggaacggtcgttggctcggtcgtcacttcggtggcgtacccctgtggatacctcatcagacggctgagattgggggtaaatacaagccggaagggcataacgaaaagagagcggacgaggttgccgatctaccctctatagagaagggtaattcaaagaaatatgatgtagacagagaggacgaagtcgagggaatggacgaacgggaaaggctaaactttctggttgagaagcttcggaggttcgttgacgaagctgaggaccagactgaaagctcacaaggtagaacatctggctcaatggagaatctgaatgaccagtcgtccggtttgcaagaggagagagagggggaggaaaaggaggaaaacatgccgacgatttgggaagtaagtttcaaagtcatgtctccatcagttgtttttgttttgtccttgatagtccgattgatctgaatcgtcttaattcttatcgttacatctcaggttctccactctcttccgcgttccctgttggatccatatcaaccactttactattcctcgttaaccgcctatgcgcttagaaagcacaatccaccgttgataaactatctgactcccaaactcggtctgctttcctctctcatcgaggaacaccgatctcaaccgatagacactttttctgccgcatctaccgctttcgttacgtttagaagcccagaacttgccagaggagtgttgaaaaagatgaagagtcatccaaagagagcattagcttgtaatcttagtccggcgccggattacagagacctcgaatgggtcagtaccatctttcttcttttttaattctagtcgtcctggcgcatttctttctttctctttttccgtgtatcctatctccgtttttactaaataatagcttggactgtctgtttggtttgatgacttccgtaaaaactctatgatctagcttcggctcatgacggcgaggtacaggacagagtacgtcaagggctgggttgtagctatcggaggtaggtgttaatcctctttttctaggttaatagttgatagctgattacagatcttgttatcgtttatttcctttctgtcggttcaacgtgattctagtctgggccttcatcatcttctggatcgtgagtcattttgctttctcctctgtttcatacatggtctctggttgtcgttctatcaactgccaaaacaattctgacgaaacgatggaacaatttctacaacagattcctatcactctcttcgccggtctggtttcagtgaaaaacatagcaacaattattcctcatctccaagatgtcctggataaataccccaaagcggcaacgatcatcacctcgcttctaccaacgctgcttgtctccgggttgacgttgttgatcccattgttattgttcttaatctcgaggaacgcggagacgatcgtgacaaagtctcaaatgcacaacattatgctttctagatattatcggttagtctttgtggtttcgcattttgattcaacaattgattgcaactgatttctcctcacctttcttgtcgttctcttcctttgggggtttatttaggttcctgatgtgtaacgttgtgatcttgtgagtgactacttgaaagtcagcgcatttatctgatcaacattgactcgtgacgacctctagcttttgcgtcggagtggcttcccttgaagcattcgttacgtccttccgaaagaatttcacgcccatcaacctcctgcgtgtcatcgcttctactttcccccaagctgccccgttcttcgcgggctggttgatcgtacagacagcgttgcattcgatgattgaatacatgttgcttggtctaccattgatcacttactttgggcttaggaaagctcaggtgcccagaagaagaagctctggtacagaacctagattcttcagtatgtcttcttcttctttccatctatctattcttccctggaccgggtttgatagactctaacaacgctaacaatttgaccttccttgtttcccttttctcaccaaaaggcgacgcgtattggaaacccctccatatcctgtaagttagcgcaaagaaaagctggagattagtctgcgagctgctttgcttatcatctggttgaaaccatcccactggattatcttcaagctgtctttcaattaccgttctctttgctatcctgtaagctcttcgtctggtgatttgtactggtagtttttgtcatcagtacctgccttcctgacacagcccgagcccgaaatcgttctatctctcgatgctagcaacccgttggtgttgccttttggtttcgtctattttgctgtagccttgcccatctttaagaaccagatgatccatgtgtatcaggtgagtcgcttcctttcttttcttatccaatgaacctattcttcttttgttcagtggcagactgatttcatcttctccatgtacatccattgtcttcgtcggaactggctcgccccttttcctatcctgaaagcatcaatacgagacccagggtcagaggccagtcatccgattcgttcggtacacattggacggtcatgcttgtaagttgtatcattttggaactctcgctttttatgtttatcttcatatcgactattgaggttatatttcgaatattggagatgttttgactgatatgtatgttcttgttgtctttgaaaattcagtggctcaagtgagtttcatcattcactcatcgattcttcatccaattcactgagatgtcttctttgtgtccgggtacagattgtgttcatggccatgatggtcatcctgaagaagagcgcgtatgttctcattcatttatttatttatttttaatcgtggtcattttcagcgttttcttgattcaggtctgacaatcttgtcgtggtatcccgacaatcttttcctgcccatgttcttatagtctcattgggttgacatgtgttttgattgtgatcacgcttgcgtcaaaaattatgttcgtttcgttttttttctcaatcccttgcttttctgtgctattcatttcaacacgacatactgagcgatcttcattggttatttcctgggacgtaaaatgcgattgatagattgacaagagccctcaagagtcgattcagagtgctcagaatctcggaggcagaaggattacaccatgtgtcccaagggtatccattaccttgtgttccatccaggatttctcttgagacttcaccctactcggcaactcccgttgctggtaatgctcttacaccggctcctgtcactgcctcgaacaacggcgggaacgagaacgatggaacttacacctatcctccttccgccgcaagcgctccggatagactgggctttgtaccagacaataatcctcccaacccgctgaccggacggaatgtgtctactcttccatcgcgtggctcggtccttctaccgttccctctagccaggaagccacttccattcgaaatgtcttcgattagacgatcagctccttggacggaacgtgtcctctctgtgccttcccgattgctgatcgcaccaatcctttcccgattcgatgctcattattcgggcgaaatcgggaacggtaagagaaatgcgaattattcggaaagcgatggaaacagggagccttcatcccattcttcaaatcgtgtctcgaccgattcgggctgtcagtctggtgttcctccaagcggaaacaacaaacaagaatcaaagataagggaggtgaaaaaagacaaacctgacaatgaggttgatcaaggtgcagacgtccggacacgaccagctctcaaagtcacccctcgagctggcccgcttccttggactgaccgtcctatcgactcgagactctacggatatcaaccttcctattcaagaccactggaaactttgttgtggttacctagacatccgctccgaacgcttgatttagatgataccgtcgagagtgagttccgtacctcttcttcagttcaggtcaataaatcactgctcatcgttgagcataatttttctctctcttcttgatgataaagtcaaccaagcattcgagagttcacacggtggctccggccatctaggcatatgggctatgaatgaaaatggggagttctgcccaacgatcatcgaagaacgagacgagattattgaggagatttctgccgtcatcaaacaacacctagacgacgatgaagccgaagaagaaatggagttgggccgaaaggtatccgttcggtcaaacacagggatgaacgcttcgtatagcccgccgtctccttcaggagtagcttcgtctccgacatcgagagaactgaatgctcttcctgtctcgccaacagctctcctgtccattccaagcgtcacttttagtaatgaaccacaaagtccgacccgcccgggcccgatgtcaagcccgaagatttcgcccattcggttcaacagagctagagccagaacgttgcacatacctagacgaaagacgagtacttcttctagtcatagacctatccgacacttttcactttcgaggaccacgaacgcggctccgtcggatgatgtgtttaccacgactggttctccccaacgatctaccgatcatcgaggtcgatcaaacagtcagcgtagtgggtcgagagaggatgtattgcagttgatcgcgaaggaagagttagcggcttcccgtagagatcgggtacgtactcttcattctgcttggagacggtattcggatcattggccatttcggtcagttcgtttattgacctatcctcttctctacttggttttaattggtgtctgttacaggcggaggctagcgcgattgtggagctcgaacgcagtaaaactcattctcgtgtcttgcgacgtcttggtcttgtcaacgccggcaacgattagaagtacatggactctcgttgatcgttaatccattctctttacgctgttcttgtttcttaaatctcgcaacgtatagtatcgctcttaccctccggaaatcgttcacatttttcacgcctttttgtgtagtttcattcatctttttatccatacagtcaaacttttcccatcgacacatatacatacacaccaaatcatgttgtacgcttcgaagctaccttatagtttattgactctatccacgtccaacccatacatacaagccccatagagtggccccaattttcatccatctgcctccttccaatctctctagatcatttatttactcttcatcctcattcttgatgaatgaaggtggacaatgacgagtgattatcgttgtgagatttctcgaacgatgcatctgacgcaggtataaatctagatgtgactgatctcgataacgctcgacaaacggaagaaaggagataggactgacaggacaggacaaatttgttctcccaccccgaaagcttgtctcatctgtggttgacctagacttttcatgcactctactccttggaacatcaacctgtatcctatttctagcctgacctgcctctttctatcgtcttcaagcatcctttctaggttctcttacgatgaacatgctcacagacaccacacgtacaactacccctgctcgtacggctagccactctaggtctatctctaccgtggggacgcctggtcagagtcgaaaatctacaccatcaatcaggtcaaaacgtcctgtcaagccaagcgcgtctaagaaagagagaaccgtcaagcgtccgaagacaccattaggaagagatggaaagaaacttgaagagatcgatgagaccgaaagtagggaaggtgatgaggataacgagagtgagagtgagagtgaaggatctcaagtcgaagtgcgcatacaaccctcttcttctttttctctcatttgctctcaaactggtattttgactaatatgatttgacgtgataccatactagacgaccctggttgtatgtaacgctcattcgaaggtggccgctgcatacatcgatctagtgacagacaagctctatataatggaagatgtcaccgactcttctcatttcgatacaatcgatcttggtaaagaaactgtgtatcttatcatttaactctagattaagttaactagaggggtttctttacgggtttcatgaatctagtactccatcaaatacatcctcagatgatccttgtaaattctggcgcggaagacgtgttagtcgagcagctcaaggcgtacgctatcgcgcaaaatgttaagtttgagatccaaccacagaaaggcaagttttcagaatttgcgcttgattgaagtgataatgtctgacgatttatcatctctgggtcggtggttgcggtttgatcgcgccttttccagattttcaatacattaaatcgaagaacaaactcatctcgctaagtcttcctagctcgatcatgcgcgcaacatcccaaaacagatctctctctccagaaaatgtgtttccagaaaaccccgaaagttacaccttttctcacgggggtgaccaagtcgatgatgacatggaatatgatcataggtcgaagcggatggagcttgtcttggcgggtatgttggatttcggaaagactctttcggtgagttcaaccatgcaattgttttcttatcccatgtaagccatgccttcaattgacaaggtaggtatcaacatatgattttagatctcagcttgtggcgctctgttgacatggatggccaaaaaaagagctatcggtgaccttccacgagaggacaatggttccataagcgttagcggtatcgagacagttacaccgtctgtcttgacaatctttctacttctgttttttatgagtatttaaccatgatatctgttatatctgcctttttttttactccagagtcgagtttatgcagatcagtgctgatactctctcgtaagaacatgtgatctcttcaagcgcgcattcatgcgtcatctaatcaaggagcgattctcttcatttcatgaacagatctctggggatatttgagcatgagtcccacgcatacactcactcctctgcaactaaagaaggtctatctctctatggtaagtgaatatgtctggctctgtactggatgatctgttcatgagagttctgaacatgcgcagatacatgctttgattttatttgtcagccatcttgaatacgacatacacgcctcttggacaaaagcttcttcaatcgtggcttctacgcccgttattgtcactgaaagatatcaaagcgcgtcatgatgctgtgggggtttttcatcacccagaaaacaccgtaggtgtagatgggatcaagggccttctgaaaggaatgggtaacgtgctggcgatcttgaaacggatgaggcaaggcatcacgaagtggaaggattggaagctcttgcttgaggtgagcgcacttgatgattctgaaaaatgaaaagatgccccctgatcgagaatctggttttgcacagttttgcttcaaagcggttcaattgagtaagttcaactgatgacatgattgtgtttctacgctatataactgaatcttaatctatttgtcctttctatgtatctttattaggagagggttgtttggcgctcgtgggttctcattcgaagaatatcctgaagctggtatgatcgattctatcccagagcatgattgttcgaacgggatttactcacgcgctacaggttatgtaggtcaaagaaagcctcgacacagagttgttctcttctatcggctcgaggctcaacgaagtcgtatgtaacaagagtcttgacggcgatatcataccttttgttaataattgctcacaaatatttcttcatctgagaaagattgattgggacgaaactatcaacatcggtggagatagagtatgttgtaaaggaggtttggacgctgagctagacgactggaagcatcagtatgctggattggattcgttcttggtacgtatccttctcacatcaatcaaaccatccagatcaagcataaacttcttgacgcctgcgtttaccgcaatactttgctctcatcggttgcccatagatgcaagtggccaaaacgttaggccaagatcttgatcgacagattgtcaagaattttcatgtgacctattttccacagctaggatttcaggttgctgtaaacttggtcaggccttgggaccctgatggtgaagaatccaaagtgttagctgattgggagtaccaggttcgccgctactatgacatctgctgtgcggataatccaactcaaatgatttgcctaatttgtcacagttcttcacagagtgagcctaggctggcgcaggacgactgtgttgagatttaagctgacctccgttcgtctatggcatcagtgagagatactattttaaaacaccacaggtaagtcgttcgcatcgaaatatacatcttgtgctcaggtattgacattggtactcaaccttggattcttttccagatgcgcgaccttgacagccactttggggatattgatagcaagattgctgaccgtgagggtgggtatttaggcttgatcggattttctcctcctactgtctattaaattgacgctataggaaattctcttttccagtcgagattttatttgatctggcggaatttgttcttgaaagctcatctttgatcgagaaggccgtacagtgttgctcagagctggattggtgagatacttggacaatatgtcatccatcacaggatcatttactatctcttcattttgatcccagttgtatcgcttttgcgtcagctgcgacaactttcgagcttaagcgcccgaccatgacggaagagaatattcttgagatcaaggacggaaggtatgtaggcccgaatgatcttcctcgatatgacgtactcgaccgttctgatggagctcgaattttgaacaggcatcccctgcaagttagttgatggtgtttccactcaaattcgatgaatcgcatgttcaaagtctgagaggttatatgtaaattcaaaaggagcttgtcgaagacaattttgtcccaaactcgacccttctttgtggaggccgtggattcgattggcaaacgaaaccgctgaatgatatagactcggacgaggatattctgaagagtgtcatgattctaacaggcccaaatgctagtaagtgtgacatttcctgaggtctggcaaagcatttgaaagctgatcatttcacaccgtaggtgggaagtcaatctatgcaaaatcagttgccctgatcacatacatgtacgttcgttgaacactctgtctacgacaggaacctttgttgatgccgttaatgatggtttttacagggctcatatcggatggtaagactttctcgcttccgtctcaagaacctgcattgatatgtattcggctcgagatgacaatttctctttagttttgtgccctgccgagaggcgactatcggtctctgcgacaagagtaagtgatgcttgagcgctttgtaacttgatctcgacctcattttgtgtttcacgacatctagtcttcacccgactatcgaccaaagagagcgtgtccaaggtatgctcatttatgttatcatatcaagagtcctttctcggaaatatgttgaagcaccatttcttgatccatctctatgcagctgcaatcgtcgttcatgattgatctatctcagataagttatgcgcttcgcaattcgaccgctcggagtttgatcatcgcagacgagtgagcgcgcttcgctttttatgatgaaaatcacacacgatagcttacacccttcttctatttcaggtttgggaaaggaacagtttcaaccgatggggcaggccttctggctggagtcatcatgcatctacttaaccgaggtcaagcctgtccaaaaacaatcatcacgacacattttcacgaactgttcaccaacaagctcttgcctgcaaaccttccagtattgtttgcttcgatggtcagtatgatgtgattcgagcagtctgaatgcacggagaggttgagtatcttcctttcgctttcaacacaggatgtgatcgtccaggacgatattgatgatcgacggacacataaaccaatcacctacctttatcggtaggaaaattcattagtcgaccaaaacgcaagttttgcgcgcaaatcttgacgtcgtgtttctcttgtttttttttccttgctctgcttctgttcagtttgactcctacactatgcttgaagtcatacgctgcagattgcgcacaatctcaaggaattccgctgaaggtgatcgagagaactagacaagtggagtaagaactagttgccttcactgaccaaccatgtgaacgagcaagtcgttgattattagaaagtctgttcttggaacttctagggcatatatctcccgatttgaatatctccctcttcaaacgctgatgttcgagccacaagagaaagcgtatgtgttctatgtcaattcaacccaagagcgatctgtgtgaaccaagctgagtggaagaatgatgtgcttgtcgctttctctgtctgtctctctactcaattctaagtgacctggttgccgcagaaggttgttgtcgagcgtttctcgagttggacattgatcaagcggtcgagagcggagttgacctcagagaaagactgaaggagatactggcaacggatgagagcaatcatctcagcgaggatgcagcggacggcacgagtggcaactaggcgcgggtgtgtgtgtcgttaggattacgtgtttgcatggtaagaacaaatggagacggacgtttacgtaatcaacgacccacacgcgcggaaagaaagcactagaaacgactagagaagaaaactagagaactgactagagaacactacaaaatcttgagagagcacgatgagatcaccacagcggggccgcatgtgccgtcgaagatgcgagaaacatctaccgcagaaagaaagaaagaaagaaagaaaaaaaagtctccccgaaaaagttcataaagccaacgctgttggatttcctgtgtttctcctcttttatcttttcttccatcacccggattgtaccagttcatccaccccattctattaaacaacaaataaacccttttcatatctatgtaggtgtcttccttcgattggctttctttcctggcttcactcccgctgccttttcgagtcgataatctcaccatctttttttcccttctttttcgcctctccaccctagaactaatcatgtctgccggaaaaggttggtttattctctcttttcctttgttcgccgtggcgacaccgcgctgaccatcttttgtccttcacattcactcagctatcggaatcgatctcggaaccacttactcctgtgtcggagtgtggcagaacgaccgagtcgagatcattggtaggtttccatactactatctgactcccctctaagagcgcatatctaactatccccaaactacatcagccaacgaccagggaaaccgaaccaccccttcttacgtcgctttcaccgactctgagcgattgatcggagatgccgccaagaatcaggtcgccatgaacccgtatgtttcgttgatttacattattccattctgaatgtatcaataactaatctcttcgcatttttctcatttagcaccaactccatctttgacgccaagcgattgatcggacgaaagttcgaggactctgaggtccagtccgacatgaagcactggcctttcaaggtcatctccaaggagggaaagcccgttgtccagatccagtacaagggagaggaccgaactttcacccctgaggaggtttccgccatgatccttaccaagatgaaggacactgctgaggcttacctcggaaccactgtcaccaacgctgtcgtcactgttcctgcttgtgagtcaatcctccatctttttacatcttgactcctttgcttactccggttctctttcgatcaaacagacttcaacgactcccagcgacaggctaccaaggatgccggagtcatcgccggacttaacgttctccgaatcatcaacgagcctaccgccgccgccatcgcttacggtcttgacaagaaggtcatcggtgagaagaacgttctcatcttcgatcttggaggaggaaccttcgatgtctcccttcttaccatcgaggagggtatcttcgaggtcaagtccactgccggagacacccacttgggaggagaggacttcgataaccgacttgtcaaccacttcgtccaggagttcaagcgaaagaacaagaaggacatcaccggaaacccccgagctcttcgacgactccgaaccgcctgtgagcgagctaagcgaaccctctcttctgccgcccagaccaccatcgagatcgactccctcttcgacggaattgacttctacacttccctcactcgagctcgattcgaggagctctgccaggatctcttccgaggaaccatggatcccgtcgagaaggtcctgaaggatgccaagatggacaagtccactgtccacgagattgtcctcgtcggaggatccactcgaatccccaagatccagaagcttgtctctgacttcttctccggaaaggagcccaacaagtccattaaccctgatgaggctgttgcttacggagccgccgtccaggccgccattctctctggagatacctctgagaagacccaggacttgctcctcctcgatgttgcccctctttccactggtattgagaccgctggaggtgttttcactgctttgatcaagcgaaacaccaccgttcctaccaagaagtccgagatcttctccacttacgctgacaaccagcccggagttcttatccaggtcttcgagggagagcgagcccgaactaaggacaacaacttgctcggaaagttcgagctttctggtatcccccctgcgccccgaggagttccccagatcgaggtcaccttcgacattgatgccaactctatcttgaacgtctctgctgccgacaagaccaccggaaagtccaacaagatcaccatcaccaacgataagggacgactctccaaggaggacattgagcgaatggtctccgaggctgagaagtacaaggacgaggatgatgccgccgctgagcgaatcaccacccgaaacgccctcgagtcgtacacctacaacctccgaaacaccctccaggacgataagctcgccgacaagtgggatggtgaggacaagaccaccctccagaccgctgttgacgaggccatcagctggctcgatgcctctgctgaggcttccaaggaggagtacgaggagcgacagaaggagctcgaggccgttgccaaccccatcatgacccgagtctacggtgctggaggtgcccctggaggagcccctggagctcccccgcccgctgcttctgatgatggaccttccgtcgaggaggttgattaaacgatctaccctctcctggatttaaagactgataaatataattcccactagaccagtgtctatgtccctttttactctgtcttttaatttctctccttcgtcttttgttactctcacgacctctcgttgttcctttaaccttgttctattcaaaaatcctcacgcaccatgtgtccctagtacttgcattagtttcccgttctcctgtttttttccagagcttccaattacaattgaatggttgccttataataacactttgagatctatcacaacatgagtaacatgagcaagcatcctgatcaaagcacttcctccctccatgtttttattttattttcttcctgcttctccaatcgtctcacatgaattggctcctctttctgattcgaactgcagagacgctggacaaataagcacaagactgtgtgatgtatcttcttcagtggtctctttctttgaacaccctcttctcttttgctgcacatctctcgacttataaaattcaatctcatactttgttcattcgttcactctaagaaatcaagaaaagactggaagattcctcttcttctgtgtgatcctggtcatgcgagaaatcaaagtacgtcatctatctgtgatgggtcggccgaacctaatgctgggatgctcctccgctctgaagttatcgaaaccaacaggccgaaccatcaacgaataaaaaaaagaagaagaaaaagaaagaaacagaaaggaaaaaaatagacaaaatgatcatcagatattgaaggcaatagagtgacaaggagatatgacggaagacgaaccatgacggcctccaactctgcttcttcgatcttcaaggagcccaaccagaactttctcggtgacagcatatcgtcctcataatcaaactttccagaagatgccgcctttttttttggtgtgggcgaagatggggatgatgatgatggcgatgacgaggaagaagaggatagggatttgaggaacggagattcggagagaagagcaggaggagcctgagagtgaggtttgggagtagaagaatctgatggtagattaaagcgcatatgagtgaatgtcagatcaagagaataacatcagccagccaagctgatagagaacagtaggaagcaagagacagagagaagaagaaagaaggaaggccaaaggagggcaaaggaagaatccaatgaaaggattcgtattaaacgagaagtccagtgaagagaaatggtcccaagacttacgtccagcccatcggtcaccgtttccgatgaacttgatagaaggcgttcgctgccattgagcgagtagtctaagagaggatcgcatgctgaaagtgtttgggtgggagtcgatgaaagcagggagaaggatgggataggattcagaaggtgagtgcgaaagaagcgaacgtaaccaattcgtagccacggaaactgccgggccggaaggtcttacccgaaaagacccgatgagggccgatatagcttatcacgtgtttgttacggccatcatagacacagcctggccatccctcgtctgactctcattaatctaaaagcagcaacatcagcagcacacacagccatacacatactacaagaacagagacaactgcagaagagatgttgagtggtcaagctagaaagcgtacaggaaagaaagtgcagaaagatgacacgcctgtagatgaacaaggtatgtttctttgtcgaacagtgaagttcgatcaaggagttgtggaaactagcttaagccttctgcactctttatctatatacatcttcacagagcaagaagagatcattgagggtcttcgggaggccgcgctcgtatccaatataacaaccaggactctactcattgttctcgttggactttctaccttggtgtgagtttcgctgcaagctctttccccttcctcggctacatccgtatcgctcatcacgcaaacctctctctatcatcagccacatcattcatttctcacccttgatgtcatccactccgcctagcctgttccttctcattcaaacgatcttcccgttgttgatctctctaatttctatcccactctctacatcgtacacattccaactaggaaatctagcagccgcgtttttccctgctgtatccaaacagttattcacacacgagtccgtcagtctgtgggactttctgactcccattctcgtcggtatagtctggagagcaaacatttggatgtcagagatcctgaagaacgtggaagaaatggaagggaagaagtacaagctgaagggcgcttagaacgagatttgatgaaaccttgcgcgcgtctcttttcaatttgtcaaagacgcgaccaaaaatgagttttcctttcacgtacatccatcaatcttcgaaatctcacatacacacatacacacaaaacacaaatggccagactagtgaataaggtgtcccgaatagaatcagaggaagaagacgagctggaagatgatgaagaggcagatatcgatgaggtcgacgagatcggggatgaagaggatgatgtttcttctattcccgtccgtccggctcgaggtcgacccggagcaacctcttcttccgttcgtgtctcttgtctttctccaactctttttctcctcctgttcgatgtttaagtcgcatggacagtttgatgtatgagcaaagctgacaacagattccatggacccctcagttgagcgacgtagatggtatgatcttctagttgctctctttctccctatcctcctttgacttcctttatctaatcatctcttgtttctttgttcttcctgcgaacgcctgatcattgctctcttgagatacagcaaagaaatcagatccagaagaagacatgatcattgtcgaaaaacagcaagactcttcggacgacgaggacgaggatgatgatgaggagcttgatgaggaggacgaggaggaagaagacgaggaggaagacgaggaagaagtagaagaagaagatgagctcttagaggaagaagacgaagagcttgagtacgaagaagacaaagatggtacaggaaacatttcttctgcctcctcgacaacatcctcgtccgcttcgggtagaaaagcaccctctacgacatccacaggagcacctttctcggaatcagggacaatcaacgggtctaccagcaaagcaggatcaagcaaaggcggaccagtgaagatcaagttaatgctcggtaatcgagccgtcggtagcagcagtggctccggggcgggtacatcaaacagaacgtccagatcaagacgaaagttgaagggttcgtctcttgctcaaatttagtgtgaatgagaaagaagagaaaagcgtgcagctgaaatcaaagtccatgactgtgtagacccaggatcttcagattcaagcgcagatgaactaggtcagagccggacaaaggatttctcaaagatgactgctcgtcagcgggctgctcaaggcaaagagttctatgagccattgttggtgttggaagaaggtctatccctttccgccctctctttgttcttgtgtccaatcttgcacaaatttctgacatgtgctctgttgagccctccattttgttcaggttcgaaagcacttcagctaacggcagctgaaaaggaagcaaagaaggcagagaccgctcgtcgacgaaaaaatcagagcgagaaaaagctggaggatgacaaggtatgcctctcttttccaccttgttgctataatcaaggtctccaataaaactccttttctcacattttgctatctctcttcacgttacaatatatcagatcgaaacggtcaatagactactcaaggcccaatcttctcgatcaagaggcaaagcctccgccgttcttctctctacctctgcctctggtcctgcgaatccaaacccagcagacggtacgaattcatctgaccaacatgcctctgggatccatacacccgcaccgcctcttcccacagcgtttaggacaattcagtcgataaagtctggcgcatacgagatcactctgtccgcacccctcaatcctgcattcatggccaagcttgccaaaccaattgatcgggaaaacaaaagaaaacaaggaccaaagccggtgtgttcggttgaggattgtgggaaggagagaaagtatagatgtgtaggcggggaagacgcgttcgagttgggtggttgtgggctggatcatcttagaactgtacagcggacaagaatagagaccggaattctttagtttagctatgctcttcctcgtgttgtatctatgaaaacatttcaatttttggcgtatgtagtgtgtgcgtttgtgattcttgtcggcctcgtccttgaccgataaaaggttgagtggacaacgtggggagatgaaacagttggaaattatacggactgttttcttctgttttcatctcctgctttctcctcattctttgacctccaccctcgttcatccttggtatatagacagaggatgtacatcccatcgccttctattcttcttccttttctctcttacattcatcaaactcccttcagcccatcccacaatacagatacagcatccatcatggccacccaccatcaagctcaagcaccggccaaacccgatcacgcgacgttctcaaactatcttgacgttctcacgactcattttgacttggactgggaaatcaactggaaagatcaaatcattgggggacatgtactcctagagatggtcgtcttgaaacaggatggagtattggatgaagtcagactggatactagagatgtctctgttggggatatagaggttgacggggtttctatcaaggtgtgtgtaatcgctcgttcctatatatcttctctcgtcgctgatttcccaatatgatgaatgagagctgttctgaggactaacacttccgctcggtttgtccttcttcgttccgatcaattggtcgatcaatgaaataggactacaaattcggtgaacggcacgatgccttcggttctgtccttcatattccaattcccaagaccatgaaatacatcaaggacgacaaactgtccgtcaaagtgacttattcgactaccaaaaactgctcagccttaggatggctcactgctgaacaaacttcaggaggaaagcatccttacctgtattctcagagtcaggctattcatgcaagatcattgtttccttgtcaggatacaccgtctgtcaagtcgtacgtctcttcatctgagaaagccctttcctaatgatagcatcttctccgcgccactgttgacatcttgttcgagggtggctgtatcgctataggacgtactctgccactgtcaaatctactctacctgtccttctctccgcttctcgaatctccccgcggccagaagaacctatcgaaccaggcaaagatctcatcgtcttcaagttcaaccagcctatcaagatccctgcttatctagtagctattgccagtggaaacctcgcctacaaggctttcaaaggagggagggaaggagagaagggctggtccacgggagtgtggactgagccagagaatctagatgctgctcattgggaattttcagaagataccgcgaagtaaatccttgagttgtctcttgttccctttcaatagaaggggtcacgtctcgttgacgataaacaattgttttgatacagcttcgtgaaagcggcggaaaagttgacaggaagaccttatgtctggggatcgtatgatgtgttgctccttcctcccgccttcccctacggtatgcattcgttccctagttctaaaacgaagtaattgaacatgattactgaggtactcaagggcttctgacacttgtaaaataatcaggtggaatggaaaaccctcagatcgtacgttctttctatgtcccgtctgacgcgttcttgattcttatgcgaagccggacctgactcaagtcaacatgcttgtctctcatccgggctgattggggaatagaccttcgccactcctacgcttcttgcgggtgatagatctcttgtggatgtaattgcccacgagatttctcattcttggttcggcaacgaaattggtttgtattcttctctgttcatgttcaattccagatgcgttggtctaatcataatgtgtttttattaataggatgtgccgactggtctcatttctggttgaacgagggcttcactagtcagtttctctttttcttgccttctatttatgtgcttaactcggccttcctcttgttcttcgcagcctatctcgaacgattgatcatgcaagaggttcacggacccgcagctaggggtctctcgtacatcattggaaagaaggcgatggatgactcgttaaaggaatatgaggaagcgaagttgccgagattccagcgattggtggttgattaccatgatggggaagatccagagtcagttcaatctctcaacaaagaaagacgttcacatagagaaaactgacggttaaagattgaattggggattcttacgttttggcaatgattaaagtgatgcattttcaagcattccttacaacgttcgtttcagactaagaattgtctatctggagcaacttttatctgaacaaaatatttttgcgcatcacagaaaggagcgaatttcttgctctaccttggtgagggtttttctttcagcgtccctctcttcttaatctaacacaacgcatgtcatccgaatcactagaacaaactatgggtggactcgacgccttcttaccttatatccattcgtatgtcgatacgtttgccggtctatcgatttcgaccgagcaatggagagaacatctctatgcgttctggaagaaacatgggggacatcaggccatcgagaagtgagtttttgctttaaaatcaaggttaagtggctgttgagaacaggcgctaaaattcaggtggaacattttctccggaaaataaggctggatgcggtggattgggatggatggttaaacggtgaaggattgaagttgcctgttgccattgaagatacctacgacactagccttgccgatctcgtatgtttctgcttcatctgtcttcgcttcacttcacatctcgttcctgtacagatggaagccatgctgatcaagaacttctttcgaccattcaaaaaggcttttgacctggcagcccgatgggaacacgccggatcagatccagccaagctatccgaattcaaaaagtctgacatcgagaagtttgaaggagatcagacggttgtgtttttggagaagctgcagtccggaaagaaaccgatgggtgtcgaggcggtaaggaggttggatgaggtgtatggactgtcgaaggctggcaatgccgagttgtcctctaggttctttgaggtatgtggtcttcttgtcttgtcaattgatcagtcgcttatagaatatccgttctccttctggggaattttagattgctctggcttcgggggatgaatacgccaaagacgcagctcactgggttactgataaagggcgaatgaaattctgccggtacgtcttttcctctcaaatggatttccttcggctgcacatttctagtcttataccttcttaaccttgtctgacctttctgtgcaatacattcaacgaaaaagaacgatctacagggctctattcaaagtgacgcccgagttggctatcaagactttcaaagcacatagtggattctaccgttcgtcctgttgttcttcgcttagtgtttcttctaaaccctttggtcttgtagaagacaatacttgaggttcattcagttcttttttcttctcgatctagaccctatcgctcgacgaatgattgagaaggttggttttatctctttctttctcggctctcctttgatgtatctgctgactcatgttctttgtttctgaatcttttgatatctctcaggacttgggattgcttgcttgagcatgggagtgagagtaacacaattggaaacgaagttattcaatgggatattatacaatgaatgttgaatctgatggcgttcacttggccgataataatgacagatatgatgaaatgagaaagttatagagggactcacccagtacatcacctgtctactttattaccgccgatcttttggttctgtatggatgtaaaacttcgaaggatgctagaaccagcgagccttcctgtgataagagtaaaaaagagagagggtagatctggtgagtgaagtcgatcagtgaatttatcacgaggcgattatctgaactgtatagatcactagttgagtcattcacacggtaagtagtcgattgatcctgaatttggacaaaataggacacatgcgcgctcatcgcacacctctcttgacccctcgtttgaattattgattcttgttcatgttcagtctagaatgagaagacgaacacgagagaattacctttgatacaagatcgcatgaagaagagataaccaaaaaaagatcaaggggaactgagcaggtatctccctcatgttaggacgtctatgttcctctctgaacctcacaagccataagtgagaaataaactagatttcttttccgatagtttcctctgttggccgaacctcttctcctctctccttttttccacgtggtattgtttcgttaaaagtcccatatatctttatgacacctttccttctcatttcctcacgagatataaaatgacaaagtatcgccaagttccaaaaacattcccaaaaatccaaaataggaaaccgtttgttctgattgctttaatgcttgtttgtttttggatgggtgggattatatgagaccaggcagaaccacaaagacaaggcccaacaccgaaagaaacaagaaacagaagaagcctctgaaggaataaaaacttacaaaaattctctctttttgcttcttgaaatacatcctatttggttgtttctagggccgtttgtccgccaaccattctctgtttaagatggaggaagaagcaggcattagtttgagggtcgagttgtgatgagatgttttcgtatacaactttatatacgtacttgaacaaagagtcgactcctcggaagaggacttgttggggaagcgctcggatgacttcaaaaggagatatcgatgaagtgtcagtatccgaatctcatttgttatctgtttcatgaggaaaattagacaaggaaagacttactctccgccactcgatcatttaccgtttctgttggtactcccgctttaacagccatctcaactgccatcttcaaaactgccgagacagctgtactaacactctgacccatcgcactacttgctgctgagcttgttggagtcgacggattgaccactcgaagtagaatatctgatattcgatccatttcgacaaggtgaagctttacaaatcgacgtctctctcgagcggtaccaacggtagagttggtagcccaggagtctagactagagtggatagtaggggcgagtggagcctaacaacgccgataatgaatcagggtcaggatcaagtacagttcttgctctggatacaagaaaaagagaaggatactcgcttcttcgggatctaagacttcgaacttatgtcctctccaatcctttgcatgtcccttcgaacttggaccaaacgtgtccaataggaactcttcagctttaccagctttgacccacttcggttcgctcaaaggtttttcttggtcgaggtaggcgattaatttgaaagtgtctgtcttcaaagtagggaattgagccgattgaggcgagtcgggggaaattaatttgtgaatcggctagattgaataaagtcgagaaacaattaggtcggatcaaacaggcaaaaagggatagcaagaggtttgaacggaagcgtacaggtgtccaaccagcgcaaggatcctctacttcatcccacatatcttccaacgtatccaaaacgacaggctggaagtggtccgtttcttcctccaacaattccatctttgaccaaaaacattgaagagcagttagtgacaaaacctcaacagttatcaaacacttcttgatgtaaaaggacacaccaagataccccgacagatatcccaaacccgatcatctttcggctcttctaccttcaaaccgttctctgatggtttctcggccgccgtgtcatccacaagcgcaggagttgacttttcttccttgaccggttcggtaggttgctcgttcttctcaacaacctccgttttaacttcagccagagtagcatcggaagcagtagcggcagcggtagtatcatcgtcgccactgttctcaacaggagctgcagtttcattggcttccaacttcatagatgagccaccttcaatctcttccactttgattgtggagggagcctcatcaggtggattagcagtgacctctgtcgtactagtcgtagtgtcctcttcctctttgatcttttcctgttctgtcttctcctgctccagcccttttctccatctaatggtgaactccacttttccctctgctctcgatattcgaactctctcgataacaccagcgtcaatgcacaaccttctggtacatcgttcgtacaagatcgatactctgtctggtgaaggttccggtcctgtgtacaacgtcggactgggcttagttgattcagtagggttgggagtagatgcagaggtaggggtagcgatggcgttaggagtttttgatgttgccagtgaggtatcttgagtagatttagtgggagaaggagcggaagatgggatgggatgctgagattcttcacttggaacaagtgaagaagtggtcatggcagtgggagcagtcgagggtgcagatgtgaggatggaagcagaggcgcatgttaaagattgctcttgctgagggatttcgccttgagactgaggcacagaaggttgttcagaagtggatggttcctccggttgagaagtttgaagcaaagctaagacttcagacgactccacctcgtttccatccgtctcttgtggttcattcgcgccagcgtcctgatctctggccgcctcggagggttcttcctcggtatcagtctttccattcgttacaggtttgatctgtacttcgatctgagattcaatttcagcctccggttcagtttcggcctcggtcgggacaacagttgactgttcttcaggatttgatggctcgacttcaggctcagcggatcctcgcatactcaaatcctcgatctcttctccgtcgatgttggacgcgctgtctttcgccgtttcgctctcttcttcctgttccggctcttgctcggtcgaatcttctttctgatcctcttccgtttcttcagcattggatgaaggagcggaaatagcagaagcaggagcggagacagcagtggtggtgacggcagacgcagcgagaagagaagaggcgatggaaggagtatcttccagtttagcagcggactgctttcgctctccaccttcgattcctcctctacgtttgctctccccaggaccggcgcctgcaggtgagtcaaagtacaaccgaagccgactgatctctttggaaacttcttcgattctatcaggattggctttgccatgggtcttgaagtaactccggtgtttggaaggaggttgaccgatggtagacgcctgagtgggagaaccttggttaggatctatcagagaaaataagaggacgttagatggaactgcaactcaagcgaaaagaatggcaagaacgaaaagagagaaagagaaaagaccaaccttcagacccggcgtctgcctttctctttcgaccatttccaccctcaacctcatcctccctatccacaacaccccatttccagctcaattctggaacttctaacccgataatcttgaaatcggtaaatgtctgtttcggtccttcctccttggccatcttggctcgagggacgaccggtgttccagttggagtatcctttttgggcggtacattgccgagggaggctcgggcatggtagcgagtcgaagaaggacctcgaggggcatcatgaggggcatagtccgctcgcgggtgagaactggaatatgctgctcctcgcatgcctgattaagatagaaatagtcaagtggatagttcaaaatggacggatgcgtcagctcaacatgtcaatcatacaagagggacatagaagggatatggaaacatgaatgtgggaggatacgtcgattatgatttggaggcgagttctttcctaagaagaaaggtaagataaacaagggcgcaggaaaacgaacctctaccgcgatatccgcctctgtctcctctcataccgctgcctataccattattcattccaattcctccccgacctccactggacatcggaagtccgccgttcatactcatccccatgggcatcccggatcccatacccatactcatacccatgggcggtggactgcttctactgatgcctcttcctcttcctcttcctctgtaagaggaccctccacctgagtaatcatcgtcatcctgaacaccaccactaccaccattgctgctgctcccaacataccctcctcgggtacttccacctcgactgacagttcctcgtcctctgtaggaggtacctctggaagccatgcccattgaaagcccatctctaccatcaccgcctgaaaagaattcggatccggactctctcgaattatacgccctctcggcattcactacggctgcagtaatcaaaggatttaatggcaagcccggcacgggcgcaggtgagaggcctccgccggcagtgcccccggcagaatgcgagtcaaaccgcggtcgcttagcaggtgggaacccagctggctggttgaacccaccgctgcttccacccggaccacctccactcccaccccccatagacgaagaattagagatatgatggggtgcagacataggggaaggccgtacggatggatggtaactacttccacctccacctccaccagagacagacggagggccttgaccggacggatatcgtcctcctcctccgctaccggcgctcgctccgatctgataaggctgatttggggatccgtagggaccctgggatgggtacgcttgaggtccaacggatggaagtgacggtggtaggggtggaggttgagatcgatatggcggcggctgttggtgctgaggttgatgatgatgatgatgaggcggttgttggggatatgaaggccttacttgataggcaggttggctagaattgtacgactgagggcctggatacgaaggaccggctggttgagggtagctgtaaggttgttggcttggttgactgtaggcctgagctggaggaggtgcgggtgcgggtgcagcaggaccagctgtgggagcaccctgagcttgggcctgagcattcgccgcttgatgggcatagtactgagcccatgctgcactataatccggctgaggtgcgttggccatggcgagagcggtcgtcgtcgatgtccttttctgattgatggtcgtcgtttggagaaacggaaaaatggaagacgaaaagttcgacggcgagatgggttacaatcgtgggtggttacggtcgacctggcttacgtaatgaggccagcgtaaccactattcagccgtctcattttatcttacttgcttctatgaagtcctctaatttatcccattccattccattccatcccatcccatccagcacgcttggttctctctgttaggtctctgtatctccctgttgtagtacgttctgaagatgccacccagaacaggtctttcggggaatacactttccctgaaatttatgaatagaggaaaccccagctcagcctctgtcgcgaaaccttccgcgactgctgcctctttctcgtcttcaaagccttcgacaagtaaatcgataaccaacaattcgacagacggtgaatggttcattccaggatgggaagactcttcgcccgctcctgctactggctcgtcgtcatcagaaactcagaaagcgaacgaagacaagattgaggtcgaagacagttatcttcctttccttctggagaaggatacgggtggacgaagattaggcaatggaggagccgaggttgtgaaggaggacataggagggaaaggaggaaggcggagttttggaggtatcaacaaatccatcgaggtttgtcttcttcttttctttgctgttgaagtgctacctcgctcgatcatcgcgttaacgattatcgtcctctcgaattttacggctggctccgaacccattaacatcgcgcgaacgcacaacagaaattatcccaaccggtgaacacatctgtcgcaattcccgaaacctctagttcaaacacatctacccctccatccgctgtttctacgtcacaaacaccctccacggaaacacaaactggtttcctgcgtccctctggtttcgcctctccgccgtcaaaaagaaaaatagagaaatcagttctctcacaccttcaatcgtcctctggcgcccgatcaaccgcaccttcttctgctaattcttccagatcatccacacccgcctcgtcctctgggatgaagcggttcccacctctgtccaaaaagaaacgaaagtctgatacgatttcttcctctgcttctgaaagcgatggagatgaggaggaagaggaggaactgcagatgttgtatgattcggtggctccaactggcgcgagaggttcaaaagggaagcctcgagcaggaggtataagctctggtggcggcgctcgaaaacctcagggtcatgggaaaagatcgaagaagaatggaggatctgcctgaatgttatcaagattcatgagttattgtcttggagagaatctaagatcatgagtcaatgacagagtagactgaagtcaggatatcaaatatggaggagttcttttgagaaaagagtacagagcaatctgtagaaatggatagaggctgcgcaaagcatgattaagatgagaagatgcataggtaaataaattgaaagaaatcgtggtgatgtgtgacgtaaagaaagaaagaggcgacgaaaagaacaaaaatggataagacaagaggaaatcgaaggatgagagaatattgaacaaaagagtatatccaacaataagaagaagagaaaagaattcaaaccaaaagagaagaataaaagaaaagaaagtgctcttaatcaagcttgtactgcttctcgacctctctgatcgcctcctcctcagaaacgcctcccacccgttttctgttgatgacttcttccctggtcatgaccgtgtcaaacaagtggtcccatctggtgaagaacggttgtctacatcatcaagccagcaacgcccatagatcaatacggagtaagtaagactggaagtaatagtgaagaagtgaaatggagaagaaagataaacgaacgaaaagtttttcttaattccgaatgattgatgatggatatcatgataatccgcattgttcgcaaagagcatctgatgttcgcagatacagaaataaccatgaacagacagaagttagcttgaaattactagtgtcaaatgaagcatgaaagactgcagacgaacctgcatcggatcccaccaaagtctgtacccggaatgatcatccaccgttttcgcactactgaacccaaacagaagaattgtttgtctgaccgtcatcccactcagccattctgccatcgccgctcctacagaatccaacaggagtccttcgagccagtgattatagagtgcaccaaatgcgtaaggaacgtagagtctgtgatgatgagaatggaagtttcggtatagatatgggacttcgtgcattgtcttgtgcaagaagaattgatgagtgtcgatgatgaagctgggaaagtaggtcgtacaattatttgtggaggaaaagaagtccacagaacattagacgtcgtgtcggcttttgtatgacgaattctcgagaagagaaagactcacaaagccaaaccgaactgaaagatgggaacaccccaccaataattccactctaccagtcctctgccaacttcgccgcctgctaagcctaagaagtccgccgcgttcttcggtccaagcaagacagaaacggctttgcctacccaaggggcatacgactgcatggcttccaagtgattaatcctgatctgagtgcggaggatctcttcatcggatgataaccagaagaggccaagaattgtttgaagaacatgttgaagtacaacagctttgattaactgctcaagatatcatgaacgcatacaattgagggaatgattagctttcagatcaattccagttggctccacatataaagacgtagaggaagaagaaagaatccgatactgacatccgcaaaagaaactctgttccttcgagtgacctcttcactctcatgaatccttcttttttcaaaatactcgaattgtgcttcgtccagaaaatagaataggccaccgacaatccaatagacaaccaccggcgtcaacacagccagatagcggtccgagacgaacggcaataaggaatctctctgagcaagatatatcggataatgaacgtcttgaggaagaagtgatgctgtaaggttagagttaaccggaaaggatggaattaggtaggagagaatgccggttgacatagtcgtgtgtttatgtgaagtagaagcgtgaacccgatgtggatagggagaggccgtaacgagggtaagagggtagagtaaagaccagatcaagaatcaaacggacggtaagataagagaaaatggaagcggaatgaatggatgcagacttcttgatccttccagagtcaactgagagtagaagagtggcagagtggggaggaagaaaggaacgagaaggagaaggagtgtatgttttgtcggtggaggtctcgatctgatccccggttggcaaatatgtggcagtggtgtcaggtgacttatctacacagctttgtggctaggtggagccaagtttacatcgccttggtggctgatatacccgcgctgcaggagcatttacttcattctacagccaaacgaaaacctcatggattcggtgtatactacagaatagatatcctcttttctcttgcttcactggtcagatttattatcagttgatcctgaccggaagaatcctcgtcgtttgatgggatcagccggctttgagtctacccctgaaccggcaaaggaagatccagatccagcaccgaatgagacggcatgcgagttcatgactcgtttagatgcattcagagcggctctgtaagaattgagttgagaaaagccaaacacatctcaggattttgaagttttgcttgtcctggtatttatcactgactaaacatagataagactgcatacttactggctggtctgagtgatatactcgtcggattgtagtgctcgtttatctgtcttgatggacagcccatttttatcataggttcttcaggcaagaggatccggatgaatgttccagtattgttgaacggaaaatgcaaaaacggagcgcagaattagatcaggttgattccatgtgaactacatcaaacagagttgaacaagcttacactcctttcgcttgaagttgttgtttagctccatcgattccttgtgagacttttccctgaaagatcttgactccgtctatataggcataacagtatcagtgtcgacctatatgagaagatgaaacggataaaggaattggacgtgcagcaaacggccacaaacagaatcagagggaaaatgctagagatagtgtccctatggatgttttcattttgaatgaggtgagcatttggtagaatgtgcaaaaagaaaggcatggatctacagaccagatagatgccatattgatgagtttgactgaaaggttagttgatgcaaggaaacgtacaacttacaaagaagaaagattagtctagttgagcgtgtgagtttagagcgtcatcgccgtagaagggcctagggttaacttggggcatatacttgggcaaatatgggtaccaggaacatagacacttgggcaaacatgggtcaaattccggtctcgtccggggtccacaaattttgaatatacgcacataaaatccttacaaccttcccacactcctctctacacacaaatacaagcatagagagatgtctactatggaaaggcctgcaaaggcccatcgggctccgacttcaggtcggtcggccgagaagaaggacaagaacaaggataaagacaagtctagaggattcaacgataaggttcgtctcttagttatcatcggtattagcgtcctcagtactctgtttcttcgcctatgacaagatataaggatgccgactaactgtattgtacgcacatacatacacaaataggctttcgcccctacttctggaagaaatgcaaacatacggggacgtaggaacgctgagaaggatcagactagacttcacgtcccgctcgttgatcgaacacccgatgaggagcctccgccagtggtgattgccatcgttggacctcctggagtgagtcttcttctgttctttcgtagttctgaattctactggggaagctcgggatagagcagagagagtccagagactagacatgtagttacaattcgacgggaggagtgtgctccgcagaatcattacacggctaagaagtcgttcatcattgcagtccactgattcttttgcattcgtcttcactttgtattcctttttgctccatatttaaataaccattctaggttggaaaatctaccttgctcaagtctctcgtcaagaggttcacgaagcacaacctttccgagatccgaggacctgtcaccgtcgtttctggttcgttttgtttgtttgactcgatttgcgacgattcgcgttgtctaatctcttgatttgtatctccgtctctcctactccgaatgttgaatcaaggcaaacaccgaagactgacattcatcgagtgcaacaatgatctcaattcgatgattgatattgccaaggtggctgatcttgttctgttgatgatcgacggaagtttcggtttcgaaatggtgcgtcattctctttttgtctagtgcaaagagtttcccacaaaaaggtagaagaacatggttctaaccctgatgcttatgcttggaaaccgataaaggaaacattcgagttcttaaatatcctccaatcccacggtttccccaaagtcattggtgtacttactcacttggatctgatcaagaagacggcgacgctacgtgcgcagaagaagttactcaagactcgattctggaaagagatctacgcaggagcgaaactattctacttgtccggtgttttgaacggaaggtatcctgataccgagatcttgaatctctcgagattcatcggtgtgatgaagttcagacctttagtcttccgaaacactcgtgcgttcttacatctgctccctgaggactcggatatatgtttcgaatcaaacacaaaagactgatgcctcgagttcttatttctggagcacagatccctacctggtggcagatcgacttcaagatctgactccgcctcaactgatcgcggctgacccgaaggtggaccgaaccatcaccctgtatggttaccttcgaggaactaaccttccttcttcaggcgctcgagttcatatacctggtgcgggagatttaacaatttcatcgatcgaaaagttgaaggatccttgtcctctgccgacggccgatggtgaaaagagaaggaggatgggagagaaaggaaagttgatccatgcgccgatgagtgatgttggaggtatggtcttcgacaaggatgctgtctacgtgaacgtcatgggatcgttcacacgtaggaaaggagacgatcttctcgatgaagacggcaagccccagggtttgtcctttcttctttgttttcacctctgtatcctgctttcccacttcatcctggtccgatgactaacttcttgatacacttcatccttgctcacagtatatcaaggagaaggtgaaaagatggtgatggatctccaggacgttggttcgacactaggagaacgaatcgctcaatctgatatccgcctcttcggatcttcatccaagcctgttgattggaagtccaagcagcaagctggagctaggttggatgagatcgaggatgatgaggacgaggacgatgatgatcaagacgagtttggatctgaggatgaagatgatttcggatctgacgaggacgaggaagaggacgaagatgaggaagagcaggacgacgagggaggggttagaaaaccctcttcttcaggtcgacagaccgcccgaacacctcgaggacttccatctttatcttcctctgccatcactagcaacaagaaaccatccaaaaaccgaccttccggaacaggttctgactctgactctgactctgacgtagatctctctggagcgagaggtttcatccaagacgacgaagccgccggggttgatgtgtctgacgattccgacgtggattccgatcttgaggagacgcctaggtggaagtcagatttggcggaacgagcgttgagcgcttacgaagaccggactcgatcgaaaccccgaaacttgatgaaactcatctacagttccgagttgacgccggaagagattgctcatccttctgctaatgattcgaccgatgtgtcaaacggagattccaacgagttcttcaagagaacgtcttcgggcagatttgatggggctgaggagggagattcgatgaagacggcgatcgatctgacaaagcttggattgtgggacgaagaagggatgatcggttcgatcaaatccttgttcattaccggcgagctcgagggggatgccgctgctggtggtgatggtcaggagggctacgagagtgagggtgagggaggtgatttcgaggatttggaggaagaaggtggaaacatggatcttggagacgatgcccaggcttccggttctggctctgcgtttgatgatccagagatgaccgaggcagaagcactggcctcaaagaaggcggcgctgaaacgaaaattcgacgagcagtacgacgacgcgtccgatgaggagaagctcgacttttatgataccaagaagggagagatggcccgacagctccagctgaacaaggaggagtttgccgacgtggatgaggaaactcgggcgttggtggaaggatatcgaccggggtcataccttcggttagaattgacaggcgtgccgtgcgagatggtggataacttcgatccaaagttcccgatcatcgtcggtggacttcttcctgcagaggagcgattcggattcctgacggtccgaatcaaacgacaccgatggcacacaaaaatcctcaagacgaacgacccgttaatcttctccgttggttggcgacgattccagtcattaccgatctaccacctagacgaccattctatccgaaaccgactgcttaaatacacaccagaacatatgcattgtgctgctacgttctacggtccggtctctttaccaaacaccggtttctgcgctttcaacactctagacggtgctcaacctggcttccgaatctctgcaaccggtgtggtactcgatgtggatcgatctacaaagattgtcaaaaagctcaagttgacgggtacgccgttcaagatttacaagaacacggcattcatcaaggagatgttcaactctcagctcgaggtcgccaagtttgaaggagcgagcatccgaacggtctctggtatcagaggtcagatcaagaaggtcatgtcgaagcctgaaggagctttccgagctgctttcgaggacaaggttctcatgagtggttagtctaaggggtttttctttctttctttcacactctctgtttttcaaagctgaccattacttcttatgatcacaaacactacttcaaagacattgtattcctgcgagcatggctatctgtcgaaccccgaaagttctacaatccggtgacgtctctcttgttggccgacaagtcttcttggactgggatgaggttacttggaaagattcgaagagacgaaaagataaagactcctttgcctgtggattctcattacaaggttcgtttctgtgtcttcccttggtgtgtatgtgcatatgggggtttgtttgatattgaccattggcggaactacacacgcacatagcccatcgaaagaaagacccgacatttcaacacgctcaaggtaccgaaagcactgcaagctgctctaccatacgcttcaaaggcaaaggttacgcggccgcaaaagaaacagacgtaccttcagaaacgagctgtcgtcatgtcagccgaagagaagaaggcgaccgcgttgttacagcagatccagtgcgtatataccgagactcccgctttcgtttcttttcaagattgtcattttgtgatcgaaatatgtgctgacggtgggtgttctctttgtctttgtgttcacataacaggaccttgcgaaaagacaagacggctcgacgacacgccaagcaggaagagcgaagtaggtttttttattttatatctttctatgatttttttccttctctttccgaatcttgtcatcacagggtggaaggaaacagcgtattgaacgagaattctttctttacatatctggaacgaacaaacaaaacttttgctaatacagaaaccgaacatcgaaagaaggccgaagagaccgacgaacgaaagtcggacaaaatcaaggcggaacgaaagaagctgttacggaaccaggcgatcaaggcaaagcacgaggatgccgacggagggaaaggacgaggtggaaagaggcaaaagagggattgatcgagagtatttgtgtttgtgttctgtcactatatttgttatcttgcattgtgcatcgagagaaacgagaggtagagaagagagagaggaaaaaaaaaggagaaatcaaatcaaggaaataaagatgaaagtcgaaaataggaatgaaacagtgacttgagaggaaaaatagaaggcaagagataataaaagaaactaatatatagaaaatagaaggataaaaggaaacgttggaaaggagcagtaacctaataaaatccgatcgcgaggccatcggccggatcgtgatgagtgggattcaatatgattgattaggatatgtcagagtgcattagacagattgcattagacagggtgcatcacacagacacagacacagacacagacacagacacagacacagacacatactgtataccagacatacagcatagtccacacctgatagtacattgcgataatcaagagacactacaacgcactagaacatacatgatactacagacacaaacacgctgttcccccttcacatgtaaactcacgcgttctcaggcacacacagattgtcgggtacctgtctttcggttgtaaacaaggttctggctgcggtgcccgactctatcgagctactgcgttctccctttatatttaatccctcggccgggggtaattcggcagagaccgattgacgggatggttacgataaccggctgtcgcccagccaaccagccgccagccagccgtgaccaccgcctgatcgcccgcctgcctccttctcctgaaggctcgtgttctcggcatttgtttttcctttttttctctccctctttctcttttcactctgtgtcttcattttctcttctttcctctcgttctcctcgccatcgccacctctttctcgacctctacctctatctcaacctcaacctcaccttcaccctcgaacctcacatatcttcctcctctttctcttttctcttccggattgggtcttgattcgctcgttcagctagtctaattcctatttggaggcaaagaactatctggactaccgtctctgtcgtctctgcttggctttactctactttcctttcacctcgcctttctctttttctctcctctttttccctttgccaggtccggtttccatcaacaaagctacctcccgtcctgttagcttccacatccggctcagacctttcgttctattcaggcccgttcatatatagtctcttttcttttctctcccttatccagataggtaccaggtagatcatcttactgcctacacaccatgaagtttcttacctcaccggccgcttccaccttggccctcctcgccctggggctctcttccgagctcacccaagccgtcgccgcgtcttcacgaccaaagcattcgctcaagagacgtcaaccaatctctacagacgcctctgatttggatggaaagacatttgatttcgttattgccgggttcgtctcctcttctcgtcccaataactcttcttcttgtcctgttgatctaatctcatgatcctgtcctcatcgttacatctttctcgcccgattggtatccctcttgcttacgacattagaggtggactagcaggtctagccctcgcttcacgaatctcggaacacgaaaatctcaccgtagccgtcatcgaagccggaggatctggtgaggatggcgaaatcgacacccgcgacgtcaaagaccttgttagtatctctcctttgtgttcttgcattccttcactcccattgactgaacataagagaatctgaccaagcccgctatcattgtctctcttcttcctccttcctcctcttctagatcgacatcccaggaaattcgtatctccatgggttaacaaacactccttacgattggaactataccactgtggctcagaaggatgccggtggaacgacaaaggaatggccccgaggcagagttcttggaggtagtggtgccatcaacggactcttcctctgcagaggttctaccgaagagtacgacgcgtggaacgagctcaattccgggggccaagaggactggggttggtccgagctcaacaagtacatgatgaaggtttgttgctcatatattcctattgacttgacacgtggcgcttgtttcctttgttttgcccaagcgctgatcgcgtttttggatccttaatacagtctgagaatttcactcctcccacggccgaccaaatctcgtcctcaggtggatttatatacaacgcgagtgcgcacggtgagttctttccacttctgctttcatctagtgtctttccacgctcagccactgatactctttctccttctttgaactccttcatcaacttgattccaggtacaactggaccaattcaggctggtttctcggcctactggttcaccggaaacacaaagtggattcctgcctggctcagccttggatttaacagtattgatggtacaaccggagacaaccacggtgcctacattactccttcgacctgtaagtctgccatgcatctatttactctacagttttgctgcggcgagactcttgacaccgatctgtgttttcaatcttccaaaatctttcagtgaacccatcaaaccagacccgatcggactcgaaagctggctacattgatcccatcgccccccgatcaaacctggtcattctcactggctatcaagtcaccaagatcaactggaactcgaccgactcgaccacaggagctgttgcttctggagtgaccttccaggcatccgcaaccgacacaccctacaccgtcaacgtcgccaaagaagtccttctctccggaggaaccatcggttcagctcagatcctacagctctccggtgttggaccgtccgccacattgcagcctttaggcatcaacgtcgtctcggatttgcccgtaggacacaacctacaagaccaccagagtaactctatgtattggtctaccccaactggcaccctcacttggggaaacttgaccaatacgacgctcgctgcaaccgagttggccaagtatgaagcaggagactataccgactcgatgtggacctacatcaacgaagtgagcattttctttcacttagatacccaaccgctcattggatcgagacttattcatcaatttttcgattttttcccaaggccattggatacatttcccttaaggacgtcatgaactccaccgcttactcttcctttgttgcgaatgcgactgataatctggaggccaacgtggacgagaccgctgacgctctaggattgtccgatgctcagaagatcggtctcacagcggttagctcttctcttcttttatcttctcttttttccctcctttgtcatctcttttaacggagcgaagccgttggctcctttattaactgaggtttatataaaacgtttgattcgactgacaatcgtcctttcttgtgtttccttaacagatgtacaacatcaccaacagatatttgactaccaacgttgggcaaatggaagttctcttgactgagttgggatacgttggaggcacaaacaccgtcggcttgcagggtgctttccagcatccctacacccgaggaactgtgctcatcaacacaaccagtgctttcgatcctcctctgatcgaccctcggtactattcccactcgtatgacgttgcaatcacccgagcttgtcacgaatggactcgaaagttggcggccgctactccgatgaacgagctgatgattaccgaaatgaatcctggagcttcagtcacaggcaccgcgctagatacttggttcaagaagaatgtcgtcactgtatgtccatctattttcgcgttcaattctcattctttccaacactgtatgtcagatcgctcacaaaccacagggctggtttttttctcttcaataggagtatcacatcttgggcacgtgctctatgttgcctaaggcttctggaggagtcgtcgacacaacgttgacagtttacggaactacgaatgttcgagtagttgattcaagtatcatgcctctccaggtttcagctcatttaatggttcgttgatattcagacctttgggttattatctgatcaacaagacataccgagttttgttaacgcattctcctctttctatcacaggctcccacatatggagttgctgaaaaagcggccgacatgataaaggtcaagtaccaaaaggtcattgaagttgcctcttcttcctctcaagctgcctctactgcttctactgcatccggatcgagctcggctgcatctagcgcggctactgctggtttgagcggagccaatgccgaaggcggagctactaacttgtcaaccggcgccaagggtggaatcgcagcgggtgccgctgtggctgctgtcgccgccatcgttgctgctgtcttgcttgctaagaagaggaaggccaggaaagcggccgccggtgatgaaaagggatggtattcaaacccaacagagaacgacgcttggaaccccccggtggctctcgctgatcgatcggtcgctgcctcccctgtgggcggagcgttctacagtaacgtcgatggagtgaacagcgcgtctgttttggctcctgctggtgtggccggtatgggttcggcaatgcctgggttctcgaccacccatcgggattcgtacaacacgttggacctcgcccaggccgagccgatggcggctggatatgacagctattacgctaacggttcagggccgggaacgccgtactcggatatccctaatccgatgagacgctaaagatactgccgcctgactttgacctgtactccttgcccatatctgtccttcttttcagtttccttgcctagcttagatatccttcatggcgttcatgctcggatattattcttccatttcctattcgcttgaatgctcatcgaccttccttttgtcaaccctctaatgcatttcatcctgttctccgttttcaaatcctgttctcttctttttcgaccggttggtcgtcctacacgaacatcatacgtagctttttatatattcatctcatcttacacggacaatccaatttttcatttgacttggttcatccacgacaccatttcgttctgccttcctctttatctccttctttcaaaaacggtctacctctatcttccgaagtatctttccattctttacgtacactcctcaactgcctctctgtcctcatcctttcttttggattcaggtctagatctgcggatctaattccttttgctttcctattatgttcttcctgaacagaacttgttttttctttccctttccttgtgtttctctgttctcctgagtatcaatgcgagttccgtgcccatctgtttcagagatttttctatatcaatcacgagttgattctgtttgatcggtaggttgaggttggaaggaatggtatcgtcagatctcgaacggaagagtccgcccctgccgggcttgaccgatgaactaatgagattttggacaggatctgtttctcaaataaccatcacttcaaaacttgatattttcatttctgttcacccgaaccgaaacgaatcgagtcaacgctttcatcagattgattcaacctagccaggtgaagaaggaactaagaaagacagggtgcatacacacatacagaatgggaaacccaaccaggtctacaagtcaggagatggacgaaacgaaggacagattgaggggattgatgggcaggaaggatgatattgaagctgagatggttcgttgctctgtttctatgtttgacgaggtctgaggttctggaaggcgaatgtgtctctgggtcgaaggtggaagtgaaggtagccgagagggttgattgcggtaagacgtactaatgattttataattcatcctgttcttgcctgcgtcctatcgatatggtacattttgatgggtgatgatgacgatgggaagtaggaagggcatcgagggagacttctagctgttcgtctcttcctttcctttcccctttgacacctctccaacatctgtctttcaatagtaattcttcggcttacatccgcttggtttgctcttggggacttctaatcatgatcttttcctcgttcaaaggaaaactcgacgatgaatagcccattggtgacactcgatggtttcccaagggatgatatcgacgttgtttgtccctcttcccctctaggcttcctctcttgctacatgtatgagtattgattttctcggtttatgaggatggctctaatagttggcggtcagacaggcgagggtccggttgattgaactacgaaatgatcgtccgtccttttctttttctctttcgttctccacatgacagactcgagtttcacgtactcacactcaccatttctatatttttttaaaaaaaacctaaaacgtaaatcattccctcgacgtgatagacaaagcagttatgtcagaaatcgagagagctctccatcaagttatcccttcatcttctgatagtcctagatctttgaatcgagagcgccaagaaggacagggtagtggtgtagatggcacggatgtggaaggaggagagccgtttgctctagtgaaaagtgtagatgagaggggacctgctgggaaagctgtatgcgttcttgttcttccttgccttcctcctctttcaagtaaactgtcaccgataaatagctgatcagtcagagatgttcctattttggcatttgaagggcttgaaaccagacgacctaatcgtcaagtttggatcggttcttcggtcgaataatgatgggctcaaagcgctcgccgccttagtagggaccagtgaacatgtgcgatcttgctttcttctcgtttctctactctgttcgatgagtccgtccatacttctttcaagatttgtagctaaccgacaagagattatagaaacctatcgaagtcgttgtccttcgcggagaaggaaacaaggagcgcgtaacaaagactctagtcccacaaagcggatggggaggacgtgggatgttagggtcagtccgaattgggggcttctctccctcttcctatactgagcgtttagtagaacatgcgctgatgcttcctctcttcctttgttcgtactcgtatgggattctccgtagaatgcatgttgtccctctataaatgatattggtcgatagatcacgtgattggagtgtcacaaacttgtaacctttcgagcgaaaccaaaatgtccatttcagatcatcatttgaacttctatttcatcaaccatcccgtcctactcttctttttttgctttgtttagccttacaacgagctagtagaagcgctagatctattaaaacttgaaggtcgaagttacaaaagaaaaatctgaatgggaaagccatctaaatcgcgcggaggaggaggaaacgctagccgaggcggtagaggtcgaggtcgaggaggaggaggaggttctagaggaggaagaggtcctcttcgggataaatatcatgtcgatcaaggaggacgacccgcaagcgcggttgatgatgttggacctcagagatttgccaacgaggctagtagtggagatgaggatgaggatgaggatgatgaggaggaagagagtgggagtggagaggaggatgattcggatgctggtatgttttgatgtcgatttcaatacatggccgtagtccaagcctaggttctagatgagttgaggtggacacagcaaaagactaatatggaatggatggcctttcaccttttgctgctattgcatcctgcgatatagaaagcgacgggtcggatgagttaacaagtatcgacgtacccgtagggatgtgggtcagtctttgtctcttctgttcgaggttgaatgcaccaacgaatttcaaacttgcatgtctgagtgccatactcatcatcggtctattttccttcgaaatgaacaggatttcgaccattgtacgcgtcttttccatcgactgttaatgtggtagcatactttcaatcccatgttcactcttgcttcttgacttatggacgcgccattttcttttgctatcacgctcatataggtgacccgaaacgatggtaagttactcctctctttttcatttcctctggggttttgtattaattatgaaagctaatttcgtacttgcttcatataagttctggaaaaaagttgtctagattgaatttgatcaaacaacttcgtgtgggcgcaagatttagaggagtcgttatgacgtgtgttcatcttcaattctttcttcagaagaatatcctttcaagagaaagaaagaggaggcttacggatcaatctttttccttgtgttctttacctaaaagacctaaagggacgaaaccggtgtcgctagaggatagagatattgtccttgcctctgggttggcagtcgtcgagtgttcatgggctcgattagaagaggtcccttggggaaagatcagaagccccaacgagagattatgtgcgtggttctttgttttgtattttcttttgatccgaggaagaacagggaagattgcgatgaaatgactgacagtctgacttgtatggatgtaaaccgaacagtaccgtatctgattgctaccgtgcgcctcttttcgctttgccttccgttatagaccagcttagacctgacatcacttttttctctccgttaaaccatgatggcaatataagaacccggttaattacggtaaaccgtggagactcgtgagtttcttttgatctcaatgtccactcttcacgaaaatcttagaggatccgaacttaactctacttctctttcatcttttcgtctttttgctcttctggctgatggctttgacctctaccgggtgcttagaactgtgtggaagcattagcagctgctttctacttgacaggattcccaaaagaagccgagctcctgtcagtatatcctctattgtcccaacataatctaaattcttctcatcagacgagatttgacatgtacatatcccgctgactcaaattcaaattcatgacgggccggttggttgagcagactatccaaattttcatggggtcactccttctggaaagtcaacgagtaagttctttccgccttactcttgctctcaattcatgcctttttcatgattttcttatccatcatattcttggatacaaatctacgtccgtatcataacagagaacttgtgacccgatacttgacctgtaagacagcggctgaagttcaaacgatgcaggagacgatcatgcaagagatcgaggatgaagcagaattaaaacgaaaagagaaaggtcagactcctcttttttcgtccttttctttctttctttatgttcttttgttctttcctctcttccttctgttctgctgggtattatttctgatctcaaacttgttataccactatgacattcttcacagagaaacgacaacagtcaggtcagataacaactgagttgatcagggattcagattcggacgatgacttcctcgaagggaacccaaaccaccagatcggaaatatgtggaaacgacctgaaaaggccgctcctgctgctgttgaagaggagaaggtcgtcgaagatgttaaagaaaaggtggatagagaagaggacgaggtggatgaagtggagaggcagctggttgatgatcttggaactctcgttgtttaatccccgtttatctggcctgccctctacctccctatcgtgcccttgttttggttaccttaaaggcctatttggcctagcttatcaatatccctgaatgggctgaacaaaaagaaacaagatcaagacctacagaacgatgcagatgattttcatcttcctgatgtgacgacattgacttgtatacgttcgtcctttgaaattctgatatcaagatattgaagtgatctaatggtcaggatgatagaatagaaacgaaaaaagaacgatgaatatcgacaggtaacggacgtgtaaatcggaccagtattaggagagtcagtcgtatatgattagaagagcgaaacgataaaaaaaatagagggaggagaaaagggatcgttcccattaaattgaaagctgaaacctagataaagaagggaacggagaaagaagcgagaccaagtggaaatccacaaaaagaaagcgatagtaccgaacgtttatcatttatgaatagaagacagaacaatcgtcagggataacagcgaggaaatcaaattataggatcgtgttttttcaacgtagacgctggaataatgattagacctgggcggaatcctcatcagggggaggaccagtaatgtcaacctttccctgtgttccgaaaccgatcgtcatattcaacagtagaaacataagtaaaaggcacaatgataaataaatgatcggaacaagacagaaatgaacgaaccttctcggaaacggttgtatcatggtgagacgctttgatcttcattcttctcatttcttttacggcctcctctcccaaacccagattgtcccttggaacccaaacaatctgttgcccagtctttacagccggatgggtaaatgcatcctcgcgctcgtgaatcgccgagtggtcttcgtgagactttcttttatcatttccctcaaggttaggcggacgtgttcgaagctccatcgtgttcggcgggatctccccaacaggagttcggacggcctcgacgtctccggaaccagggaatggagcgtttgtcaatggtttttgatcatcgctcgttgaggttcggatcgcgtcaagctgctcatcagactcgccgagcgactgatcatgaccttcttcggtaaccataccgtacgatcgatgagcaagggtcaaaggcaaggccgtcttgagagacgcataggatcgattaagaatgatttggtaaccaatctatcatgacgagagagtatcaagagcgtcagcagtgaaagaagagaccgaagtgttggctgcaatcaagaagccacgtacagtgatcacgacgagaacaaccatcaaagcgccctcagggatcgcggaagctttgccgttttgctgttaagtatcaggttggtcagaacggtcaaacatgagtaaatccaaatcgaaaactcaaaatatcaggaaccgaagcatgagaacatacgtcttgagctaagaagaacaaggcggccaagcagatatgctggatatagagtccgacgaagatatgagtgacagccttggggaagaagagtcctccagagtcagacgagggaggttgatcaagaacccactatagtcgttcatacagaaaggtggggcagcacaattgtccgaatggtgagttcagattgttcttggagattgagcaaaatcagaatgtaaatagacagcttacggtgaataggtacttgtaaaccatgtacaagaggaagaacgagaagcaacccaaaccattgatgatcggagagatgatcatgtatccaaccgctgaataccacgagcaagatccaatggaacgccgtgagcattctctctatccaaggtcttcatcattcgagacgctacaaggtgctccccacttctccaagaatagatagaactcactgatgacagccaagagagacatattagggaagagcgttccccaattgacagatcccatactgtatttgatgttgtataccgatctaggcgtacttcccaataagaacaatttaacgtagtagaccaagagcggagagatccggaggaagccagcagccgcaccagccaaaccttgcaacgtgatataactcaagaagaaggtcgacgctttcggcaagttggaagccaagatggtaggcgcactcgagatatcactagcaagctctgagacagacgccaccaagcctgaggagagtgttacaatgaggaaaccatgctataatttggtaagatttgccgacaagaagaaaggcagacgagggggttagcaagactgattaccccgacccaagtcaagacagagcacgcacgatgaccaggaagatgaaatatcgagtcatgagggacaactcgactccagtcttcttaggaataccctcaaacttggccaagactgtttcatggaagacaaagcgatgtaaaaattgaagtgtggggtcagggtacgctcacacgaaaacaaagatgcccaaaatgtaagcaagtattcttacgtcggagaacaataggcaagagcatgaacagcacagcaagcagaaccgtgggaagcactccggagatgatgccaactaccacactaggaagcttgcagatccaagcgagccaagagaactgcgtgcagagcgtactgacattggagatgattccgacgaacgcgacggggaaggaccagagcaagatcagtccaccagtgagtgcataactgatgtactgccggatatttgcctcatatctatgatcaattgagagccgaggatagtcagcaacccgcagcatgtgtttcagaaacggatggaatagaagagaagacgaacggattcatcgacagattgctccagatgacatcttcgggggcggtctcaatgtatcgtccattcatagtgtaaggttgattatgcgtaacggactgaacagccatatgcgctccgatctctgttatgcgacccagagaaaatttcgaacaggatcaacacgagtcaagggacgtcattgatagtgcataaacaaacgacgaacgctggttgaagagaacgaaagcagctgtgtcaaccggaaagaagcaacaactgtcaatgattgatacaaatccaaagttgcagaagagaaaggaaatagaacaaacagttcataggggcatagacctcatcttcacccagtccaggcgaggcgatatccttctcaagctgctgctttgcctcctgcagctctttctcggtccggacaatttcctctctgcaccactcaatagtgtcaaccttttcgcccataaaaggcagaccgaacggtaaccacttgaaaggcttcaatcgatgggacggcctcttcttcttgggcacaagcgtctcggcgatcgatacgtcagcctccaaatcaggtgtctttgtccatttatcctcaagaggctgcccgttcttcttatgtgccgccttttcggccttgttctttagcttgtaggccgtcttgatcagctttgtctcagccgactcaagtttcttacacgcgttgagtcgattgttgaaatgatcaggcatttctttgagatctctgagaacacgtaaacgaaacaaaaattaagaaactaatctgactgtagaggaagtatcacataatcatatgaaatgtgcgtttgaacgaaccgattcaaccaaatgtgtttagcgcctccaggaacatggttgaagagctgcataagaacttcctcgtccaagtctgtgagattgcaaaaaaaccaaccataaccaaatcgatcgaatcaactaaatggatcttcatgccgtatcaatagttgccaaaacgtacatttcttgggtataccagtaaaaagaacagttcgagcctgtggcaacttggagtggtcttccgagacgaggtatcgctgtcggatcgtcagccactctcgcatatgagtttttaggttccacagaatccagactttcaaagaatgagccggttggtaaatacatcgaaacttatgagctttgaaatgaatttgtgatatcttcctgaagttttcttagctcacaagtgaagatccaggccaagagcagatgggctgcataacgggtatacgacgttggggcaacgtttccgaaggtaaatttatccagaccttcttttcccgagacggatgttccagccgcgtcgacaggcatgaggatgacccaagagacgagccagatggggagcaagatttggactatcattcggagatacatcacaaacgcgtaggcgtctagaccattcttttcgagaatgatcttgggatcagaattgaacagcctgagcggccatccgagtaaggaaggtgataagggtgcttcccgcttcctgatattggtaagaggcaaagacagggtatcggtgagcaaagggctatatttacttcctgtgaaagaactggtgaagcttctagcaaccaatccctatcaaaccgcgattcttcgaatcgagcggggctgtttttcttcgcagataaccacgagcaaatatcatcatgcacacccgggtacgtgcaaacaccggaccttgtcgcgcttcatttccgggcgagagtgcgctgacccgcctccttagctttgctcgatccaccaagcctctaatctcgcgtcgagctatctcactagaaaaaggtgaacaagagcaaagatacttacttttcatcggaaggaataaaggtccgaggttcgtagattgatcgaaactgtcttctaagcaaggtgaatgcgagaatttcggctccagcgatggctgagttgagcacgagagcggtgacaaaggagctcgtagtagcggcgttggcatcgtcggcagatctgtgtaagtttatccaggtaaagtcgaacaagtgggaggaggaaagagaacaaggacgggaggaggggatgtaagaggaggacgtataaagagaagtaagcagggcggaaagaggaaccggtgatagacagtctggtaagggttggtctaaatgcgagcagaaacgaacgcagaaggatagatgagacgtacgcagacatgatgggccgatgaggtccttaaggaagggtgtatacaagggttgtggtgggttgtatgcgtcgatctggaaaagagaccaacgggtgtggaaagttgcaagagggaggaaccaaagaagaaagaaagttgaaaaggcgaccttgcgacaatcaaccgatagcagctgagagaaaatgaatgaggctaaccttaaaaagattgtcgagcggccgatgaaaaaggataatattgaaaacatcagattttttagagaaagaatgaaagaaaacaacaagaagactacaaattttcacacacaatgaagataataaattcaaaccgtcccgccccacgctctttcaccattccacccgggcttggaagatgactgcatcctgatcgaggacagtgactgcgggaagaaacaagacaacaaatgacgtctcgtctttccgcctctttagcgcgcgtcggagctttttccgagtggaaaccttcccgatcacctccaaacaaatcagctagagtagctcgctctccctctacctatgtatttcctttgatccggctatacgacattcatcagacctgcccaacatatccagtcgccacctacagctgcccgacactcctcggttagctcggtcggtgacttgaaacgctcttcgtttacctactgttgcttctcaaccctagttcgaccacccccagtccatcccatcatctgcactctcatcctcttcttcgtgttcatccctggcgccactctcctcactgtcctcgcagccctcactttcaaatccagtaggacctacgacaagtaacgaccttctgaagaatgtggaaagtcgctcctcgcccttctcgtttactggtctgaaacgtgttggacaaacttgatggtccacagtttcatccgacgcttcaaccgatggatcccagaaagatgagacggccggcaagtctccgacagtcaaatcggctgtttcggtcacgctctccatcttgatctccatctccgtttcattgactctgtcgtccacctctaccttcggaacaacggtgttgctctcggaagatcgtgcagagatatgatgaagaccgggtccccactcatcttcctctattttcactctgatcccgggcataataactacctccactgcttcttcctttattctgggttctatcaacctctcatccttcggctcgatcgagacacgtctgtgcaggagaggcgcagccgcccagccagattccaagtctaagccgaagtctgagatcgagtccgaatccgaatccgaatccgaatccgagtcgaaatcagatattgagccaaatttttcataaggttcagctttgaaacacggcctgtcggtttctacctcctgcaccgaccgaggtgtaagtgtagttggtagaggaggtgccaaaagctgaaaaaacaaacaaacaaacaatgtaacacatctatgtgagtattcattgatacaatgaccattttactcatttgcaagaccaagagtccttcctctctttatgacggattgtaccaacctgaaccatcctaggaggtttaacaccgagcgagatcttatggagaacttgcgaaatttcggtttcaaaggtcgaagccgccagggcatagtcttctttcaaatcatcagactcgccatccggttcagaatcagagcctaacttgagatcatagagagcttgttcaaacgatgacttttgaatctgatgagctgcttggatatcctgacgcaataacagccggagaagatatcagcatcccgatcggtttactgacttatccggatagggaaattatgggctgaggacaatcctactttaaagagacctttcgcttcctgtctgaagtctttaccggctcgctcaatgatactcagcatcgatttcgcgacggaccgaaacataggaacctccaaagcccggttctattatatacgaatcagtttcgtcactccagctgtcaccgaaagagttcagatatacgaagttgaattgaaaggcaactctcactcacgctcgtatccttctgatcgaatatcaacggtaaagatctgtggaaaaataaacccggccgtgagttcgtttggacgtatatttagtcaaagtcctgaccgcgctcacctgtgtagatgagttcggataagcttgtagagagcgcgatcaaaagttcggacgaccgatggaggaacttctgaagagaatactccacacaggaatcctctccgtaattcaaaaatctcccgatacaggatgagatctatacaagaaaaaagaaatgctcaagacgtctctatactaaacgtatatagtcaacttcaggaagtcttacggttgtcttgttccttcttcactaaatcttcgtccacctggagttccggactagttgttcgagaccgaacattccatccagactcctccgtttttataattctaatctgctcttcatcgtacccattcccttcatcttctatctttccccgtttttctcgtctgttcttgataccacgaggcttccgcttctttgtccgaggttggccccgatgatcccattgaatttgaatatgaatcttttgaaggattgctcgaggtttagccgggcaacctttggaagacgagcaattaggaacatgaaaaggcttcacaaagactggtgatgttgtaacgggccagaacagatgcatataagcacaggcagaaggataaattcgaaaaaaaagacagacgcgtacagagtacgggatctagggatgacgagccgggcggacttgtcaaatcaccaacactctctaatgacaaatctcctgcgttcttctccagtcaaatccaacatatgggtatatgcgcttgggtgtgagcgacgaaaacagaggagagagaaagacaccagatagacgtaccacagcaaaccaatctcgcactctctcaaccacccagccaatttttttttcttcagctccgtcttctgtaggatcacttctcccggacggtctgatcttactcaaggacgattccacctcgatcattacctgtccttctccaccatgtcggccatcattctcattgagttcagtgtgatcttgcgcgggggcatatatctccaagaggcgaattacttgagaaaagtctatggaaggatcgattgcgaatgggaggagcaagctatatcgaagtcgaatccgaagagttgggtagcctttgtccgcgaccactgacaatatcttttcaaaagtctgtggaacagtgggcgagatttgcatggctatatgcgttcggactcaagacaagacaatcaacggtgaattgacgttagctctagtaggtgatgaagctcgagggttgatgtcggatcgacttcacgacaaatatttgtacagatgttagtgacaggtttttcagattgttctagacagtcctgaagaagctttgattgcacaagaccagacgtcagcttcactccaagcgagtagaactgattgttcatatacttctctgccatcgcattcttctagagaatagaagaaggatacatcgctctgttcaagattgctcatatatccatgtcatcttcttctcccacattggctgctgtggctccaactccacccagatcgatcgcctcgttcccaactctatctgcccaatcccttaatgcaccctccatctctttccttagcacacccacaccctctcctgcaactcttaaacattccgcaaacctctccgtgtccagtcgaccgttcagttctgctgtggtgactttcccacttcggggcaagaatgcgagaacgacatgaggtaagtcggattcttcctgtgatgtcagatccagaagaggcgtcgtgaggtggatgccgattgttaacgacaagagtgagtcgagcaacgatattccggaggtgagaagagcaagcgtggtcgcattgatggcggtttgcagcaaagctatcaaaccatggacaaatgttaaacatgaaaaatatatttcaagttgaagcgatcaaaatgaaagaaggcattgagacgaacctccgtccatagaaagaacttgaacgtatatgttaatttcactccgaggataaagctgggtctggatcacgggctcaaatgtgctttccaaagcagcagcgatctcttgtattcgcctgttgagcgattgtttgagaaccgggatatctaatcagactaatttctgatagtagtgtagtggtgaataagagagaagacccacttgtcaccccgtcctcttcttcttcgttcatttccagcccacgagcctacaccaacctcgatgttcaatacagccctgtcaaacaatgtagcacttctcatctttgcttctcgcggtccatggacagtagctataacagtagtaagaccatgagaacaagtagcaatcccatcggcagaggaggatgacgaagtaggaatagagagcgagaaagttcggagctcgtgaggtcgtcggaaatcggatcgaagacctgcacttgtttttgtgagtattggacctactttcatgacgcagaagaaacttgattgcctacctccatcattgagaatctccacacgtgaggaagacatcttttataagaaaaaagggggccctgtttgtacagttgtgtatatgtgttgatgatctgcttttctaatcgggagctgtgaagttgaatgaagttcagtagcactagacgcactcgactgagtcaaatctaatgaggaccaacggaagaagtgagcttacataagctcctctgacgtttctgagatcgagaattcctcttgaaccattcgaaagcaatcgcctactcgctccttcatcgacactcatctcttttgtatctcagctaattttcttcaaagcagatggtgaagttaccttccaccgcaagactcagatttgcgccttctcccacagggaatcttcatatcggtggccttcgtactgcgctctacaatcatctgctagctagacaatcaggcggtaaatggattttgcgaatcgaggatacggatcaggtttgtctcgattcttgtgcttctcatgtcaagatgatgaagttgacaatcgcctttgagtttcttgatcgaaaaaacacttccactctcttgggcgtcatgctcctcaggctaggaaagtagaaggttctgtagacgccctacgacgttctttagaatgggccggcctggattatgatgaaggtctgtaagacacgatagtttacaccatctaagccagagagaaactaaatgccattgatttgtccaattttttcttcttctttgttctcatctttcaggtcccggaacgaacaacgcacactcgtctagttatattcaggcgagactcttgtagttttgtcgtctaaaacgtcttcaagccttgtcgtttgctgagccatagaccttctaatttgggtctctatcctacagtcggaacgtttggatctatacaggcaacaagtcaacaagctcatcgatgtgcgtttatctgtggcttacttaggaatcatcgcagaccatcagatctagctgacaagtttgcgctttcccattgtctcatgtactttagactggaaaagcgtacagatgctttgcaacgcccgatgagcttgctcaattgcgtgcagatactgcttccaactctggctcagctggtggatacgataggcgaggactgaggctgacggaagaggatgtagccagaagattgaaaagcggagagaagtatgttgttcggttcaaagtgagtcctttacagataaacagtcatgtcgtatgtggcatatttggagcatggtcttcatctaatgatatgagatcatttttattgggatgtctgtctgtacctcagtcgtcaccggatccgatccctttcgttgatcttgtttattccggcacgtatgctcacccaacggccgctcaggacgacacgatacttctcaagtccgatggattcccaacttatcaccttgctagtgttgttgacgatcacttcatgggtatcacgcatgtccttcgaggagaagtgagcccttcaacttggcttctaggcggatggtattgaccattggcactgtgtcactgatatttctttcatattttgtatgttaggaatggttcccttctgttaataagcatcttcaattgtatcgagcgtttggatggaaaatcccagagtttgcacatcttcctttgttgatcaacccggatggctcgaagctctcgaaacggcatggcgccgtttccgtaggtgaatacgaggtcaatcatacccttccatccttcttttgtcttaactcatatctagatggccttctgatcaatcaaacatcttactattcaaacacagagagaaggatatgaaccttcggctatcaacaactttgtagcactcatgggatggggaggaggtcaacgaatcttggatcctgcccgggaacctgaacacccaggccatactgaaaacccacatgaaagtgatttcctgacaatggcagagatgattgaacgagtaagcatctgtcttcttatcagacaacctccttcgtcttccttttgaatgcaagtttcgatcagtctgatcagtgatttgccatttcttcccaataatatcaagtttgacatcgacaagatttcgaaatctccaagtcaagttgacaagtctcgactagatcatctccaaaagcttcacgtggactggcgatggtctgtaggtggaccgactagacaagcgttcgtaaaacaggttcaagatatgttcgaggccagatatcctggaaagtaagttcttccatctgaatttcctctacgtcttctatccttgattcttcttttacttggtctggtgttgatcttgttatgtacttatctctgggccatactcgtcaataagtgaatatgtccgagacacaaccaacgtgtcaagatttgtggagtttgaccatgtaagttatttgctcttcgctacattttcatctgtgtatgtggtgagcgggaattagactagtttttgcttatattgacctgaccgatcctttctaccggtcatcatataatttcagctccgagtccaattcgttcatgagctaggggaaaacaatgattggctgttcgtcgacccagacttaacctcagctggagctagacaaatgaagaaagggacatcagattctaattatggtgagcctatatcttgctttgtctctcccctcataaggacccccagttcctcttcatggtcgcttttaacgcaattttttactcttagaaatcgtattgaaccaagcgatacagctcctcagcccgctctcagaggaagagtttttaaagccggacctattactttctactatgaattcggcgaacaagaaagcggcaatgccaagagaacgaggacaggccccggtggccaggatcaatctgtgggtgccgatgagacacgcattgactggacagaaagtatgttcctcctctctatttctcaaacctctcactatccttcttgtcctgacagtcatccatctatctctcaataacgatccaccatgaccgaccatatttgctcatgtgcgcttcgaatttgcctgtgtcgcgcctttcgaaattcgcgtcttccagattggacctagtgtagctcaagcaatcactgttctaggaaaagagcggacgctgagaaggttaaagcgagcattggagttacatcagaaagatactgctgcttaaacaaatagaatgatgatttttgatgatcaaataatggtcttttgaagctggactgaaagtttcgggattatgccgaagtgtgattacataagctcgaaaagtcttgggaaaattcaaaaacctgtttgcaattttatactcacaccatcttgctctcacacacacattcgttcactctcccactcaactctttctcccgctcgctttcctatagcatctctcaagatagtgagatttatttcttcaatctgtacagttttaggtgtcaaaatagctaacctgggatgtttctctgtcaacacagtgtgtggaatcctcggtcttctcctccacgatctcgaggcagcttacactacccaagccgccgtagagatcgttgaaggactctctctgttgcaacatcggtgaggattttttacaacgcatgtgatctctcctatctcccctatctctctcttgaaagagaccaggaaggagaaggtccatgttgtatgttcaaaaagcctatgagaggtggccgagattcgagcgaaactgactaggttcgagtcattcgttacggacggatccttgggaatttttataattcgattgtttgtgtgaatatggcgcacttgtagaggtcaagtaagttaagattttttgttctgtctctgttccatctgctagctttaatcgccgtccatcttgactttgcggtctcaacggagattgttcatgcgaggtcgtcattttgaaaaacgcagtctctgacaaacttttttgttgttggaattttataggatgcttgcggtgtcgttacttgtggtgctcctcgaggtcgattctaccaggttcgttagtcggcttcaaaccttttcataatggtcatgatgtacaaagattgacgtatgaatctctaccctctctatgacatgcatgtgctacaggtcaaggcaaacggaatggtccaggatgtgtttgacaaccgagccgtgtctggactccgaggattgatgggtattggccacggtatgtttgattatgttctcccttttcgagtttagagagaatagttacattccaaatctcatgtatgatgattctgtcctggtggcttccagtgagatatcctacggccggttcttcagcccacgcggaagctcagcctttctatgtcaactctccctacggacttgtcatggctcacgtatgtttaaaactgctttatcttatcctacgcatagcaatcctaactatcgttttcttttccgttctcagaatggaaacttgactaacactcaagagcttcgaggtttcctggacgaggtcgctcaccgacacatcaacaccgactctgattctgagcttctccttaacattctcgctaacaatctgcagaagacgggaaagaagcgaatcaacgaggaggatatcttgacggccattaaggatctcatggctcagtgctctggtgcttacgcctgtaccgtcatgatcgctggcttcgggctcgtcggtttcagggaccccaacggaatcaggcctttgggattggccagcagacagagtgcggcaaaccccgagggaaaggattggttgttggccagtgagagcgtggtctctgatgcttgttcattctctaactgggaggatgttggacctggtcagtctcacgtttcttgtcatagggagattcgtggccctttgtttcatgtgttctgatgttttcccctcataccgtttgttttgtcggcgcgcaattgttcaaccctttggaacaacatctttccccatcatacaggagaggctgttatcatcacccgaaacgccattacccgacgtcagtgcgctccttctaagcccttcgctcccgatattttcgagtacgtctactttgcccgaccggactcgactatcgacggtatctccgtctaccgagctcgaatggctatgggagacctgctcgccgaacaagtcaggaaggaacttgccaggcatggagagacagtcgatgtggtcatccctatcccagacaccagccgagtggcggctactcaggtcgccaagggcttgggtcttccttatcgagagggtttcatcaagaaccgatatgtgggaaggacgttcatcatgcctggtcaggagatgaggtaggtttcgtgtttttgtttgtattgtgtccagaaaaaaaaagcattgcgtggaactcctcaattgacctactactctcggtctctgatgttataggaagaagaacgttcgacgaaagctcaacgccatgccccttgagttcgccggcaagaacgttctgcttgttgatgactccatcgttcgaggtaccacctccaaggagatcattcagatggctaaggacgtcggcgccaagaaggtcatgatcgcttcctgcgcccctcccatccgacactccaacgtctacggaatcgatatgccctctcctcacgagctcgttgctcacgaccgaacggaaagcgagatcgctactgagattggtgctgatctcgtgatcttccagacgatcgaagatctcatcaagtcgtgtcaacagttcaacccgtcgatcgaacagttcgaatgctccgtcttcaccggtgaatacgttaccggagatgtcgatcaggcatacttgcagagtttggtgacgttgagaaacgataacgccaagttgaagttgggaactcaggtgggagaaggcgtgcatgaagtcaaggaggctcctataggttgctctggcccgttaagtaagtgtcgagctttgcagactgtttgctttgtttttgaataggaatattaaatcgacttttctttctcctgactttacaaagacggagctgaaggcgcgatcggacttgctaacggcatgtcgggagtcttcacttcttccggccaccagaatcctaacgacaccggttcgtttccttccttcctccccgtcccgctccatctgttcttctctatttcctccttattttcctctctgtccgctcttgatatagctccaaactgacaaacatgttcacctcgctatgacacagtcggcttgcacaacagctggcacagcgctcacaacgaacaacaataatttttctttgctctcttccctatactctcttgtccacttgcaccctgataaaacaaaaacaaaaaagaaaaagaaaaggagggcacgataacctgtttctttctcattacgattttctatttgtgcttctacttcttcggtgagaagcttgaaccgatatgaaggaggaaccgcaatacagaacaaagaaaaggaattaaaaaaaaattgaaatgctcattcgtacatcatttttcttctacctctggttccaacctatcttcctctatgttcctttcctattcgtttgcctttcttacaataccagtctatgccatcccagggtcttttttcttcttcttttgtgttatgtcctttttttttcggtacttcttatgtccaacctttatctatatctagagaatcgtctcagcctcaacctgagttcaagtttcaattcttcatccttaactttatcccgatcaaaaattcgattcgacaacgcatgtgaaggccagaagagctaggaacaagaacgaggacgaggatggaccccgagattaagagggcagtgagagcaataatggtgagggagagagaaaagatatgattttttttgttgagcagatagatacacatagatgaaagaaaaaaagggagggagaggaaaaggacgtctcaaatatcattaaacccttcacaattaaccaaaaagaagacacgaaacagacgataaggagagacagatgagcaacaagacaaacggatgattgaggattcaatgaaagagaaacaaaaaaggaaagaaaaaaaagagggtggtcgactctcagaagaaggtttaattaaagagggaaaaaaaaggaaaaaagaacaccacgtagagaatggaatcaaccccagatgagatcgttcaaaaatgaaggactcggtaaaccggaatgatccaccgagattggttgatcgaacggtaggtcccacttgtggccgtgttcctgcgtctggcccggtccttgttgtccgtcttggcccggagtgtatccgtattcggagtaagacatgggatccgaaacggtgtcgagtgacatgatgagttggtttgatccgtctaggcctgttccggtgaaactattgatacgttttgtagcatataagttcaagacggaaacggtcaggtctcaatctattcatctccgagcttctttttttgttttgataaaaggggacagaagaaggaagaaaaaagaaacgaaccttaatccaacatccgaggggactttttttttttggagggcaagataaatatcaaccaacacaaccagatgttaacaatgaaattcgacaggacgactctgtatgcgtaagagagagatataacaaataaataaagcgaacggaaacggaaacggaaacacaccaagactaaacatgttttcatcccagactccttcatccttcatgaacggcgtctgatcttcctgttttgaacctgcggaacgtgagatccattctctctgtaaccaagcccggatcatactaggatctttggggaacaacaccggtctgaaggcaaccgaatgacgtcctcatcagttcgtcggctcatgagttcatatcctcggaaagactcggtaaggacgtacggagtatcagcttcggtgtctggatcgacatcggctatggatattcctcggcgtttctgatgcagaacggtggattcagccaagccggtaaggggaagaaaacttgagagatccacaacgaaagaaccgtgttcccagagagaaagaaggaagaaaaaagaaagctatagacgaacctggtcgatggtacgtgagacccagccgacacccgcccaaaggaactgacagttcttgagcgcagaaaccgagacatcgagtttactatccgcctgagagatcacgccgaggaaaaggaaaacaaagaagaaaagagtgatcaacgatctggtttcaaaattctgtcggagaggaggaacgtacgaaagatcgaaggagtttggtagctgtaggcgtcttgaaaccgtccattccacctgctccgccaaacccgttagcagctccgctaaagctggacatcccatttaatcctccctgatacagacctctttgactagcgatcgctcgagcagccgcgttctttgcttcttcgatgagttgacgctcctcgaggaaagcgacggctgagacgaagatcatttggtcggcaaatgggttggcgaggatggctatcgactagagtagatttatacatatgagaggaaagcatgtcaatatgatgaaatggccagttctatgaaatcctgcatcgtcatgctagacaaggacaaagaaaggaaatgactaacaccagccaagtcggcataggacagcatgtttgctagcgtcctagcagatgaccgagagacctccacgtttgattccagcaggacttcctcgccttgagagaagttttgaagaagagacggtcgatgtaactttttgaatggtatttccaggaatgaacgagaggcaaggtaagcgatggttaaaagaaacaagttcaagagaaagaaacaaatgcttacgaccgtgatcttaaaaacgagcgttcgaaagacaaacccgatgttattcaatcatccagcgatcaacaatcggaaagaatgaaacgtacgaccgaatgaaacatgatgtgcagtaagaagaacgtaggcgactgtctcaagtcctgttgagcccatgatgaggagcgcgtgcgacgataccgaggagaaaaccccattggaaaaaaaaagaaagttgaggaggaaaaaaaatgagttctctggaggtaatcaagaaagagacatcaacaaggcatagagggaacggactctgtaatgcttgaaagtatgaatcgagaaatgcaacaccggatccatgctgaaccaagccaaggcaaacgaaacaaagaacaacgaaacaaagctaccaaagcgatcagccgaccgggcgagcgacatcccagaggaaaggaggaacaggaagagaggagtctccttctcggacgtacgcttggtagaaggaaatcatatcaccctgaagaacctcgagcttttctctcgacgaccgatcgagcgcgccctttggggaattcagaacatccgagatccgacctctgaagcgagtgatagcgatcaactgaacgatcgtttcgcaaacaccgcttgtcagttctctaccgcatagtgaaatcaatctagcgaagaaaggaaagaaagaaagaacaaacctccggccaaggccaaggggtgacactcccggccgggccctgaagctgaccggccacaagctcacaatccgcactggtcggtgacctgatatcgatctccgcttccgagaccgtggctgatctgcctgtaccgtacgagatgaccctacagggacgagacgttcgaacggaggatcacgatgaatgaatctcagccgactgtgtcgaagaagaacgacggggacgaggaagggaaggaaaagaagagaaagaaaccccttcccggagggaactaacctatcgaggaagaagacactccagaagagaagtcgacgacgagcgatctcgacatccgatggttcttgctgtatggatgcttccctatggagtccgagatcttgcagcatccgtatggcctgtattccggcgcgcgcatcatacgatcgatcagtccacccgactctttgttattttgttttctttaccttctacacgggaaaagaaagatgccccattacttcaggcaagaatcatgggaaaaagaatcaacacgaaccatcccgctgaacatccacagtccgctgtcccttccacttccaaactctgaccaagcgagaaggaccaggccgacgacggtgtcgacactggggaaactcaacaaagggaccaagatctttttggctgtatcttcgaacggctgagcagactcgtactgtctcttgggagacgcgcggagagggaggaggaggggatgtgttgagaaccgggaggtaagcgcgcagatggcgttcgatatgagcgccggaagagtgtttgctcggtgctgctccaagattctggggagagagagcccggcaagcaagaataagagaccattcattcagggatcaatacccatttgaagagaaaagtgacaatgccaagagagaaggtctcatgttctcatgcaaccattcgccacgagatcatcaagagagatggaaagggaagggaagacgatagaatgaaaagaaagagaaaaaaggaggacactcacgatgcgaccgacaagaacgggaaatgacaactcagatcccgttcgaatatcccaaggagatccccaaagatctcgtccttcgggtacaccccgagtctaccttttccttctcctttgaagagtctgtctctggcggtcgattttcgtttgccgtccgaggtgttggtcgctgtggaagaagagccgcttctggcggtgtcgaccgagggtgccggcctgagcggatcctccggtgacgaataggaagacggggttgaggccgaaggagagaactcagggtagagcatgttcgaagctgggccggccggtgcatggggcgaagacccggagggaccgaccaagggaacggtttcgaccggcggggtcgtcggctgttccagatccgtactgtttcgaagctcgaccttgactcgcttgaaaccggtaccggtgtaggatgtccttccaaactgtcgagattgaggaccgggggggagtgagaaggacagaaagatagatcagcttgagaacactcgcttctcttttcgttttcattcttttctttcctctctctctctcacacacacacatatcaaagatgtaccctgaactccaaaccgtcctcaaactcggtccaacagatgtttagaaagagtgacagcctgccgttccgaccaacggcaaaagaggaggtgaagacagagaagagaatagagagaaaaagagagagagagaggagaggaaacaccgagtgccaagcaagaaaacgacatacccaacgaaagaagggaacctggagcatcgctcggcctccaccgatggaagacgaacctggagccccatctggatcctgtggaccaggtggtggtggtggtggtgattgagccgggttgtgttcggccgagctataagttctcagcggtcgaaccgattcgttctggttctggtgttggctttgattcgagagatctgtggatgaggatggatcggatacgttgaaagcgacccattgttcatacaagctcgactggttttgctggtcgtggtcttcgtaggagacctcctgctgttggtgcacgtgctcgtttgaactagatgggtaagacctggaagaagaagaagactgatgaagctgtgggggattctgttgctgttgctgctgtcgctgttgttgttgttgttgctgctgatatggttgtggttgtgtgtacgccggatcggatggttgctgctgctgctgctgctgttgctgcagcaagttttccaactgtttctgtatatcccacggcagaggagccgaggtggagaactggtcgtgttcatacttggccatctcgggcgactaggaagagcaagcgaagcgagagaagagcacgaagaagcgagagatgacggatgggagatgacctccctcgttggtgtggatgtgggtagatggaagaggacgaaatgaatggaaaatagagaaaataaaatgaaataaaataaattgggccaaacagaaaacaccacgggaacacacgcacatacactctctctccctctcttacatgcttgagaacagatgcccgtgttcgctttgttattgtgttcgttgtatctggggtcagacgagtggccagctatgtactatggacatcccattcacgagcgtcgaacggttctctttcccccccccccccaannnnnnnnnngacaagaagggcaatgaagtagaaaggatgaggatggaaaagaatcaaattccgtttcatcgagagaaagtatcaatcaaagtatacatttattcgaatgaacccaaagaaagaaagaagaaagagtgaagggacagaaagaagacccgatggttgatgtcgatgcgattgccgatagcgatgagaagatagagaggcaagggatttcaaatgtttgaattcagaatatttacgacctttccggggacgggaaggtaagattgaatatgaagatcatttgctggtcagttttccgttcacctcagtcaaggagtaaagcaagggaaaggaagagagaagaaacgtacatcttgtactcgacctttgcgccctgtacggcatcgccctccttctgaacgtcaaccttgtaatcgatcacaatatccaaatccctagggttgatggcgttcggcttgcaatcgagcgtacccctgatggtctgaccttcagagatggtgatggtttccggggtgtagaaaacggtttgcttccagtgggtgtactgtgggcacaacaaggaaccagagaaaacaaagaaagattgtgagaaagaagccaggttgagttcgaagagaaaaagggtcaaaaaagaggatctcttaccttagcgtggggtccagtggagaacttgacaggcttgtggcagcaagcgaagttgatgtcgaaccaggagaggaaagcgtgaacgtctgatgataagagttgattgcgaaacggcaatagttaagttctaagcaagactctttctaaagcaagagacaagagaaaggagtcttacagtcgtttcgggtggcagtgacctcgaagtcggccttgaaagtaagatcctccttcttgacggtgagcaagtcgaggtgctattcacaagaaataataaaccatcagaaatcttgatctgaacgaagtacatggagaagcaggaacaaaccttgatggtgtagggctcggtaacaacgctcttcaagtcgacggtatcgaccaacggctcccgcaaggcaatctccttgatgcacgagtagtcgaaaccgtagacgtcgtcccagactggttgcgtcgaaagatatggaaggagatgataagtagaatagggagtcagcaaacgacaacgcttcccatcaagcaaaccaagaggacgcgtacagttgatcttctcatctttgtagtcctggtcctcgatggcggcaatgtgcatggtagcagtgtcagggaagatcaatccaccaggaacctgagcgattttgaaacaagaacgaaaagcgcgcgcagaagacaattttttaggcttgagaacatttaaaaaaaggtgaagcacatggccgaaaaggactcacaaggtacttgtctcgggcgagaaggacggtgtcgagcatagactcgtagagaaggaagtaacccatccactataaaagacagaagtacgtatggttacagtcagtcatttggcagccttcgagagaaaagatccggaaagaaagctaacctcggagataatgatgtcaaccgacttttcaggaagatcaatctcctccatcttgcccttgatgatggtgatctctgtgaagttacatccgagacaaaccgatgagcgctgtcatttcaggtagagaacagaccggaaagagaaacatacgatctttgaaaccgttggcctcaacgatcttggtggcctggtcggcaatgttggacatatcgatctgaaaagatagagaaggaaagcgcgttcagagaaattcgaaactacaattctacaggatcgactcacaccgtagacgtgcttagctccggccttggcagcaaacatggagagaataccggttccacatccgacctaaacatcaagaatttgagtgttaacattgtccgttgtctttctactagctgttgtgacagccagcgcacaaggatcgagtagaggacgtacatcaagaacgacctttcccttgaaaaggtgagggttgtcctgaatggcctttcggtaagagacagttcggacggtatccttgagcatctcctcgtgaattcctaagaaaagagagaaggaagaataagacacgtgtatagtgcacacaagagagcggaaagagccataccgaagtgagcgtaggagtcggcgtagctattgatatgacgagcagaatttcaaaactcatcaggtcagcaattttcccttctctctctaaacgcatgaatttgtgacggaatgaacgcgaatgatggtcttctgagaaacccgagatccaaccaggtggtggaccaagagacagctggttccactcgaaaacttgccaagcatgatggaacacgggaggaaaggaagcgatgatactaactaatccctggaagtgaggttctcaggcttggcactggcggccgaagcagaagcggtagaagtagaggcctccatggtgaatctagggacaaagagaaagggagaaggtgaagggaaagaaggaaagggtagtggtggtggtggtcaaggaaggtctatgaaaaagattgaagaaaaaagaaaaaaaaaagaaaaaaattaaagaaaaaattaagaaataaaaaatataaagaagagttcttacataagcaaaccggtccggttcattcaggttcatatgccggttcgtctctggctgctggcactcgcaagacctattccgtctgaaacatcgtccagcatcaccttacatacgaccaccatcatcagatacactaccagcatcttctgttctcatcatgactgtcaaagagcaggaagtccttccattcccagctagtctgttcagcgatcttccctcgtaagttctctctccttcggcagttctgccttgctcccactcggcactgaaacacaccgtcttccttgccaagatagactcttcatttatgtgttcatcgctggaatagctggagttgccgtccgatgggtcaacaatagatattttcgaccggaatcccgaggggtatgtgtttttttttcctttcttttctctcctttcttgcccagtatcctatcgcgcctcagtcaggctcacttttcaccgtacgcgtctcttagctcggacgaaatgctccaggattcctcacctcggttcgaaaggcatatgtcgagaacccaaacccgggtcgacagatcgtcgaggttgatcaccgacatctctaccagtcagatgttcccgctccgtcatcaacttcgacctcgactggaacatcttacgcgtcggccgtaaagtcagaagagaagacgtgggaggacgagtggttgccagaaggaattcagaagaagaagacggctaccggcggactgccagggaagaaatggaagggtggaaagaagtaaaggtttcattggcgaatgagtttatggagtcaacactactagagttcaaacatgggttatttattcctgctttcacctctacgcctgtcgagattgaccagccgagatcgagacatccacaacgaactaacagatgcctcttcagacaaacatcgtctgacttggcgaacgcaaactagcctgatcccacagaaagactcctgcctttgtactcaccaagatgtgatttcgcttgctgaccgaaacaggaaccgcgcccttcttcttcttcttcctctctcttcacctcccctttgtttttctttgcgccctttgcttgctgatcttcttctctctcctccttttaattccactctttctgtttgtttctcgcttgtagccactgaccatcactcgtccatacgtcttccgcggcctcttccctcccttattccctgtcctttcctctttttccgtctgctcgacttgtgcaatcatggaatgggacgctattccttacgaccaaatcatatggggagaaaaactcggtcagggtagtttcggagtagtcttcagaggtatgtggtcaaggacagccatgtgtgaagttctcgtagatgcagatggcttgtctgcttgttttcgtagcccctcttggtttcttcctaaccttcggatattcgaaattatctcataacaaaaccgatcgcctcgaatctcgtgtacacttggccaacaggcacatacttgggagttgatatcgccatcaaagaggttggtccatcggaccttttgccggttccacaatcttttcctataaacaggaagggtttccttagctgacgtttcgatctggtgttccaggtcctgcctttgaccgattatgaagttgccaagtactttgaaagagagtggaggattatgaggttcgtccgtagatttcaaagaagggaataggataagacgaatcaggaagagaatctccgaagattggacttgttgaccagtcggtgttcatgatccgtcaagcctcttacagagaagcaaggcacccaaatgttgtgcaggttggttcatcgtcatacaacatctatcattcgccttggactaaacgcactcactaacatcggattcgttgttgaaacgtcagtatttgggcttgtcgagagctccgcctccggacggtcggactttgttcgtttgcctgatatctattctggccctgatgttgtggccttctctacgttacttggtgtactgaggttggcttccattcttttcctttcgcgctcttggttatagtatcatctctgaatgtatcgagaacggtcagtatcactccactatctttttctgctctttttctttctgtccttcatgccctggccgggctatctgatctgtggtctatgaataaaggcaaccttcgatcttacatctgggacaagcgcacataccctgattttccatggaggcttcggatcagcttcgctaccgatatagccagggcgctcgcctatctacacgctcgaaaggtcagacttgattgttctctcctgcatgcccgagatgactagctgatcctgatgaaattcttaatccatgttgtgctcatctctactttgtagtgcatacatcgggatctgaaaggagagaaccttttgataactgcaaacaagcggatcaaaatgaccgatttcggttcgtctcttgagtctgtctcgtcatgtagtcagccagcaaagtgaaaagctgaacgtaacttgtgttgctttcatattcctctgatgaatatgctcaccaaacgtctatactttcacaatcaggttttgcaagaatagtagcgagaaatgaggatgaaatgaagagaatgagttattgtggaacagacggctacgtaagtcgaaaactggtcctcgtgtctcatcgctgcattctttctgatttaatttatacgtacacgtactttgtggtcttgactgatgtggatctgatgttttggctgatacacaaaatcagatggtacgcccttttcaatgctttgagagactgcaggcggacaaacatgctcgacaactcacttctacgaaacctttcttctttgatagtcccctgagatcttaatgggagctagatttgacctgcccacagacgtgtagggatctttcttttcattttgcgcttagaggataccttttggctgatattttttcctgatataccgagttcaatagatactctctagggatcatcgtacgtctttagtctctcttttctattttatcatgagcgcagtttatgatttacaaacgatcatccgtgtcttgtcccccagttctgcgaaattttgtctcgtcgattagtagacagcaacacattcaagcgaactatgccgacattcgagttggacattgatgaagtcagagatctggcttcgcctggatgtccggaggcattcatcgatcttgccttggaatgtgcaactgtagaggtgagtacagacttaccactatctattatatttatgggaagagcgcgcactcagttttgaactcttctacattagccaaaatgtcgacccaagatggaagaagttctccgtagactccgtgtgattgagcttgatgtcctctccagagagaaggaagtcgagcacgttggttctctgaaacttgtacctagacacaagtcaaatgcgaacaaacgaattccttccttcggtcaagagatcgggaaagaacttaaacactctacttcgtccggacataagccgagtacttcacgcacgcaaagagctggacgcgaggaggacggttcgacggaagatgaagacggggatatggatcaagaaaatttgaaggacatcttgaaagatctgggacgcgatcatctcagaccgaaagataacgcacacgacattattgacggagagaaagtaagagaagggggcgcgcggaaaaaagccaagtggggaaatgacccggttgtgccgagaattgttggagatgatgaagggaaggaaggtggtaatccatcggtctacgaggatgcgaatgaaacaatgggttcgtttctttttcctggtctgcctcaaaaggaaaaaggaacgtagttaatgatagttttcagaacttgcaggttatcaacacttgctctccgatgtagcgatctacactccttcagttccctccaacctttcattccagtttgatggtcctgacctagacgagaataacacagctaccatcatcctgcctcgatcatcgaccccagcctgggaaaatcatgaatcgggttctacgttgactattcgtgaacgaataacggtggatccaaagctgacgagcttgatcaacatacctagtgaaattccaatcacacctcctcccgttgaggctgcgcatctagttgaccaagcggcctcccctccccctgtgcatgcctcccctacaagaggctacgcgtttactccctcgatcgaatccgatgccttttcacctcctgatgtgcctacgtctatttcagaaacgtatccatccaagatccgggcggtagatctgcttgctcgtgttcgacaactcgactctcatggacgaccttctactagttcaacttcaggatctaaaccacactcagcacaaggccagactcaagtgcaaaagaaatcaacaatgacccatcggttcacgttgatcaaaccaagcttgaacggaaagatcgcgcccgtgacagggctgatcggatggggcaactggttctcgaacggtctggcaggatcgatgggaagtggcttgtcaagcgcaggaagtacaacctttgattcgagtagattgggcgccgttacagaaggcggacatgccggaaagctcaaatgtggagtttgcaagattgttcgttgcctcctcgcacctttattttccccctgtccccattcgaactaactgtttttggagttatctgctgatgattttgggatttggtattcatcagaaagtaaagccttctagaccgttcatgtgttgtgacgactgtaaacaagtcgttcatataaaatgctctatcaacaaaactgtacgttcatatacctacacatgatatcgattctgttcttttcctgaatgttgaatggtggtctgtctttttgggttcgcttaattcttgtgcgggttgaaatagacgagctgccaacctgtcgatgctccctcgacggcgtactaaatcctctgtattcatcagtgtcctgtcctctcaggtcaagctatatacatccttgctacattatatcaacaacttgcctagtcttctggctttagctttaactcttcgtggacaccttcttttcttcagtactcttgttttgtttgtctttctttggcctttgtgcctgtctgcttctcatatgctcctcgatcatgttgtctctataatttacctcgtttctcctcttgttttgttgaatgatacctgccatatgacgcgatcgttcgtgtttgtattcatcgcgagcgtatcatgctccgctagtgacctctccattcgtttgtgatcctgggcgtacatgtgtatcaacgtgaagacaacgcatgatcgtatctacagcttttctctggatgaagaatctttactaccgatatccgccagcatctgagaaagatggaaaacacagaggaagagaaaccgatcagatcctcgtccatccaaggaatcaactcgacttcagcagcaagaatatatgcttacacttcgatcgtcctgtcgtaggcgtcccggctcccccgcctgttccttcacctctcggtctcctatcaggcgagtccagatagtccattctgcctttcccgttgaacctatcgagcatcgccttcaccccgtcatctcgctctctgtctttccgagcagcatctctccgctcggatttcttcattgagctcgagctcaaactgtctcctcctccacctttggactttaatgacccgtacttgctcttatcaggtcctgaaccagacgaattcgaagcagaaggtgaagatggagcttgcggggaatccattcccatccgtctcaagatggaaggctgaattccagaagcaggagtcgactgtaagtcatttccagcgttgaacttgaaggagaaccctcgttttagacctgttgaggatgcagatgagcccccgccagattttcgactgtacggcgggttttcttggagatattctgcttctagttctgtaccggttccgccactgacgtaaggccggggggaatcatctgattccgggccgtccttggacttccttctcttcttcttttccctcttctcggatcggtctttgactcgtcgagagctaatgttagtgtggttactcgaatgccggtcgtcgtctcggtctcgatggcttcgatccgattttcgatctctcttttccgatcggttctctttatctctcgactttcccttgatgctgattccgttggcggcagaagtcgatggtttggaagatttcgaccggttgaaccaatcgtcctcatcctcatcctcaccctcgtcctccctccttctcgttttttcataagcccgatttcgttctcgttctcgttctttcccacgtcggccgacgttctccatcatgtcgggtacttccgacgtcgagccagagttaaatcgagtatgctttgagggccgagacgaattagaggtggacgaggtagatggagtccaaaaaggtgaattcgaggcgttgtaggaggagaaagcggaatagtcgacaatggggattcgagagcttctatattgagggcaatcctgtgaaagcgcgcacaccaaacatgcacgcacgtcaaaccagaaatcaataccaacgtcaatcaatcggcaatcaagatgaagaaaacacgcacatctccgaaatgaccatccctggcacaattgtaacaccagtcacccgacccatcttcgtctccgtctggatccgcctccagcacgtctccctcaaaaccgccttctctcttgaggtgctgtcgttcttcaagcatctgtctccgatcgtccaacgttaaataagagtatattctccataaggttgggcagttctatatgtttaaaaatttatggcagaatgacaaaagaacgattaggcaatcacacttgcataaagcccgaccagaagaaccatgggatcaaacttacattactgagatgtgtatccgcgccacatctatcacaatgtgtgtttcctcccccatatcggttatatctctgagacttgggagcaggacagtcctatcaatttcagccgaaagaaatcaaatgaaagttagcacagcatatctacaggtgtatgtcgttggtaggaaatcaacttcttcacgtaccttaacccgatgtccacgctgtccacagttgaagcaagtgagagctacagggcaacttcttgttgaatgttcatctatagctccacacgtcaaacactgcgttgttgatgccaaagcacagatcaagattttagtttgtttctcttctttctctattcatgaggatagattaaggtatttgagtagacttactacttcttgtttgcattcgcgctgagtatggcccctctgtttgcaaatattgcacacaatgcttgcctttcctccagatccaaactcttcaccatcagggacggtatcaaagtatctagtgatctgttatgatttgaagagtcatcattcttcgataagcacaattgtcagatagtaagagtcaagaagataggacaaacctgtttgtcttctccgtccaaaaattcgatcttgatgagttcgtcggcaaaaacctctgcttccgtcaacggagctgcctccccctgttctctatctacagtcggggcggagacttccaacgtgatgtgatccggcaatatcaacccgtctgttcccgttcctgtcgtatctgcactggcaccatcagcagtggtttcctgttctccggtggcatttgcggttgaggtaacgaccggttctgtctcccatgctctgtttttctttactgtctgaggggcaatatccacaaagaacaatgacgaatctacaggagagccgggagaagatgagacaatcggagttgaaactgaggaaggaggtggaagtgtcgaagctggtttcgatacaggtgacgaagttgacgctcggttctagtttcgttccaatccaaaggtccaaccaaaatgacagatcgatcagctttgggaagaatttgactgattcaaagaggagaacagtccagatctatcctacaaatatgcttacgtctagagaagacgaaggtagaagcaaaatggaggacgtactgcgttctgatcaccagctgtatcaactacgaacaaattcccacccatcagatcatcctcaatctccccttcttctagtgtttcttccacaggcgattcctctatcacttccacttcgctatcgttcttatcaacagcatcggtgtcaatatctatcacttccttcggttcattcttctgaacgacgataggttgcccgggttgtttttctaaccgtttgggtgcaggagaagccttttgagagcttggcttcctctttctcgaaaaatgagaaaccatctgtccgtctatagtccgttgggtgtgtacgtgcgtacgatcctgacaagactgctgctcctgcctacttgatggaggagaaggaaggagataattggcgagatacctctaatcttggcttccgtttccgtttcgacttttcggcagcctttcttttttggcacgattacgtaaccgatgactatttggagtcagggaaaaggttcatggcaagaatacagtcatagcgcgaagatatcaaatgaaggagaagaaggcgaaaagagtccattgcgcggatagaaatatgtccaaaaaaataaccataggtacagaagagcaaggaaattgagaagaaaaagaggggaggaaaaaaagaagaagccaagggatgatactgatagcagtagtcaagagacgtatgaacactggattgccacaatcctcttcagaacgatctggacaccatgactatgaggttaagcctgccacgtccaatcccaatgactgtgatgagaaaagaaaaacgtcagtcggtatatacaaaagaaaagaacactgatgtacggcaaacacgaagatgggaagaagagggagagaaacgaacctcgatttcggccagggtgaacggacattcgaagctgacagagttcttgatcgtaggcgaaaccgagatctaattagatgaggcgaaagaagaaaaaaacagcgttccgtcaagatcaatctaaaccttgtcacccagatgagggttgaaacgaatagcagccgtacacttagtaccgaaatcgacatatcgagggtataatccaatgtaaggtcctttttagtggagcttgagagaaagccgcaatcgtttataatcttaatgtaatcaaagcacacagaatgagggaatgagtcaggttagacagtgagatgccttcgagagcgagcaggcttacatccgtgatgatcgttttactcgtatcggttgaagattcatagatcagctcgaatgggacggtaaatgtggttttggtattggatttgaatctagatgacacgtaattcaaggaaacatgaaaacaggtgagaaattctgcgcgatgcgagatgtcgatcaaacagaaacgaacttacttgactgattttatggatctggtggtcatcggttgccatcaattcaggaacgtccggagaaaatatcaaagagaaaaagtcagatattgaatgtatattgtccaaagatttcgcttgatagaatccgaaatttgaacgatcttacccctctccgactgatgagatcgttaagaaggaaacgcagatagttctcaatcagtctaggtagtcttcacaacgtcgatcaaagagagaactcacctgagttggtgacatcgggccagtatgcgagagcttccacgttcttgatcgacgcagaaaagtagtttggattcaatacttccaagttctagtttcagcacggtgtcaccatgaacatgtcagtcagtcagttgtacctaatagcaagagagcgaaataagaaactggacgaacaacattgaactctacggtgagagctgtcccgttgtaagcgggtgtgccaactttgacgctttgaacgatgatgtccggtggctgatcgatcccataattgaaacaacgatctttgtctgtcaaatctcaaagacttccaactttgtggatgttgagaagaaaacgaatcaacacgtaccttgatgaacattgccaaggagaagacgatcgacaacagaaggatgatcccaaacatcaatgtgcaagcaagacaacgtccaaagaacctcaaacctccgccctggatacacacaccacggataattcttgatttggtcaggtgattgtgaagattccctcaacgtgttgacggtcaaatgttgggcacaagcatacataccctcataaggatcttgcccctatcctgttttctccattcacctacggatatcgtcgggggcagagcagcgagaacaataggaggggcagggcggacgtcagctttctctgggtcgacgcttgatacaaaggtagtcatagcgagaatgggcagatagaaggtcgattctccctgtacggaggaatatgtgagtgagtgagtgagtgagtgtgtgtgtgtatgtgcgtgtatgtgtatggatgcgtgtgttggtatgaaggaacaagagttgcaaggaagagagcgatgcagctcaaaggaggaacggaagatcacttgggcataacagtacagggtccccggaacctcttcaaaagaaggatatggaacttgaggaggaacatcaacaactaacctaacaatccagtcgaccgagggggcgccggtggcttctcctctccatagacagcgtaactgtaggcggattgacgagcatagccagagccacctgttgcgtagttttcgtatggtctctcttgggtttcgtatgctccttgcgagactgagaggtgaccaagcagcagtatcggcagtagaagcaacagcagcagcagtaacatcatccgcaacatcggcatgcatcagcagcagcaacaacaacatcgttgaacagaaatagtcgcaacgactttacaaaataagaaaagagaaattcctttacacgcaccctgaccggaatacggatctctgtatgccatcgttgatgctgacagtggaatgagagcccgtagtaaaaaaagaaagcaagctcggtgtgatggtcgagagagacgttgcttgatgcttggccttgttgctgctgatgtttcttcggacagcccctctggcaaaaaaataggactgcggaagagagaggccttagatggtgaatcctcacacatcaactttcttgcctcacacgagcacgaacagcgcataggtcgtatacaatacataaccagccctttgcctatgagtgctgtgtttaacggtctgccagcagatgatacgaatagaatacaacgaagctcattctctaaatatcccaatgaattctttctgttctacaaagttttcctagtccaactcccattctcacttcaactcgactaacttgccatcttcggtaatctggcttcctccgccaacctcaagcagatgccagtcaacctcaactccgttctccaggaatttcttttggatgctctccgccaaggcttcgaagccgtgggtggccagagcgaggacagtcggtccggctccagagagacagattccaagcaatccgggatgggtcgttggagtgtgggaagaaagcacttgaggaagtccaggaatctattgtaggaatgtcacaaaagtgagagggatatacgattggggaaaaaaaagaagaatcaaaggctgtcagtatcggagaggttcgtgttctcgcgcgcgcgcgtgcggatttcaatatcatgacaagccgccctcaacaaaagaaactacatacaaggacgtttcggtaaggctgatgaactcggtctttcatagcttcgtagatcagatccgcatcaggaggggatcgagcgagcgctgtggtcaagacagccaatcgttgcaagttgaatacctggtagaagggaagtagaagagaataatggacgacagaaacgaaagagaaagaagccaaggtgtcaccatcgaagtttagtatttataaaacaatcaaagaagcgatgcatcataaagaaagaaaaacgatagacacgaaccaaatccttcctggtgtatgcttccggcaatacctctctcgccttggcagtggagagctcgaacctaggaacgatagcgatggccttgatctccttcgcccaaccgaactggacgtagtggccgattccaaacggtgggataggaggatccattccccagttcggtcccgcatccgatgggtattcgggcaagacctcggccaaagggaccgacgccgcgtgagtctcctcgtggctgagctctcgaagataacttccgacgaagccaccgacgagcgcggcagagacgttgtctgggtgtcgctcgaccatgagcgcaaaatcaagcagtcgagccaaaggcagattaagttttccaatgtgtgatccgagaatgacaccaccgatgaccgccgcgccggacgagcctagacctcggccgaaagggatttgattatgaacgtggatggcaaggtgaggaggaaagtctcggatcccatgggatcgaagaacgtagagcgcagttctggtgatcaggttcttgtaaggtgaaagtggtacgcctacagctccctcgccctcataggatagcgtggtgtcggacgggttggaactggcgtgatagtgatttgatgggtttagcgatttcagttgcggtattgttttaaaacgaaaacggagaccgatatgatccaagcgttagtattgtggtccatacgactgatctatctgcaaacatagatgctcggccaagcaataataggaaaaaaagaccctgaaaaaaaaagagaagaagaacaagaacttacgggttgatgctgatatccatagtaacatgaaggctgagggagagtccaacgacatcgaaacctggtccgatgtttgccgaagtggcagggactttgatctggaactctctcggttctgacgggcagtctggcatggctgttagatagatgattctgacgagatggaattagcaaagaagagagatgttgtcgatagccgaaggaagtgttgctttttttccgcttcttctttgaatttctggcaggtaaaaagtgggccagtcattagtcgtatgctgacgtaagcaacagttgtaaccagcttgaaaggctacgcgttaccacctgtgccaacgacaaaccatctctccttctttctttccatcctctcatacatcaaacctcacaccacacactcaccactctctctatctctttcagtccttctttcgttcgtaatcatgtccggtagatcccagcgtgtgatggttcagcccatcaacatcatcttcaagcaccttcaatctgtacgtgtctactgttcttctcgctagtttttgcgacttgtttttccaacaagctttgcatcaatcgatatcaatcgaccgagtacattgttcgtctgtccgaaagatccaagcctgatctgattttattgggatccctttatttcctattgtcctcaaactcctgtcatccggaatctgtgtagaaatccaaagtccagatctggctgtacgataatgtgtcgaccaggatggaaggtgtcatcatcgtacgtatcgcccttgttctgcgtttgagtctagcacggctggtctcgtccttttgctctttttctttctcctctggccgaaagaaatcagcaaggaggtccatagatgcacctagacaagccctagcgctgtttacgagtctaaaatgcaacgtcctgacgcgtcactttctttgttactcttcactcttacccgcacgtcctctccttcttgatcatatgcatcaccatgtattctgttatcttccaaaacgaaacggcttcttaaatcaatggaaaaaacaataaccgacggaaaacaccgtaaactaggggttcgacgagttcatgaacgtcgtcttggattcggctgtcgaggtcgggatcaaaggagagccctcaagagttgagcttggttcgtctttcttctctttctatttctactggaagaaaatacgctagaaggatcgatagggaaccgaaacgagtgagaaagaaagatgaggcgaaagacgctgacgtcgagacaacccggatagatcaagaaagtacgttcagactgacacccaacttttctctccgtttcccactttgattcaacaggtcgaatccttttgaaaggagacaacatcactctcatccagcctgtttctgcataaaaagaaaaacgactataaacccaactccttcgattatctcttgttattttgttatgtctgtcataaaaagaaacccattttctatcattctatcttctagttcattataacatcacgactttgggatcctcaaaaatatctttttcctttccctcttgtgacctatcgaaactgagcataagagaaacgatgacaactgggatcgagtcctatctggagtgacgatcgcttgtctcaaaaatcgctatagcaggcatagaagtgccaatgtccaagttatttcttcaaaatccatgcatcatctaccactctactctcaaaactcgctcaagctcgaagagttggtcgactaggttggagcagagaggaaagaaatgaagggcgtttctctctcttcgctccttgatcttagatctctccacaggactcgacaacaatgggtcctcgggtccttccagactgagatccctgagcctcgatggccttgacgacgtccataccctcgatgacctcaccgaacaccacgtgggctccatcaaggtgaggagctgtcaggagagaaagtcaaataaagcactcaatcagcattggaagaatcacataaatcctatacttggccgaggagaacgcttactagggacggtagtaatctgaaaagccgaccaagagtaaactttgtcaattggtagtcctgagaagaataggagctatgaacaagacacatacaaagaactgagatccgttctgtaaaaaaaagaagacagagacggttcatgttgcacagttatgagcacgaaaagcaaaggaaaaggaggctgaagagggatgaagcagaacgaacggtgtttcggccggcgttggccatggaaagaagtccaggcttagtgtgtctcacgtctgttcagttgtcaatgaaaagaatcatggtttattcctgtgcctcgaaagcaatatagacaaaaaattgaacatactgaagttctcgtcctgtgaatgagaatcaagaatcaagaatcaaggtgaccggtcaatgtcaaggctagatttcggacaggaagaagggcgctcgaggtgacgtacagcgaacttttcaccgtagatggactttccacccgttccgttctgtcgagtgaagtctccgcctaaagagatagcccggttggagacgtcagagagatccggcactaaagagatctagaaaaacaaagaaacaacgacataccctgaagcatgaagtctttgaagtttggaacaaagattgacgtcagcctagtggttttgcaagagttacaacaggaaaaaccagaaaccaaaaaactcactgggaataactcggtggaagggggacttggcgtatccgaaacctgtatatgcgttggacaccgaaacagaaagaaaaagcgtaagaagacgttgagatcgtgagaaatattgacaaaagcaaaagcgcacccttctctccggtgcaaagagctcggaagttggtggcagtctgatcgggccgcaaaaacaagacagatctttaggttcattcgaaacactatatatggcaatacatcgagcgaaatcttaccttggggacgacatctgagaaaaaaggggcatacgtaagagacagtcaggtcaaccgaaaggttatatcccccgagtttgatagcttaaaacgtaccatcgtagagcttgaagacgattcgaccagcaggcttctgggagatcgaaacatcgaactatgtgaagacacaacagatacaattcaaccgtgttgtcagcaggctgtcgacgagaatgtgatgtaaagagattgtacgatgaagacctacgaaaacgttgctagcaaaaggcgatcgagaatggcaagcatcggatgtaagaatacgaaacaaacaagacaaccaaaggactgcgaaaagccgtcactcacgacttgccagcggcagaggagaaggatcgagcggcagccttgagggacatgttgatacgaatcggttgagaactaaaagagatgaaaggattgatggagtggatgttgaagatcaaaaagagagcggtcggatcgaaaagatcctaaaacagggtctaatacgtttttgtaatgttgtagtttatttttctagtttattttttcagtgcgctcatcatctcagcatacatccatcacagcatacacacacacacactcacacaactgaccaaccatgcttagacagtctgctcttagattgttctcttccgccctcaaagggatgcccacacggtttgtcgtggcatctaggctgcctatgatccatcctgcgttccgttccatcgcctcttccgccgtcaacaggtctgaccggttgtttgatggccttcaggagtacaactatcctggccgggcattcgttcaggctgtatgtccatcttgtgcccgtgaatttgtgtctgcagcagcacctgatacacatactttttgttttattcaatgaacacagcccgctcctgaattcaagggaaccgtcgtcgagaaaggagagtttaaggaggtttcgttgagcgactacaagggaaagtatcttgtccttctgttctacccaatggatttcacgtaagtgtcatcctcgcctcgacagatggtacatcgtgttcatgtgattatctttactcttgacaccagctttgtttgccccaccgagatcctttccttcgaccgagctctctccaagttcagagagctcaacaccgaggtcctcgccatctcgaccgactctgaatagtgcgcttctttttcatggcccatatctcctgctttcactcgctttgatctaaccgaaactctgcccttggttgttcgctatctcttgggaatcagctcccatctcgcttgggctaacttgcctcgacagcagggtggactgtatgtcttgctcgcttgggtttatctatccatattgacagattgtacctttcgctcactttttctttcttttctcgacatccatagtggaccggacctctcaattcccatgtttgccgaccgaaaccacgagatgtcgtccgattatggtgtactcctcagggagggaggcatcgcccttcgaggtctcttcatcatcgaccctggtgcgtgcaatgtcccgagtttaaaggtttttatttcacagttgacttacgtttgcctttctcatacaaccctcgtgtacacagagggtatcgtccgacagatcaccatcaatgacttgcctgttggcagaagtgtggaggagaccattcggttgatccaggctttccagttcaacgccgagcacggagagggtatgttaacttctttctctcttttcgatatcgtgacctattgctgattcgtcttgcatgtcgaatgaaccaaatctgcagtctgcccctctggatggtgagaatcctctttgtttctctcattcacctcgcagcgtacgcacaagttatctgatcctgtgtgttgatattgcaaaaataggtccccggagaaccccgagtcgatcgaccctaaggatgccatggcttacttcaagaagcagtagacaaatagatttttggtctttatctagattcattgttacagaggatacttgactatcatgtcgttagatatatcaaggtgcaattctcgatcgtagaagtgccgttgatgaaagaagagagcgtgaggagaataaagaaaagaaaagaaaagaaaaagaaaaagaaacagaaaaagactagatataaaacaatatacaagtacaaactccatctccttctcagcgacgacaacgacgacgacgacgacgatcatcgcttcgacacaaccacgtacatacgtcaaggatcactcgcttaccctctctggttcatgtctcttgctatttaccgcccatgatgacgtccctaactccacaagaggcctttcctcttctatcctctgatatcgaccccgcttggcttgtccaagctgttcttctaatcacctccgcttcaacaacagatctgcccgacattcagaaggccctcgaccgaggcctatctgtctctgcctcttctgaagaaactgcccgcttggctgtcgagcacactctctcttctttgtctggagaggccaagaccgcgcgtgacgcctggcaggaactcttgagcgaccaacaagagctgaaggacattctcagtgccaggtcagaattaaagaaaagaagaaatagactgaacgcttggttggagctggaacaaagtggcaatctcgatgataaccatgagggagtaagtgaagagagtttgcccgatgcgagtggtgagactggtaacgatgtcgagatggaggacacggaggtcgtgatagatgacgatccgtgggctcaagagagcgatgaagacgaagagaacccaataccgtcctcctcttctccagttctgtccgcctcttcaaagacctcagatgatgtagataaacctgtcgtcatcccgagaccatcgtctccactcccatttaccctcgtggaactcttaacgaatcctgcattgcatctcgctctccttctcacgaccccaacccaacttcccaacttgcttattttgatcaaacacctccattccgagcttgttccctatcgattctccatcctcgaagctattccagattgggtccctcctgaagaattccactcaatcctacctcggtgcgaaccgtttggtgaaaaggagaccgaatgggctactcagctcatttcttcgtcggacaaccaggatgattggacctgggaagcatttgctcaagaaagtctccagtcttcaaacggctcactttctatcgacacaacctactcacctaaaccgtttccagcaaccgcgtcggaagtttcagactggtacaggtcccgggtggaatctatcgaggcaaattcgggtctggttgatatctcgctcgtctacgtgcagcacgcggcttcactttcggtccccaatctggactctttgggcgaggatctcagtcttttgtctaagctgatctacgacgcgccgtctattgcatcaacctctgtcttgcaaggctacaaaaatggcaaaccggagcccagttcaatgttagtagataaagacgattggacgctcgctcgatggagaacgtcttcaccagaagaaatcacagctggatatctccgattcgcaaccccatcgactattatcccactctttcagtcgcttgtcttcccatatctatacgtattggtttctcgatcagaacgaacagagaacccaaaccctgggcttccttctcagttagttcaatcttggctcctttctgccccgttggatctagccgcccaggtgtttgctgcctccaaagccatccttccagagcatgaacgaattctcaaacgagatgatgaggtctctcgattggcgctctccattctctacggatcaactgcgacaaaccgatgggacgtgatgagctcaatttttgaatgtatgcccgcctgggagttcggcccggacgacagagaagacggtgaaggcgagaccactcttctcgcgctagctcagtttcttaaaccgagtccggcagcaccaccgccgccaccggccgaattattgacatttttcaagcctcttcagccaccagcattaagcgagttgttggacacgcttgatgttcatctgacatccgcagaaatgttggcaaagtggggagttccagcgccgctgggttggttcatcctttcagcgcaggacaagcgagagcagctcgcgtgggccaccaggttagctaggcggggcggagaaaaggctgaagcagtggcgaaagctacgaccgtcagagggaaagcaagggctggtggtgattgggaggctttgctcagtgatatgaagaaattaagaggggtcggtggaggtgggacgttcggaatgttggaggaggttgagatcgttaagatttattttggaggattgctcagtttcggaagtacgttcatcttggatctttgtctgttattcattccttttggccttactgattgtctgttgttctttatttcttgcatcgatagatttcgcgacggcaaaaaagttgttaacaatccgaccgcctcttttggatgcatcagtcgtcgaatccttggtcctagctgcttcaatcgaattctacgaaaatgcagagacaggaaacctccatgaaggaaatatgaatttggcatatacctggtaggaacacttgttcttatgatgctgaggaacgaatgtgcttctgactaaatgatttcttctggatcgttgtcttttctttgtttctccagcctgacagttgtagcgccgcctactccagctgtcattaaagagcgtttgttcatcgaagccacctcaaaaatcgcttcttacaacctaatctcgcctcaatcaaaccttcccctctctccacttgagatccgattgacaaaagataagctctcgcttgtatctcaaatcctatccacatccgaggacgcctataagcattcagaggtcatcatcgacctggtcgaaaaacttggattcgcaggcaacacagcagcggaggtgaagacgctgggtatgttggcggatgcggcagtgcagagtcagtcgacagattgggatcgaggtgttcgatacgttgagaagatgatcgaagccgttcgtgggttctctatttctgcatcatctcgtccaatcaggatggcagagagcgggaaacttcaaccccgaggatcggcgggagatagagtacccacaacggaagagatggaatcagaggccatcgaagtctgttggagaacgtgtttccaattcggtaaacaatccgaattcaaagacgtcgatcgcaaacttgatcttcttggtcatgcgctcttactctgtccgggggagatggtgccggatttgctgatttcttggcgaaaactcgaagagacaaaccttgccaacccaatccattcatctatccctggatcaacttcgttagcgacgggggctatgcaatcaggcggaagacagatcagtacgcgtgaaagattattctcctctgctcaaggacaactcctcgactggtctcattcttccaacgcgctgctgaacggcacatcgttcgatatatctggatcaggtcatcgaaaacgagatttagcggctcaagcagccagtaggacattcaatcagttgtcttcttctctttcttcccttcgacctaccgttcagacgcccacgtcagcagtcactgtagaaggagaacaaggaagagatagtgaatcaacacccagtcggtcgggctcgccttctgtggcaagtcttttcgcagggggaggagggcatccggaagaggagattttgaatacgggtaggagggcgttcactagaggtgtcggttggctgttgggcgcgaacgaggcggagatgggtggggggaatatcatttgaatgatccttgttctcgtcgtgaccagaaatttgaaaagctcatgttaagaaaaagatagacaaagatggccaaaacatagcatatatatcacggaagtctaggaaagaagatgactatgaagaagactttgctcggccgtctagttcaagcagaatcgctctcgtcaggatgatgttcgatccattctctgatgaatgtcgagctcatttttgcctccttcatcttcttcccatcttcttctccaataccctctcctagatcttcgtccgtcgtatgggacaagactccaatgatgaacgtcttgaggccaggaagacctcgttcagctcgcttgtcgtcaactaagaggatcagttcatgagtcgatcaagaagagcagaaacaaagaaagatcataggaagacatcagaagaatcagattcaatcgcgggagaacttgggcgcacaagctcttcagaatatcgactcgtcttgtcgaggaacatgacaacaatagaaagacgaaccagcttttccacccgctacggtctcccaactgagtaccaatgcttggatatctgcatcaaccgctgtaggtccgtaaacgtccccaatgggcaccacgtcgtaatccagtttgggattaactcggcggaggaatcgatggacgagcgcgagtcgaagggaaagtggttcaagctgatttgcataggcttttttggtgagtagtggatcatctgattacacattttgtagtagatgtacaacattgaagagaacggtgtaagcatgagataaagagtacttgaaggaaggcttacgtaccgctaactcctacgatgagtttacgggacgtgatcagcgcggccattgtcaaaagaatcttgtgccctgcatggaggtgatcgaatgagcctatcaagttcaagtgacaacggagcaagatacgttcagtcagtggaaagtgcacgtgttgtggacgcgatgagactgagacgaacctcccagcgcaacaacaggaaaggtcgtggaacagtcggtagatgttgtgctctgtgattcgggggtggccgagagagaaagcgaagagaaaggtaatgtgatgatttgtgtagaggatggattgatagggatctgaggagggacaggctgatcatctgtgaacggagccagaggaagaacagactgtcagcagttcgttaacttgtataccaagagatatggcactgaccgttctcaactctgaagagaacatcccagcttgtctgtttctcagaggactctgcccgttttgatcctacttgcgttgtatcaggcaaggtgctgacctctcctagtccttcaaacaatacatcaatgtcccaaaggactctgcctaagctctgtgctgttcggacggcttcaccatatatcttgcccaggaaggattggagagtatcccattggatggatggatctaacttgaggtttgatgacgatgaaaagaggggaccagtgaagtagattgtgagcgctttggtggtttgaagcgaagcctgtcttacagaatggaggtagaccgatgggctctgtactgtgaagagggtaggcagtggaagaatgacgagagctctctcgtacgtttggtcggccatctcatctgcttactcctcgttgtcgtcgtctcgaggttgcacgactcggcggtgagcagatcgttgggcgggtgtggatacgcttagtcatcttggaccaactttcggcagtctcttctgctttcgctttacttccaaccatcatctgaacacgataccacacgtaccaatatggcacctcctagaaaagaagcaccgtcagcttcatcctcggcctctcaacaatccaagcgtgtgaaatttgacgaggccggattggaagcaacagcagatatagatggagatgaagacgatctagaggacgtcaaagtacgtcttctgaagcttacggtttggttctgatcatgctatacctttacctcaaactgaatttcttattttcattctcatcagaatcgaagagaagtcaacactcaaggctacgactccgactcttccgatgacggagaaggcgttgtcccatcgcgaaaacctggcgcaaaccctgaggaagatgacaactcagacgacatgttcgccgagcctacatcttcagcagctaccaataacaaaggcaaaggcaatgccaagtccggaaaagacaagtatctcggacttggagacatcgaaggacaagaatttggaaatggagatgaagacgacgatggattcaaatcagatgattcgaaggatggaatgggttatgagctttcgtctttcaacatgaaggcagagctgagggaaggcgcgttcacggaggacggtgcctacgtgaataatgccaaggaccgactggagatccatgaccgatggatggacgggttggacggaaaagcagagataaggaaggcaagggaggcgaagcggaagagagacaaagcagaggaggaacgaaagaagaaggagatggaggaagtcagggatggaccgagacgagaagacttggtcgcagaaattgtcgcgcttctggagccctcagaaactgttctcaagggcctacaaaggttgggagctggctcgggcagtggaaagcctggcaaaagattgacatgggcggagaagcagaaggaacggaaaagagcgttgacgtcagcagcagcagtagccgctactcctgcgccttccacatcagaccatatggacgccgagccattagcatcgacgacgacgacaacggaaccgagcgctccgagttcattcgaccgactttctaccatcgtttctgatctcacagcacttggtcagcttgatctctataacatgacccgtgaagctctctcacgactccttcctccaccagcttcttcctcagtcgccaacagtgcgtctaccactggccaatcgtcagaatctgtcgttcctccctcgacgtcttcgttactggcagatgatggatcaaaatacgagtaccgatactcaatggagtatatccgatcccttccggaatcagaacgacctgtagagcgtgaagtatttggttagtgctttcctctcctcttccttctccttaccgtatcttaattacctaaccgacaaatcttgatcgttcaggccccttcccgaaaccttcgatattgcagtggagagcgcaagggttctttggtggtttaggaggagcccccgagagggtagaacttcgaagagtaggggctgcacctgagtgggtaggattctggaccctatttggttgatcaatgctgtcaattatcaattttctaggaaggagtgttttgccgttcacatgtttcagtctctagagtgctcaactcaggtcattgttagcagaaatacatgttagacgactggcagagaagggaaaaagagaaaagggaatacggggggtagtatgcaagactttatgtgggaaaagaggaagagaggtagggtcgtaagaagggaaggagaagaagtagtgatgtagcgaaaagtatagaaaggaaagaatgaacgggacaagtgaagaaagaaaccgaaaggtgaatgaataggggagagagaaaggggacacaggacgagagtattgaaaaagaaaagaaaaagaaaagatgattaaaagatgaactaaatcaaattctagtaagattcacagactacaactcctcatcgacatcgtcgatctgagaaggtttcaacagacccggaaccctcatagcggcttcccggtcgtccttggccttctgagctgtttcggcatccttgtcaaccaggaaggtctcagcatcttcaccagagtactccttcattgtgatcaggaaatctcgtagagcgagcttgaacttgttggggtcttcatgagcgacaaacatgagctcgacactctgtcgaatctgcgctggctgcaggtgagggaatgcgctgcccatgaggccgttgatgtaatctctcagatattcagcattgttgatgttgggattcggcacacttgcggggtcgaagattggaaccttaaccaagccgttcatggtgaagtgaagcagtcgctgcaagatgacactctgagtcttgaaacctgttgaaagatatgtagttttaaagagctcagataagcttctttatgaacagatcgatgtaaccttgcagtgagaacgatgggaactgacccgacttgtgatcaggatcgacaagcacactgagaatatcagtcaccaatcgaaccaaataaagttggaagaaaccatcagcgattccgagctcctcagtcttggcgaagttatcaaccagctcgagggtgactaaaataagcacgatagagaaaaagagcatcaccagccattgtcagttgatgtatgcaaacgcaacacatgaatttattggattcgagaaactcacagtttagtccgatatcagcaatgtcacgcatactatgcttgatggcccagatcgcactatcgacgataagcttgaatgttgggggaggaagggatgcaagagctgaacgaaaacaagtcacgcaaatgattaacacatagtcacgtttatatatatatagatctaacttaccagggaagcagttgagatcgacagctcggaggaatttgaagaaacctgatcgatgctcagggtactcggcaaagtcctgattgatcatggccagggtgcattcaaacgttgcatctaggatcggaggaacctgctctgtcaataaaggctacaaagcaacgagggaagataactgtgtcagataaactgcgctgtgttgaaaacattttgtggtgggcttactccaagacgcgagacgatggtagtcatgacgttgagaacctcagcatctcgagctgcagggacattctggttgtagtcgcccagaacggcgtcgagaagcgatgggataaggctggcgttgacctgctccagatcttcagccttcttgatgtaagtctccaccaacttcagaatctcttttttgattgttcggagtcctcggactttgggtgtcttggtggcaataaggcctataagtgtttggtaaaggctcatgctccaggtcagagacagctttcagatataaaatagcgaatagaaaactcaccttgctcggccacagactgactgatgataccactaacggccttgtaaagccccagcatatcactccaaattcgaccaagctgaggggcgaaaaaggtgccaatggatccacaagcagagacatttgttttgagaatgttggacatgatcttcacattgtcaggatttgacagcacatcaatgttgctagcagcttgggccataagagagtcccactattgaaaatggccaaacaacacaacatgagtatggttctctgaaaattgcatgtcaaagactttgaaggaacatccgcatacagcgttgttgggcatctccatgagcttggcgatgagccgctcttgcgtgggcttgttaggctgagcagcaatcatgtagccaacggcttcgtagaatgtgtgaacctagtttattggagacacaagaaggcagcgtctgaatatatatttactatgaaaccaaattctgagacagatgaaggcgtacctgctgaggcgagagatcgactgtgattcgatgcaaagtgcggagaatttcatcgatgaagggctcttgctctccagactgctgcgccacaaagtgccgtcgacatttttgagcaatcttgatgaacgtatcacaagccatatcctggacacctgtcattgagaagttagaggaaaagagacgttattgttagacagccatcatctcgtcaagagaaaagttttcttcatacgctcaccttcatgactctcgtgcatgaactcgaacaacttgttgacgaccgtcttcaagaacttccaatgagctctgaggaaacgagggtactgtccgacaatatacatgatatcggacgccacaacggccttgttgtccttccctcgcttgacttccaccagacctaaaagatccttgatgacctgaaccaagaatcgcttttcagcctcctcatctgttcaaacatgatgataaaaacacatcacaactggtcagtcacaagaatactcggtatgatgaagtgttgcagcttactcatagctcccgaaatagagccgatagcccaacaaagggtgttgaggtttgcccaagaccactctgaaccatcaatctgtagaagagatgagaagagtcagcgcatgaatcgcgacatacctgaaaatgacggaacatacctgtttcgataacttctcagtcataatgttttcggtgtcgagaacatccaagtgagtgaggtacacgagaacttccctcatacttttgtaaagcacgatggtgtctgactccttcatgaactctctgacgacctctccttcatcgttctcaacaaccaaaacctagtttgatgatgaggagaaagcgcaaatcgaaaatttgtcagatctttcttgtgggctcaaaaacatgaaaactcttcgcttacctcttccggcttgaccattctctcaatcatcaccaatcgcaaattcgacaagacctcggcataaatatttttccttaagtttgcgctaccaagcataccagctcctccagttgcgccgactcccaggttcaagctcatcagagggtggatatcgggtatcggtagctgcggcgattgaaaaacaagagacacatgatgagaaaacaggaacagagtgaatgagatcgagaatttcatcaacgaaccgattgaatctcctcatatagttcagcaacaagcttggcccaatattccaaacagatcttgaaaacctcccgctcctcgacttgcgagattttgaccaagtagaggtgcgcgttgagaagaagctctttgttctggtcattctctacaagcttgagatgctctcgaaggaagtttgcaaggaaaagagcgagattttgaatgagctcctgatcggcatctgaggagtcgttgtaggcaccagcgatgtctgtgagatagaacaagagaaggttgagcatttgttttcagcagctgagccactgcttggctgaacaagataaagcgctcactagtagacggaggaatcattttgttgattgaagtcataaccatctggaacaaggtcacaaacttctggttgaactcggttcctacactaagaccaccgatctctgaaagacacttgagagtaacgttcctgaactctgggacctcgaggaactgagttgtgtgaataattgattgtgtaggcaaacgaatgtcaacgctaagatcacaatcaagggagaaagttggaaactcacccgcgatacaaggtgatcgatgatagcggtttcgaaaatgtagcccaatgggatccaatttaagaacctcaacaatgtttccaaagtagccttaatcaagctaggtttttgggccttttccagcacctcagaacaaagctggaaaatttctgaaaactctccacacatctgatacttgagagctttggtcttggcctgggtcatctgctcggcagagtaatcgaagatctcttcggaaagaagcttgagaatcaccatgttgttctcacaaagggaaagggaagtctttgaggatgcgacaatctatgaagaatgaacgaacaaagttgagaaagatggtgagttgatgttactgattcggaagagatcagcaagaggtatgtgcggatagacttacttctggaataaaagcaggccagtttgcaggccagtcttgcttaagaacctgtgaagaaagattatgccaggacagataagtatcaatcggatgtcaatagcttagcagccagaacatatgaatgaacttacctgaaccagaataagattgagcttgtttatgtagactctctgccgacgaaggtttgcttcgtccgaggagatctccataatcacaccaacaataaagtttctgattcctgtaaatttggatgagaggtgtttattcaagaagcaacgtcagcttgtagatttcaggcgtacacatgacgcgggcaacgaagatattcttacctcctctctgctcggcaggaagcgccttccaacgcgtctggatgagcttttctaagacttgtagaccaatgtactaaggtatgacacgtaaaaagagagaaaagactcgcatcaggttgtgaattcgagatgatcatgctatctaacatgccacacttctttgcacgtactttggtctgtagattcgaagcctgctgcaagacatttggaactctttgccacgcatcagggtgctcctggaactgtgtaagaacctgctgagccatttgttgctcctgtaggatgtaaaaacacgtggcgatgatatagcatacgaaggaagagtcagtcatgctcagcgagagctcatgaacgtggaaaccgatttcaagaacgacttactgccggaggcccagtatagaatgcattgaccacccggtccagaaggccaatgtctagctcggtcgagaaatcgagaatggcctacgagaacgatgtatattcgatttaagatggcagataccggagaggaaaacataatgagacaggtggagatttacatcgagcaatttgatagagatggtaagcacaatgaatcttgtggcggagagagaaagctggcatcgctcagacttacgtccatctcgttaggtgattttagggctgttgcagatgaactgaacggatgactgtatcagagcattcgaggagaagatacaaaggcaaggatgtcaagtcaggttgctcggttggggatgtatctaggtttatttttttccttcaaccctgggaggagggaggaataaatacgactttcggaggcccaaccaacgccaccacgacatatgtctatctggcattcttccatatgcaactcaagatcaagaacgaatcagacatatacgtacaatatttaggcttgaatagctctcttgatgaagactacctcagatattagatggataggaaagaaagaaagagatcaaagaaaacggagtaggcaggaacggcggtgagatcgtgtaggccaggtaagtgggcttttcataaataatattcaaatatttgtttatgtctatcgtccttgttctgtattagtctaaatcagacaatctataaatcttcgaaatctaacgaaaaccaaacatctataggttgagtgtacagtaaacccctaatgaggatggcccacagtgtgggtcctgacctcctccatactactttgcctatgctcattcagttcgtattcaaatgcagaggactccatccttccaggatctagttcacccggtccgttcggccccgtcgacgaggacaatgacgaaaagttgaacaggtttgatgcccacaaccatgcttcgtccaagacaccttcgagtccaactcgatcttctgcgtgctgttcttcgggcaaccgactcgcctgttcatgttccatctcagcttcatggtacaagacatccttgacagtgacgagaccggcgagacgaccttgatggccgacgagaataattcgggggctagggataaagcgagaattaacatggtgctgagataacacactgacatacatgttaagactcgtgagaattatacataccccatccgacggaacagttgcatcacgatctctaacggttgtttaggagacacacatagaggtgtctgaaaattgattcgaaaaatcgataatcagtgaaccaaacaaccaaataaagccacaatatcggcatcttgatatacgcctacctgatccacaaaatttccgaaatcaacctgttccctgcgtcgttcccctccttgctcagctgcattgatcgtccgagattcaaacccttccacttcttcgtcatcaaacccaaagtcaccccattgattgacgcttccgtctgtcgaaggtcgagtaagttcatggagctcagatggcgaaggggcttccatctgacggaacgtgcatattgcttgaggagaaaggtttcggacccgtttcgctttgtctgaagacagaattcaagtcagcgggtacagatactagatagatgccagtgatgtatcaggaggactgattgctaacctaaagcgaaccggagctctgctcttcggatgtaacctaaaagagtattatcatcctcattccttactacagggaacccctgaacggacgtgttctccatgatatcgtctggcaaggtaagacatgagagagaagagaattcaattgattgaaatctgctacagatgagcacaacgaagaccacaaaagagtcgtatactcaccaatctcagcccatgtcatgccgtctccgcgcatggtgatgatatccttcttcatgatgtgggatacttgagaacattcaagaccagagatatatagccaacaacaatgtgttttcctccacttatgtcagcaaacagatatcagaacgagaaaaggatcatggagtattgacgtcaactgactgggttgtaggaaggcttcatcgttaccctccggatcttctttctccaggaatggatacccgttgaacttgatcatttggtcagcgatcccaccctcgccaaatgagtctgataccgcctttgctacaagtactacaatctacaggatcaatgaccccaacgcacgcattcgaccagagacagatacaatggttgtaagaaacacaattagtattattcaaacaaggaaacgatccgatcatgggtttgtagactatcacaaaccatggtaggcagaatataagtcaacgcccccgtcaattcaaacatgatcactaccactgtgaccgtcattctagtgactccgctgtcatcgggaaagcgccgaggagcaatagaggataagattggtcaggtatttcggagtgaagaggataggggtgagaaaagttcgattgagctgatgacgaacgtaagagctgcggcagcacctaggaaagcatatgttccgggggtgatacacggaacgtcaggctggcaagcaaggaagtaagaagactcaggatttgctctgaaaatttagacaccaggagttcaaggggtataatgagtgaaaggaaccgcgcagaaaatgagttcgaaccatgagtcgcaacagaaacgcacgcttgaatagctttagagatgattccgaccattcgcccgaatgatgctccaacagccattgagggaacaaagattcctgctgggactttgcatccgtaggaaaggacaaccatccctgttcgaacgacggtggctagcaacaaagtattgacattcctccattgggcccaagttcttttttattttgatgtattcatggatacgaggtgggataaagatatgacacgcaatcaccgatcgaaaaatgaagcgttcaggtaacgattagcgcaacgttcacacagatatagtgatcagaggtacggttgattgataagacgaactggcagagattgtcgtagtcgcctcctccttcacactctttgaagaggattgacatgctctccgtcatatcgatccttaaaaacttgttcatgtagccaaccaaagcggtgatagctgccagagtgactgcttccgcgattccatgatttaaaagatgctttcgtctaaaagcagccatttgtagattgtatttgacgacgaatgctccatagagacccttcatgtcatagaggagtcaagtcagtgcaagtttgtctggttcaaccttgcagagtaaaacaagaactcacaccaaacagaccaataaggatgtaccagggcaattcaaagtaatgccaatttcgatcataagagacttggaagagaacaagttctcctgttcgataaggattcattgccttcaggaacacaaaaatacaattatcgagggtcaatgtggaagattccaacagcaactgaagagttgagatcacttacagacaatgtaaccgtggctaccagagcgcaaacaaaacttctccacattgttcgattggtgaaattgtgactcatttcctgtgaggagtaaaagctgatttgttagaagccagtttcgtcacccattcgatcaaagttgtggactcgcctcaatggcaaataagacaccaccaataggggatccgaaagcaacagctactccagctgcactcgctgctgtcaagacctcacgcattttcgctacataggataagtcgaaggagaccgaacgtcatgacgatgagtaacttctatattggagagtatcagtagggcaaaaatcgatatctggagctcactatgactggcagcgaatctggaaaagaaaccagcaactacgtttccaacgcagcaagcgacatgaacggatggtccctctttcccgacagatagaccagaggcgatagcaagtggctagatagtcataaacggatctgaaaacttagtcctgacaaaaacgttgtgacgagagcccggcaagaacaagtaacttaagaaaacaaaccagagcaagactcttgatgatcaacgtccagaatccaagaaaccccttgatgataaagcctcctagaatacacttgatttcagagatacccgaaccggcggcgtagggggcgaatgattttactattctcgcggcgacaaacgcgtaggcaatctagaaaagggaaaagaaaagtcggagcgatgagaatagtccgtgctatgatttatcagaaggaggaggaaacgtacggcgcaggtgacatagattacccaggcgagcgggtcacctcctccccaatcatgccactctggacaagtctcttctccctctacatcagcttcaagacaacaaaacttctcgttgagccaccagccagatgtacaatgacctagtcttgaggacgagagccattcggttacaatcacaatgaatgccgcgttaaggccaatccccattcctgtcgaacacaacaacaatatatgagaccatgttctctaggcttcccactggtccagcatcgtatctgaataggcgactagggaaacgcagatacgaaccaaccagaccaacgacgagccagtcttgtccttcttctaatatagtctctccagattcccagatccagccgactaacccgcctatcgattgcatgcggacagaaattccaacatgtggacgcaacgtgtcgaacgttccttttttggcctgaatagttcgttcatgaagagaatcttgaacccaatctaaaagcaaacgattatttcaaaagatcagtcggtcgttgaagaacaattcgacaaacaaaggtatctctccaacagaaacgcgtagaaccagacaagttttctctgtcgtttgaagatgagctacaatgaggttaagagagaacatggacgaaccgacggtactgaagttctcgtatcgtctgaagagaaaccgagttgcaaccgggccatgaacgaaatggactcagtcaatcacggcaataaatatcaatctagagaactcagacgatctctaaaaaagaccaaaatcatacctcatctgttcgattttctgatcatccatatcatcctccctgatggtggccgtatcgtcctcttgtggatgggatatcatatggaagatctctactcgctgagggattgattcaagagctccctcctttccttttgctaacttggtctgtctgtgttgcgaatgtgataggcaagtggtcggctcgggactcctccgaagacgctcacagcttacatcaagtcacatggttttacgccacattgtgattatcgtaaccacacccagcccgaccatctgagacatcaatcagcagaagacgacctataccccgaccgcgacttcagcttttgacttgatctcgaccattccatcgccctccctacctcatttctgaaggtagcacaagtacaaaagatacccattatggcatcagcagcacctccagctcagactcctatcgccactgacttctcgtcagctgctggctcgagcgcctcgtctaatcctgtgcgtcttttcttgctctttatcagtttctctgctggcatagcccggttaccagggagagagaactttcccttggaaaacaagctggccgatacgatacttctatggtttcatttttatggttgcccaatgatatgtcgtccttctcttctaatatctcttgatctttgactcgcttccttgttgtgcctcgggaactgtgttgttcgttcgagccaattagctcaaaaagttcaagctagtctttcttggagagcaaagcgttggaaaggtaagtagcgtcgcctggagaacatcatattagcggtcaagagtcttatgaaaacacggctgatctggttgttccgcctttctcaaacgtctttcggacataacagacatctttgattactcgtttcgtaagtgtccaatcgagattagtcgacatacttggagcgccctgatcattgaaagttcttcttctctttactgacggcacatccctggtgatttctcacatcagatgtatgatactttcgacaatacctatcaagcaaccatcggaatcgacttcctgtccaaaacaatgtacctcgaggacaggactgtgcgtctacagctctgggataccgctggtcaagtacgtcttccttcttccgccttctttactacgttgagaatgggctgacccgacatccggcatcctctttaaatataccataggaacgattccgatcattgatcccttcttatattcgagattcttccgtagcagtcgtagtatatgatatcagcagtgggttccaacctgttatctattcaggtgtggctagagatggctattactgacatcatatctgcctttgagaagatcgggcgtctttcctgaacacgacaaaatggatcgatgatgttagaaacgagcgaggaatggacgttatcattgttctggtcggaaacaagactgatttgaacgataaaaggttagtggcctcctttctcgaaagaactaaacaggatctcttcaatcctttcaaatctgatccgaatatatgttgtatttgatgacacacccgccggaatgttcagacaagtgactcccgaagaattagataagaaggccaaagatctgaatgtgctctcgattgaaacctccgccaaagctggacacaatgtcaagagtttattcaaaaagattgcgcttgctttaccgggtggagagcccgaggtaaaggaacctactgaaggagctcagaacatcagtatgtctgcttttccttgctctctctagccaacacctcagtgatattaacatctatggtatttgttaatagaaattgatgtgtcttcgaaatcagcggaggaggcagaaagctctggaggctgttcctgctgaggaaggatcacctgtctttctagctgttcgttcgggagcctatatgcttggccgttccttcgtccacttaggactttcctcacttccttctgatatgacattgcgtcttggatacacttcctcttttgcttttcctccactttccgttgtacttacacatgcttccaacctcgtcagctcatatattcagcttgctcttatatcaaactctcaaagtttcgtttactggtatactcgcagctttttctcgtcattctgatattttctcgatggcttttatagtctggtcttcttcatgcatataacttaaagagatacaagatgcagagcgtcagtacatagactgactaagtggtgagactgcttccgaaggtctcttcatatttgaaaggaggggcagtcaagtatgtatcttcaaaaggcttcattgtttctctttgagcagaaaacgaagatcttcacgacgcggcacaaagtgggccgtccatagctaaaatcgtgacgagcgcctgctcaagatgttgtctcacatgttcccttctcgttctgactattctcttgtgtttaactatcagatgtgatgcttctggtatcgttgtcactctcaagttctacacctacgttgaaagaccaggtattcaatttcccttatagtgagggcttatatattatttgaatcatgtaatgtctcgactaagacacttaaacgcgtcgttacgtaagcgagcctcgttcgtctgttgccctgcttttccaccattcgattagaaaagaaagccattcttcataccatcaaccctcaccctctctcttggtttctgagcggtatggagctcgaccaggattccttcgctgctcgagtggagagcgtgttgtctacatctgatactgttgtctctgatcccaacttagccgcactcacgtctccatctttcaacccttcatcactttctcactcactcccaaggacgcccaatcttgacctcctcgctcggtctgttcatccactctcttccaatcgaacggaacctcttcttggaggaccacagcatgaagatcggcagtctttttactctcagccggtttctttcacatctaacgggctgcctctcgcaacttcaacatcatcctctacgttgatgaactcagctcacgcttcgttccatgacagtcaagttggttcttatgatttacccagtcgatcaacagcagatgtctatcagcaacattctatggatattagtccctcttttcagcaacaaacacatcaaaatccctacttctcgtcttctttcccttcttcttcctcctcattcacggaacaagccgggtctgaccttcaatctagaggacaattctcttcgtatgcttctcagtcagcaaatccgacggattggagaggtgaatctctttcggctgcagagcgagtgaaactgttaggaagaaaacaatctgaacatgccccaaatactgacaagggaggattgatagtcaaaagagagtcagacgatagcttagtccaagttggggtggaagggagagaagaagatgacgaagagctggaacccgcggattcggatgtcgatatggattctacggagaatggccaggagcctgaaaagaagaagaagaagtggaacaaggctcctcaatcaggaaaaaattggagatcaggtctcaaggtggtcttatctcttccttgcttttgtctctagataatgaaaaggatgccccgactcattagtggtcttttgtgattgaacagagagcacctgacggaagctgggaggtacctccagaatccgccgttaagaaggccaatcaatcatccgaccctcttcattccccgagctttgttctctctctcaccgactctgccctcaccgccgaaccgtcatcaactctaacatccacatcaaactataaaaagccaaaacttaaggcgaaacctaaaccagctcaagccataggttcctcgaatgacagtgatgctgtttcatctctgaaaaagaaagtcagtcgaaagaagaagcagccagcaggtacaaattcacaaggtccgactcgatcgccttcgcctataagcggcctgccaaacgatcagcccacaccgacagtttcttcctcccgagcaagatcgtactctcagtcagtcgatccggaaggagccttggaagaagaaggaaatatcgaggtcacggggcgtaaatcaaccaagagacggagaatcgatgagaaagaaaaagagaaggaacgagaaagagaaatggaggaactcttgagaagacagagagatgaagaagatgaggagagcgaggacgatcaattgtattgtgtgtgtaatagtcggtatgacgcagagtccccaatgattgcttgtgatatgtgagtttttagtcttactctattctccaagacactttccctttggatcagcaacaaaattatgtttggagttctcacgggattaactcttcgatcgcaatgcgtttggttgatggtcattgagaacctgttaggtgcgcggaatggtaccatcctaaatgtgtagaaataccggaagaagagatcgagttggtcgatctgtttgtctgtcctaaatgtcatgaaggtacgtacatactctttccttccgttccttttccctcaaagcctgtaccgagtttgcgctttttccgagactaaattgtgttgagttttttacgtttacagagacggccgagaagacaacgtggaggaccaaatgccgatcagcagattgtttcaagccagctgtcccaccgttaacaaagtaaacagctgcttcttctaaactttcaatagagtttcttgatctgatatgaatctattctccttcttgttctacacacagatattgttctactgtctgtggtacggctcatcttacggcgctcctcgaaaccaaagatatcgatctatctagacattggaatcaagttgaaggtgctcaaagaccgtctggcgtcgtgatcgttaatcctgactttcctacatcacatcccttcaccactacatcgaatttggcttccaatactcccgtcggtcccacacaattccctgcgcctatcaaacttggaaatactaggttgacctctctagatccgagtgatcatccggcaacgagacaccttcacgttatggacggtagcctcaagacatcgatcgataaagtccagaatcaactctcgttactaagcaatcgattgactcttttctctttcgcttccaatcgagcagacatgatgccctctctcgcttctctctcgctcaaggacgatccggttgtcagtccggaacgatccaactcgggctccaaacgagggcctcagaagaagaaatcatccgctggtgccggtgctggtgccggtggaagcgggcaaggagaccgaccgtgcgggtttgatcgacggctaatcttggacgaacaagattttggcaaatatgttgattcagaagaaggtagggcgttgtttgctccacttttagaagatgatatcagtgatagcagactcaagaaagaaggagaaaaagaaagggaaggaaacgaaagcccggtcgatccgggttttgaaacgtacttgagagcaggcgagaaagatcttaaacggaaacaaaagatgatgtccgagacagacatggaggtcgatggatctacgggatcggacggtcaccaacacgtcaaggctgggatggaagacacgtggtgttatcgctcgaagaagaagtgcgaaggccacagagggtgagtgacccccttctcttccccttctcttcttcgctgctctcattgtcgttgtcatcgatcgatctctctcttctttctcgatctttatttatttttcccgctcgtgacttactcctcttgcttttcatcttctttttctttggccgcttttatcctgttcatttctctgtcaactcctccttggctgaactgtctttggactttggcaccagatggcagaaaatccggctgatagattttcagcttgaacaatcctcaaaacggaatacactcggtcttcttgaacgcacccggtctatcctccaacaagacattcagattgccgagaaacgaattcggcgtgcgatgggagagcccgaggtaaaccccgagaacaaagtcgaaactgagatcaaaactgggatatcaacggccgtcccagatcggtcgagtagttatagagaagagaaggatgattcagtggtaacccttcctctggcgactactgctgctgctaccgttgcctctgaaggcaccggaactatcgctgtcaacggtggtgtcggtgtgatctcaaactctctagctcaagttgatttaccaacgataagttgatctgtatagtcgaagtatatgttataccttgtatgtgtagaagaagacatcctttcttatagaagacatgatcagtcaactagttacagacgacgagcaacaaacaggatgacaaagagtgacttggcgatagagaggtagtgacggatattgaaaggagaggaatatatatatagcaaaaagtgggatgtattagaacagtgctggatttgagagataaccatgaggaagagaaaggaggggagatagaatacaccttaagtgaaagcatatgaacggctaggtatcccaggagagaaagacaggaagatctattgttgaacaaacgagtgatgaagcgaattcgatacaatataaggaacaaaacaagcatttccttgacaaatgtcttgttgggcaggaagttctatccaaccaaagcgagccgaaacgagacaaaacaggttggaacaagaaacaggacagaagagaaaatgcaacaggatacgagaaaacttgaccagagtttaaagtgtgaaaagcacctcgaatcacttggtcttgtcagccgagacccgccggacgtagggtagcaagcctccaaacgtgtcgaccacctcgaaacgctcagacggatccgtggatttaatggtagcgaggagaaggatggaagcagtaaccatacggtaggttcccacgcccgtaaggagatgccaccaggcatgtcctgatcacaaaaaaaaagaggagagatgagcgattgagtctatgcgagtaatccgagataagtctggcgcaccttccaaaataaggccatagccccaccagccccaaactttcctgatattctcaatagaatctgcatagttgtggatttgtatcagcaaactcatcagaatgatatcgatgatgaagcctggtccccaaatgcatcaaacataccacacatctcgttatctacgttccagagcaagaatccagcaaggaaactagcagctcctgtcagatacagtcggtttacagtagatcggtgctgctcaggcaatacgtttcctacaaggtgatttgtccgtttgagagaagcgagaagaatacaggcaaaaagcgcttgatggcacaatggattgggataggccatgctattcgttgagaggacatgcgattaacttctctgtcattggtcagaagaaatggccgcggagatgagactcactagagaagcgacagagcaaggtcgactgtgatcagactgcctagacctaaccaagcattcaccgacatatcgtatcctggattcgagttgaagagcgaccagagaaggtatgaagaaaaccaaatctgaaccggcgtcgggtatgtccgataagcgaaaggcaggagcggacaagggatatagattaataaacgtgcaagacacatgaccgccagatcaactttgcacttaccataggtaattcgtctgcaagctacagcagagaaagaagagatcaaggtatcgattagtcaagtttggctcgaggacttgaccactttgagagatagctgagacctacctgaaactcccattttagggtagcatggaacaagaaacctaatagccgaaatgataagccaagggttcattatagcaagcaaagggtcaaacaacgtacttccaactccgacgagacccatcccagcatatgctaaagataacctaggcgccatcccttgcttcaaaacatgaacgaatccataagcggccatagaaacgaaaggaatgctgttgtgttggaagcaagaccgagagcaaaagaaggaaccgaacaatgaccaaatggttaacagatctttcggtttgagatcaaaggcggtcaagggatcgaaagaaggagtgagataacggaagggattaaagacaaacttggataacgtgttggtaaactctgcgatataccgggtgacatgatagttttgctcgcaccaatctatcagcgctgagtggtctccccatactgatggcgacgccgagcaaagaggcgaacgatagatcaaacacagaatcaacccggtacacaagatcagtcatcttatttctttccataatagacgataacagaaacgaaaagaaaaacaacaacagcgatctaggaacagatgtttacaaggaactcacttccggaggctagctgacccgttcgagtgactcccattgtacttggtggtaggtggtgtacgtggtgtatggacgtgggagcgggaactggaacgggagagaaagagggagagggaggaggaagaggagaagagagaaggagggaagtgtagagagtggaagagtggaggatggaagaaagaaagaggatgaatcgattgaagaagtagagactcaaaagagatggacagagaggaaaaggaacagtcggcctggcttattcaggacggttaggggaatctgctgcggttggccatagttgctcagcgtacatgccgatagaatgttcatgttaagcttcggtaacaacaacaagagtcaagtcgagaggtgggtatgtaagggaggaacaagtagcagaggccaacgtaagagaagaattgcagcaagagaagagaatgatctaagagcgtaagtattggaaggaaaagagaagcaaggagcgagacgaagaggatgcacggccagtcagatgctggacccagggaaaagaaagcaaacagagaagaaaagccagagcgggcgcatatcgacaaggagtaaacgagtaggaggaatcaaaagaaggaagagaccaaattgagtagttctacattcccagctcatggtttcccacggtttgtccccatgagcaagctatcaaacagaccgaccgcactcgcctcgttcctgagttggatcatgtacacaattcccgttcgtcttccttgatcggagatctcgactgcaactcccgttttgccgacccgttcgaccccatcagtcaatacgatggtcgagattaacatcgccttgctcccactctcactctcaaccacgacctgtttgacgtttgtgcgctgctggtggaaaagcttcagccgggctgaaccaagtgacttccattgagcatgatcccgtttgaggaacaccttgcacttcatctgcgcagagatcactgccggtccgtttaaccctgcatcatcctgcccgccccccggcgacggcggcggtgagatatccatcgagttatttctttgttcgtgaggacctcctggtgcccgaagcgatggatcaccagacgaaagcgcttgctgacggacctcagcaaacgctgcagaaggcaacgacacaggcatatgcgggtcggtcgaccgagaacggagcgaggcttggtgggtcggacttccgcttcgactcacgggtgacaccgatcgaatatttcgctgaatatttggatcgtatccaccgggactcatccgaccctcgccatctgcgcctccgtgttgatggccgtgtcctcccgagagaggcccacctgatggcccctggggcgataggtagtttctttgttgctggtgctgtgggtatgataggtgcgatggctgcggaggcgggtgagactctacgtacatcgagttcggctgagatcttgagcctgccatctgcaaaggtcgaagacccccctccgggccgcccggaggatttgagttgtgtcggttggggtaggctgatgaagcaggatattgaggttgaggctgtcgaagcggctgttgctgttgcgggacgccagggcccccggtatatggagcatgagcatgatgagcaggagcaaatgacagaggtggaaccccgccagacggtgttggctgctgaggtcgctgttgctgatggtttggaatgcgcaagcttgttccccgctgaggaggaggtagcggtggtaatggtccgcctgtagtacgattataatccggcaaggagccttgctgctgagcatcgatcacggatcccagtcccaacgacgtcggtggtcctccaagctccatagcccctatttgctgtgaaaggctgggggcttcatgcgagctgctgttgttcgagtacgtactctcttgagaaagtgcggacgataacattcgctcacgctgatggagaggtgctacgtgcgagaggatggctggttgggaagcagaaatcgatgatgaaggtgacatcataagaggtgagacaacatgagggttttgggcgccgggagaggtcagtccaaagctattgggtgatgtagacgttggagacgtcgtcgatttggtttgaattgccaagctcactgattggagataacgaagggtcgcagcagacaagcacattcggatcaatttgaatattgcttttttaactcaggctctaaaacaaaaagaaaaaaaccaaccactagaggcgaattcaatgcagtcctggaagtctctcataaggagacctctcataagagagctctccaaccgtagcgtgaaagtttcccgcttcatgaccaacacatcgatcgtatcctctgtgagagaagaaacagtaaaatgtattgagtataggatgactagccaacttgatccatgtacatcaagaacatgctgtcaaagaactaaccactcgttccggagaacacctgtagatgcttgcccgccagcggaggataacataaccacatatccttaccacttccgccctcggctttctgcgcttcgtttggctccatccactcacaaatcagaaacaggtcgctgagaacaaagacgtgacctcgtctatgctctacgaattgtccagtcgttttcggtgtgaaggatatatggacatcaagagaccgacggaggagtcgttggaagggaagggcgggaggactgatttgtagtcgaaccatctatacgttgtattcaatttacagagtttgtgtaagaacgattagaagaagtttcagcacacaagaggaaagggatcattgctggacggaatccaaacatagaaggaaaggacatacccgaggattcattgtaaacaaatccactgtgcgctcggtgctcagacggcgctcgatatccaacaaagattcctgaatttgaggcgctgaggacgatacaggagataaggtcgtaactgaggttaaagagggacctccttgagcagagttagttgtcgaggttccggacgaccgaccattgacgctgaaggcagaggctctttttttactcaacaggcatatgtcaggcactagtccgagtacaggttaaagataattgaccaaattctgactaacccgctctgtctactactatccccacctgaactagacacgctagctctagcagttgcctgatctcgactgatcttgcccccatcgacagtcatgtctagacgactctttgttttttccaacagtgcattcagtctgtcgtttgctccgactagaagtccatgatcacttctacccggctgagtgctaactcgaaagatggatgcaagaatcaaatcaggttggtaaggagtcgccaaggaacagccacacatgaacttcgaccgacatacctcttgagtaatcgcgagtagagctttttgtagtatcgcaatcgattataaggaagtacaaagaaacaatcgagggtccaagctccgtctggggagatactgggaggaggctcttgcaaagtctgggatatgtcagtgagaatgccagccaagtttggatttgattgaactggagcataggtatcgaaggcggtaaggtagcaggtagcatagcgcgagtaagcaggctccatgtcgtcaatcttcaacgggtattgatgaaaggccatatgaacatcagttcgtgaaaataaattcaggcggaaatgtgaaattaggagcagggcacacacccagcgcataagaagatcccccagagcttttggcgaagaggggttggggccaatctcttttagattctgttggacaacagaaggaaacaggttagactcaattcctcgagtgattgtaagaccacgactagctgtgtaattgaaggcttacagtcccgaacgccctatttattttgtagattccctcgatggcgcgaaacattgaatctaaaggctggggaggaaagtttgttcttgaccaagccgccgcaactttctagaataaggattgaatatagaaaagacaaaccaaagggagttaagaattcttgtttataccaaaatatatttttggaaagaaaaggcagatggcttgggcagatagcttaagtctgtgaacagccttggcgatttttcggcagatgatccgagaacaaaagtagaagaaagcgacaaggaaaggcgaaagaaacaaaactcaaggactcactttgatgactcctccaagctcttcgacatatctcttctcagtttctatgagatctattaacggattcgtttgtttctttctcgtctgtccctcttgatcgtcttctctttcatcgatactacccgactgagattcctgaaaactggtgggaggagatgttacaacaggatccgaagaaggatacggcggcctcgttggtctccagttcgcaagcggaggctccatgtcggattggctgcaaaatacaggcaaagagagaaaggatgtgagtgagagtggatgagctactctttgggaaacagagttaggaggaatctaaacatgagagatctcgatatgtgtttagataagagtatatttgaatgttggcaattcaaatatattgtatgctcagatgctgttgggtctggtcacgtgatgtggcaactcaacacgaacacttctctccgctaccatcgcgttctcaccaccggttctttcgcctgctaccttaatcatgtccggacaaccgccacaggaaaagctctcattctcgttaggtctcaagaaacctcagtcaaagcctacatcatcttcccagccggcgagcaagcagctcaagaaaccagcattcggtctggtagactcggatgatgagactcctgtcacttcagagccagctagctcgtccggtcgttcatggggtaaaccgaaagctcccgctccgaaatcattgatgcatcaggcggttgcgccatctcgtgcagtcagagagaaacaggatgaagcattgaagatagatcaggctgctttcgcttatgatgaagtgtacgatcatatgaaggttgcacagaaggctgccagacaacgaaaggaggacgagagtacagacagacaggtatgttcgtccactcaatagatctatagagggcgtgtacttgctttaatctcttattgattgtttatcgacgcgttttgtcttatatcgaacagccaaaatacatggcgcaggctatagcgtctgctgcaactcgaaagttggaccgaattagagcagaagaaaagatgcttgaacgcgagaggcagctcgagggtgatgagtttgccgataaagaaaagtttgttacccaggcctacaaggaccagatggaagaggttagacgggcggaggaggaggaaaaggctcaggaaggtaagttgaatatgtatacgtttgccgtcaggacatgtattgatgtcaacttgtccataaccttctcacccctctagccaagatgagagactcgaactccaaaggaatatcttctttctacgccaattttctcgctcaagagtccgacgctcactctgctgccgtaaatgccgctcttcaagctaccacaacggccgctagcacacctcagaacttgacgattgttcgacccgtccagggccctgctgcgccgccaccaccaccaatgtcgtcttctaccgactcttccacaaattcagagaggcaggcattgatcgctgctcgtgaaagaggattagacgtcgagttgaacgactctggagaagtcgtagactcgagagaccttctctctgccgggttaaactttatgccaaagaaacagccgctcccttcatcactcgcctctggatcatctgctaactcgaaggcaccatctggaccatatgtgtcaaaacgggtaggcgccgcggcttctgttaaagagattagagctaggcaggacgcgctccttcggtctcagatggaagaggaggaaagaaggagagaggaggaagccaaggtcagagagaccgaacgattgatcgggactaaggagaagagaaatgacgagagttcagttggggacttgaaggcacgttatctagagcgaaagaagagaaagttggaggaagaagcagagaggaagcgaaaggaagctgaggaagctgctagtggtggaagttgacctatctaatgatccaccacggtgttctataaagtctatgtctgaccaaagtatcaaatacaaggaagagaaggagctgttatagagatgtgttcatagcaagaagaactggaatagagtcagcaactcttcaccatggttaccgaataatttgctgtgccgatcaacttcgccgattcttgcttattcgtattcgaccatctcaaccaaccactgagcagaaactactgacccaccaccaccattgacaacaatcacatcttctgtgctcgacccggaatttactatagatattcgaatatctatctttaacaggactcgatatccctctcagatcaaccttcttccctcttctctacatctcctcttggttgaatatataaatcctcatgactaccgctctctctcctcttgttcggcacaactttcgggagctgacgaagcttcgaccgtctcgccttgacttcggctcccgcctgaactcacacgctccagtgtattctcgtgtctccctcgtccagaccttgccaagattctctccgtcatttcccaatcctgctctgttgttgtctcgtcatactcctcccctggctttaccgctatctcgcttcgtacccgttctccattcccggccatactcctctcagtctcatattcaatccaaacttaagactgaagacgatcatgaaccaaatgaaggccaaaactcggaatccgtcagtctatctcaaaggctgaaagctttgttcaagaagtacggctggtgggccatcggggtgtacaccgtgttctctgtgatagacttctccatcgccttcgctggagtttcatactttggaatcgacaaagtccagcgattcgagcgacgggtgcttgattgggccaaacagactgtcggatggacagatgacaagagtctgaacgaggctgtggaagataaggtggatcaggcgaagcaggtggtgaaggatgaatcaaaagggaatggactttggtccgttattgtagtggttagttttcgccttgttctccgtctcttctttggctcgttttgatgtcatctgaggaatcagaagctgtattaagatctgaactctgttctgttctattgttctaatagtcatatgccattcacaaagttcttttcttgcctttccgagtgacactcaccggcatggttctcccctcagttcgtgttctacacatatctttatttctcagagagtgtgagaatgatctgtctaacctcgcctctccttaattccagtttgtagctaggatgaccagactcggctgggctggaagaggagcaaagtgagcgcctgtcattcatccttcctcttgatcattcactttctgccctcaagtatatatagctatctggttctgatgagactggcttttctcttttttttcctgttcgttgacttcttgggggcaaactcgcgcagggggctatcggtgaaagcgaaggaaaccgcccaaaaggcgaaagaaaccgctcagaaagctaaggtgaccgctcagaacagattacaaggataaagagacaaccctttgtggatcatgaaatgaaaattcttagtattcgatttctctgttgtgaacagaggcttgtagggttccgcgtagggaagaagggagagaaaggtggcgagcgttcagcgatgagacaaaaggctacaagtacagatttacagatacgaacgacaggaaagagagaggcccaatagatatatataacgaagaaaagaagaggggataggcaagaagaaagactctcagccgatcacctcatcagcctcctttacttctgacaatgaagctttatgacctcctgccctttctcgttgtccttctatttccgcttctactctctcttccgcggcctcaacattgtcgtctccacctccttgcttgtgattgctgaccgagtcagcgtcaaagatcagaggaagcgattcctctgcctgatctttgtgttcttctgcttgcgcgagttctagagcagggtcgatggtagctagttctgtaaccgtggtcgaggccggaacagaagcaggagcaggaacagactttgagctaaagaaagagagccttgttttagcaggcgtcgtcagaggagcagcagttgcggcagttgatacagtcgatcctgatgagatggggcggcccgtctgttctatgccactgccgaaaatctctgaagttgacatgggagagacaacaggctcgggcgttcgctcggatgaaagcggtgtcgtcgctgaggaggtggatgctttacggaaagagaaccagccgcgtgccggtggagcggcggcagtaccagaaggactgacaagagatcgagggcgtggtgctggatcttcatcaatcaggtcagaaggtaatggcggaagactaagcgtcatcgttgatgaccgatcgcccggttcaccgccagaggcgataaattctcggagagcacggcatgccgcttcgcttgcctccctggcagcatgagtctcggtcagtgtcctcttaagcacattgatctctgatctcaatgactcaagttcacctgggctggatgtgagagctaatcctgatggatcccctggtgagaggccagtcgtgttggacgtcggtgggagccagccgttcaatggagaggcaacccggggagagtttgattcaagtttcgcaagcgctgtctgccgagcggtcgtagaggcagccgaagttggcggttggtcttcgtcgtcttccgctagatccatcaccggcgccactttcgatgctttctcagatgaggatgactcgggaggagacaaagcagggacggccgagcctcccgaagtggctgctgtcgatgaggacgatccccaaccggagaagaacccgggcttggtagggagcgtaggagacatactcggctgaggcaatcgaagctctctcagcccgcctgttcggacccctgtggattgaagagggagtgtggtggttggatcaagtgcagacgatggccctccgatatcagaaaaggaggaaactcgtcggtgaccgatactcgtccgagagggaggagttggaccatgtccgacgttgagagatgctcgcttgtccctcttggaggtcaagggaacagatccggtggaaggagagcctgcggtgaacggcatatcaatcccgagcccgattgaagagtttggcgagctaactaaggctgacgaggatggagctcccagatttccgtttacaccgaggctcgttcttcgagagtccttctctgtctggagcctcatgacccctctcctggcttcctcgacagatcgccgaagggtcacaatgatctcctcgtgcagctcggcctctttgagcttggtctctgttgagcttttgaacgagattagctccttattttcttcctcgaggttggacacttgagcctgcaaagtagccatcgtcgtttgaaccactttgagagaagaaagcaaggtctcccgagatgcggcggcttctttgagtgaggccgttagctcctgtattgtctttgtttgatcggatgtaacaggcggtgcggaaggagcaggagtaggagtagaggatgtcgagactgagacgttcgactcaagccgagcaacttccttctcgagagaagcaatccgttcgtctcgttcctataaacgatgttgttgttccagcaaaaccgaggcgctcaggtcagctttctctttttggggtaaagttgatgtctggggagacatacgttgagttgagcctcccagtgcgcgttctggtcgtcagacattctcacagcgagtgtgttggggattcaaatgaggtgatctgtatccaaacgactggtctaggatactgctaatgagctcgttggtatgttgagtatgttgatgcttgttctctactctctgtgtccccgatcaatcgtccgagggcgaggatgagaccgggccagctgaaacgggaaagggggaaatgtgtgcctgaaagtcgatcgtcatggttacgtctatgctgtgctgctggtttcacgtgaattgatagccacatgctcacccacgtgctagggttgcatccgctcttgtcgtcatcaccactgccgaggacaggggttcataaggagaaaaaggtacgcaggcaccatctgcgatcgcatccatcccatcaggcacggttgaaactctaagaactcaccatcgtcccagcttgacattcatcgtcatacagaccacaacaaagacagagagtgacctatctcccatctattatctacagaagaaatgtccatcgaagttaaagacggaaaagtcttccttgcgactgaagacgtaggcaatctctttctatctgtttccagtctatcgacattcattgaatatcgctaatctttgacttttgtctataaagaaaacaagcacggccgaggtctatctctatggtgcaaccgtcacttcctggaaacatcatgcagaggaaaagctcttcgtgagctccaaagctcatctcgacggctccaaagccattcgtgggggaatcccggtcgtctgggtatgcatctcatctctgactgtccttgtgattcttcaacgttgtccaaatgtgcatctgacaaatttcctcaattattttacgcttagcccatcttcggaccgccgcccaaggatgaggagaaccttccttaccactccaagctctcccaacacgggtttgccagaaccagcacctggaccgtcaagagcgagatcaaagagtttggcattgtcggagtcgagctaggtgactgatctccatcttgttttgtcttcgcgtatgccgcatgggctcatatcaatctctttgccttcacaaacgcaagagctcaagccgaccaagtcgatctcttccatcttccctttccccttcgtcctccgatacactgtcactttggacggaaagagtctcaacgtcgcccttaccgttctcaacacacacgaagagaactacctcaagttccaagctttggtaagatatccatgagcttaaatgcgaagcccgttttgattttccgcggaaacacatgtaagctgaccgctcgatcaccccgtccacctacagctgcattcttacttcaccgtcccctcgcacgtggacgcaaggatctcggacgtggccggtcttacctacgccgacaagcttcgaggtggcaaccggttcaccgaggatagaagtgttatcgacgtcgcgaccgagaccgatagagtatacttcaaaactcctcaggagctttccttgctctacggcgagaaaaaagaaggaggactcaagatcagtgtcgagggtttcgtcgacagtgagtacacccacttctattgataaagaaaaaaaggcctctgtcaaagctacaactgaaatttcatgtctgttcctttgctcagctactatctggaaccctgacgagaagaccggctcggccattgctgacatggaggacaggggatgggagaagtatgtttgcgttgagcctggatttatcgatacgtacgtattctttactttttgtacccccacctcgaattccaacccaaccgttctgaaacttctacgttatcctatgacaactcacagtttctacactctcacgcccggagacgaatggaccgggtcgatgacactcaccgctttttgaaacgttagctctcgatcacctcgattgtcttatagtttctaaattgtagcctcttatcttgcccatttgctgtttgtttacaactatgtatcgtatgcgtgtgaatctcatcatccttgtatatggtactataagcaagcgaatgattatctcgagaagaaacttgccaactatacagtattattcatacatcccgatcggcgtccaaaagacatccttagcgaagagagaaaaagaaccgcgggaacatgagatagagtggtctagttcaatacacggatgaacccaatcaatgtgttgatgaataagccaatcaaaatcgctctcaacatatgacgtctataaggaaagttgcagagaagatgaagacacggaacagagcagtcagtatattgtatctagtgtccgctctagtctggataacagaatccgcgcaaatgatcgatgacaaacaagagaaaaagagaaggaacatacgaaaacaaaacagtgggtacatctccattcgtccctggactaaggaaactgtgagagtttggttctctaaagaagaacaatgggaggagagggaagaaccagccagtcagagctccttggagggaggatctgtattgtcctctatcaacgtctggttgaggaaacaaacaaggagaggcacagtatcagaataggagctcaatgatgacaaaggtcatggctgagaacagaccgtcatcgagggaaccggcaccaccgcctgcgatccactgatcttccaacctctccgcattctcatccactgtttatttgtccccgaagaaaagagagcatcatttagtaccactcggttttcaagatgcgataaccaggatgacatgagtgttcaaaagaaagttttggaacctacgttctgcctcggaggtgactccgtgaaactgctgacgcatgatcgcgatatccgcctcagagagcccagctgttgtccgtaagagatcaaaccctcttagcggaggtgtagtttgtgactccttgagaagcaagccgtcgtcgaaacccgtttaaggagactcgtcaggatcactcggtctttttatcaatgtatgcgctcaaggatagaaggccaggcgcacttacttcggcaggctcagtcagacttcgcttatcctcttcttcctctgattgttcaaatgataaaccaactgaacaatgtatccagtatatctcatcttcttcctcccgcctcccacctccacccttatccagttcactcgccgataaatcttcaaaggccgaccgaagggtagtggtagattgatggacgctcgccttcgtcttttccgaaagtagtcgaagccaaggaagaacgacaataagtgggttcaatactcgaccagaatagatcagtcgaagtcgtcgattcatcaagtgaggccgagaacttcggatctacccaagtttgagaggaaaagtaggtcggagtccagagtcaggacttttgaagactttgtacatacgagcaagcaagcagctggccaaatgagagaacaaaatgtcaagatgagaagagagaaacttgccatctgtttaactttctgaacgttgtccttctcacccactgagatatctaaatctcctgagtcgatggaaactccttggttggcctcatccgcgatctccgtgaaccgaatgcggatgatgcctgttgatagaggtcttgtcgttcctgctgatgtattgcctgctccggactcctccgaaggcgatggccgagctcgctgcttgccttttgaaacctctgatcgcaccggaggtctgaaagatggtcctgcgctcgacgaaacagatggttgtttcggcagcagcggttcgatgtcgttgttgttgtccgatggatatggcatagggacagaagttgatgatcgctaggatggttgttgcttggaaaatagaagagaatcaataatcatattattgaagtattatagtccgggtgaatttctaattggacttttctgccaaccatcaagcagcctcgatggacggtccatcccattcagagcagcacacagctcctccgacccatctatcgtttactacaggtatcctcgtcggacagggttcggttatcctggttcttatcctattcatccggtatgtcatattcgaagatggctcaaaagctgtagaaactgcttttcccaagaagaaaccgaaacttgtacgtgccaagattggtccatctgaaacttcccctgtttcttcttggatagaagccagtcagctctcggtcaatgtctggaagtcgaactgaccggtgggatatatcccttctgactatttctagcgtcggccttcccagttgaacagagcatcttcggcccctcgccctccaacacttccttctcaggtgctgtcaaagacgcaatatgacctttcttcgcatccggcagaatcaatggactggttgaacgttctattcggccaggtaggcttttcctcatctctaattccataccactcggctgacgagtttgtatcgtgtttttgacatgtcttacatatgcttttcctaggtaattgctaactatcggtcctcgctattagctcatagcggagaagacggagctaggcgggtgatggagtcctggttgaacccggctcagggagtttcctggcttgtaggtcatcgtcttttgaatgaaacgaacgacttgaacagctaccctatatctgcgctacatcttgtttaatgtgttgttaaacaggaccctatacaagtcacctcgttggcgttaggaagctcttacccgatcttctcaaatgcccgtatacggccctccgacgcgtcaggacgcatggtaagcgcttcttacagcctccccttcaaacagttatctgactgtcaaaacaacagcagataacatatgaatacgatctaacaccaaaatttaatccctttcctatcgtctctccacttctaagcgcgcagaaacagagatagattattcagattcagtcactctcgggatctctaccagcttgctcattaactttcctcgaccccgatttgccgtccttcccatcagcctcggtgtgactctagtagggcttaccggaacagtcagcctctagccattcttatttgcccaatatcatagatacacatacactgacgttcctcctctaaaaatgtctcaatgaaaataggtcagtatggaacttctttcaactccctcgtccacagatcctccgtgtccacaccaatcgatgcaactcgcgctccacccggatttttctctatcaattgaaacgacctctctccttggctctagagcgaaactgcacgacctaccaaagatcgaacaactcgtctctagtagactccgacaggctctcgttgaccgtgtcgtctggccaaagttctttgctgtcggacttcctgcgctaggcgtcggtgtatcgaaacagacgtcatcgaaaaagaccggggaatcatcaacgacgacgacgacaacaacaacaacagcatcgtcatctggaccaggtgtgggtgcaggtcggaaatcaggtgatactctgctcgggggagataccgtagatagtaatatattcactaaaaccggaacagacagaatcgaaggtaaacatgaccggccgaccgacagagaacaacattcactcggattcgggaacttgggtgaacagttcatgaagaacgtccttcctacacctgacggtttggatgttcatctgactgaacaagatggtattctcagagagtccacaagacagagaatgaaacctgggatgacgagaagacaaacgaattcattgttatcggcttcttcagaagaagatcttgtcgatccgtccgcgtcggtgttcacctcgtcttccaagttgggtcattccggtcaaccggccccgacgtcgaggaggagagaaacagggctcggtggaggcgtcaagacgatgcctggagggagcgattggggaccagatgggatgtgataaaataatgaaactgaacatgctcatgctgtcatcgaagaaaacaaactagctctctcagctcctttacagtgtcgcgaacgacccaacggtcaacccagaatctgtttatcatcgatgcaaaggaaagtaacttgacagaataataagagagagaaagacaaggtaaagagagatgataataaacgaaaagagagaagaggagcaagagcgatgaatgaaagatagggtagatgatatacaaacccaagacgagagcgtacgcagataaggaaacaagacaaaaaaacaaaaagggggaggatgtaaaccaagggcgaagaaggtcgaagctaggaaacatggggcaggctaacggaagtagaggagggtataggatccctgagtagtaagagaaggttgggatggaaagaaaccatagtatgaagaagagccatcagtgaagctagtcaactacaaaactaaaaagaaagctcgggctttggtcagcgatctgtatgatcatagagtaataacagatatacgagtgatggctgaaaaggaacggtagaaaactcactcgacatcggctccacaccggtcgtcttctctaaagccctggaagcgaaatctaaaggaacaaacgaagataaatagaggagacaatatggtcagatcaccggtcagcaagatatactgctcatagtttggatcagatataaaaagaaaggacaaccacatacatctaacatctggatcggaatcagcagccagcttctctagcgccgggacgattcttctggccgccaactcttggccttcagcgtccgattgaagggtcaccgcaacggtctctagagcccgagcgacgttgaaccggatgttgggaattgcatcattcactaagccgagagcagcatccaacaccgaatcgcgaatggtctggaagtttagtgacggggtgatagtctgaagaaagaaaatgacagaaacggatgcatcattagacagtgtcttaacccaggcgctgctgattctaactcactccgatggccaggatagtagtcattctgtagaggtaattcgggtgagttcccatagcaagaacttgagggatgatcgtccggctggcccactcaacaccaaacacgtcggtgagcttcttgaggttgacggtagcggactctcgaatggaaaacacgctatctccgagccaagacatgcacaggttaccaagcttgtcgtcgaagaactggactccgagttgggtcgcaaggagaggaatatattcgatgatcgcctgtcggactcgccattgcttgtcctcggcgaggtcaataatggcaggcagaagagagtgagagagaaggtcgataccaatgactacgaagggtgtgtgaccacaagagagtatgattagataagcgggacccgttcccaaacaacaaaactaagacacgaaccatcgttgacgagttcaagcttgccgatcaactgaagcctaacatccgactgctcgtccttcaacagctgcaaaaacagaggaagaaggtgctcgatggtggcctccttgcctaacagaggagcaagcccgctaatctgagctccaagcgcggccttaacgtgaggtgactgatcggcggcaaggtcttgaacacatgggagaagtcgatcaaggataacttccgcgtcgatcagcttggcgaagcctgttatgagatgtgttcgtgatacaagccaatcagccaatagactcaacaacagatacatggttagatggtgagacagtgactgaccaggaagctgcccagaagcagcagttcggacctcggcctcgtcgtccttaagaagagagacaaaagcctgaaccatctcctctcggatgatatcctctccgacagcagaggcaagctgggaaaggcaacgcggacacgataagaagaaccaaggtcgggttaacacctgtgtaggcaggtcttgtaaaggacaagatgcaaacacttacagccacgaactcgtttccaaccatgtacctgactcgccagctcttgtcagtgaaactttgcctgagcagaggcaacaagtactccttgacctcctcgggcgagagctgctcggcaatagcaatcaaggcggtaacggtaagaagtcggacagaatcttggtcatcagtagccaacttgcggtagattgggatgatgtcggaaagaagcaggttgtgggcctgagtgaagttcttcgcaaggggctaatatcaacaaccggcaaaatggcatgtccattagttcttgtgcatctgcgagccaagatctcggtcggagagttaatccgaacggatttaggaaccaagacttacacccaaccccttggcggcggcccttctgaccataggggtatcatctgaacagagtccaccaaacagcttcctcatctcttccttggaagcttccggagcattgttgtacaccggagcaaagagagagcaggccgaagttcgggaagtgaaccactcccctgtagaaagtcttctgagaagaggaaggtagtgctcggtcaattgagcgggagagagctggacagcgatctgagtgagagaatcagcagcctgtgaataatagaatgcgtgccattcaaagacaggacgtcaacaatgtctcctaaacggcctgacgtgattgcatattgttttctttctctggtgatcagattattgaaaactctgattaccttttcacggactaacgtctcttcgacagcagccaagttctccaagggccccagcaccaaatgagcgtattccttctctccgacgaactctccgaactctcctaactcctcggcaagggcgagaaggatctcgtcttcatcatccaactgatcttgaaggaagggaataagctcctccctcgttcgctgaggaccaagggcgagagcgatcgtggaaagacgacggatggaagtcaaccgaagggcaacatcatcagacttgagctcgtcttttttccgttcgaagagaaagaagaaagtttaaggattagaaccataaaggacagaagttgtcaacaaggtgggtcaagcctcttgtccgcctctcatagaatctgtcataggaacaaagcaaactaaccgataagaacggctatcgggaagacgtcggccatgatctatgcgttgtttggtaaggttctgtaccatcacggtttttccacgagaacatcaaacacgcaaggggcgagcggagggattggattgtaatttatttttcaggcgtgaaatgtgatgatcatatgttacaagagaacccgtcagcaaaaccaatatctctaactttcaaggacgatcgaaaagtgatcagaacgagtggagagaaaagataaggacggacctaatggaaagctagaggagatgggtcgggagagatgatcgcggttacaggacaagagaacggagccagatggaattgagcgacgtgtcagcacgagaagatgaaccaaccgattaaagaaactcagatgacccactcacctagaagatagaaagaacaagacttcgacacaaatgaaacaaagagtattcgaacaaggatgaggatgagtatggatgtggtggagaacgaagaaaggaaaaggaagagcgagagagacttgggaagaaacgatgtgtgagtgagttggcctaggtgcacgaaaaaacgagcaacctggttacgcccgtaaccagagtgatggctgcgtttgttcaagaggtagaaatcaatatctttcaatgtattttctatgtcacttcttcctatgtgtctatagatcgctttgtgatgctcgtggaagagctgatgtttactttgagaacagaagagaggtataattgagagcagatgatatatgctttggattatgagaatacaaatcttttctatgcattgggtatcatcgtcgtctacgagaccgtcgaaggtttggttcagaatcaaccgaccttcttgactgttccggactcccgaagtcattgatgttttctgaaggattacttatatccttctccgtatcagtctctacttccttctttgccttttttctttccctgaacgaaccctcatcatccccaccgttgctgtcgctatcagaccgattctctacagcgtccttcaatgggcgtttcctgacgttcacttcatcctcatctccttccagcacagcgtttgcccaagttgatctctcccattctcttggtttgatctctccgcctgccttaaggcactcctcccgaacacccttgaagaaagcccagtactccggagctgtgtacttgagtcccttgcgaccgcctttgggtttgatgacgaaaacagcggcctcgtccgagaagaatggaacgtccgatgatatcaaagagaggaccaaggaggcggtcgcaggccccacgcctcgcagaacacagagggtcttcatcgcatctttgaagagacttatatcatcaatcggtatcgacccagccttccgagaaagtatttgaaatgcccgtttggaagcctctacgacggaatcctcggtcaactttgcaatcatccctttcagtgccggacggttgactccaaaggtaagtttggcatccatgacgataacgagctcgcgttgggtcatatatggcggatttcgatcaagaatcgtgcgaggaatcgctcgatgtgtctcggtatacaaatcgaagtacctggacaaaggtatctttgacgactgggcagccaagcgttcacatatcgagctcaaacgaggagaaatcttggccggagataacgtagaggaatgattcatcgtgtacgagctccatagaagaatcaacaagagctaaaggaagtagcgcacccgggatcgatatagggaggaacgagaccgtcagtgacgtaaccctggtggttatgatcacggtggtttgcgctcaaaagcggtccggccggctcatgcggtacgctgttttcattcacctccactctttttctctgtgtccaaaggtataaaaaccagaaggtaacgcccacgtcgttccagatcaaccttttccaactgcctctcatctttccgtatctttctcgtttctttcaagtcaagctttctcacaaccaaaacaccgaaaagacccatctcgtcaatcttctttcaatatgtctgccaaaggatacgctattcacgataccagcaagtacactgactttaagctcatcgactacaagcttaaagagcagggagactacgacgtagacgtcgccatcagccactgtggaatttgtgccagtgatttgtttgtctctcccttgatttctttcgttctctctttctttcaactacagcagattgatgttggtttccgtctcgatctcttttcttgctgccgcgcgtacagacacaccatcactgttcgtgtttagaatctcgtctcgctcgattgtctgcttgttctcatcatctttcttcttcatctaatagggtggttggggtaaacctgatttgcccctcgtggttgggcacgagattgtgggtaaatgcacaaaggttggatcaaaggtaaccgaattcaaagtgggagacatcgttggtgtgggtgctcagatctcttcatgcttcgattggtgtgtcgcctcttctatattggattgttccttgttccaaaggatgttatccgtcttcttcctatctgaccctttttcaaatgattcttatagcaaaaactgcaaaaatgataacgagaactactgtcctgactgggttgatacctacaatgccaagtaccccaacggagagaagactatgggaggtgagttggatcatgtgccagattatatcataactcgagtagtgactaagttctcttttttctcttttttcatcctgatgttcctttctaccatcccttaggatactctactgctatccgagcccatgagcggtttgtctttgctatcccagaggccctggaaccccgacacgctgccagtatgctttgcgccggattgaccgtgtactctcctttggttcgatttggagctgggcctggaaagaaggtcggaatcatcggaatcggtggactcggtcactacgccgtactgttcgccaaggctttgggtgccgaagtttttgccttctcccattctgaccgaaaggtggatgacatcaaaaagatgggagccgatcacatcatcgtgacctccaaagagaactacgctaaggaacatgctggggagctcgacttgatcatttctaccgttgatgttgcttctggagttgacctcaacaacctgcttgcctgccttggcgtgcacaagcacttcatctcggtcggtcttcctgatgagcccctcaacggagtctcccctgcggcgtttatcaacaacggatgcttctttggttccacgcacataggtaacaagaaagaggcgaacgcgatgctgaagcttgccgccgataagggcatcaagccttggattcaggagcttcccatgtctaaggttgctgagggtgtcaaggcggtcaaggagggacatgtacgataccgatacgtccttcacaacgacatcgagtaatttctgtctcgtttctcttgcgctatgatcattgtagacgaatattgtatcatgctatttgtgtatctatgcagctcggtatacatgtacttctgatccaaacatagggatgtatcacctatcgaccaatgagatgcagcgatgcgtgacgtaagcgaaaagtgacgtgtgcctttcaactccgaggcatcacgtgattcgatagagatcgatagtttcttctagacgatttccccatcttttttccttctatttcttcattttaattttcttgttcatttcttcctttctctcatccatctctctcatcgatcaaagtaagtcggagttctctctaggtcaagacggatctctcttgcaatccacctacttaccttggcctttttccttttatccagtcttttcataatgtcgtaagtctcgttatggatagaaggaccttgaaagcaggagtagttgtccaggttcttatgtctctttcctcttccctcatgccttgtaatacatcttttcctgccttttctatagcaacgtttacgtaagttcccatctaccacaaagcatcttcttcccatctagttcatctcagtagctaagctaacctctttgttcttttttattatcagttcgatatccagagtatgtcatattctcgaacgtttctcgagccaacttgcagcagtcttcctcacgcatactctttctacatctatagtcaacggagctcctgctggccgaatcaccttcaagctctacgacggtaagcgccgacttatgaactctttacatctatagcataccgtattctgaaatggcttgactctttgttctcgttatagacgtcgtccctaagactgcccgaaacttcagggagctctgcactggacagaacgggtaagcagatgactatgctgatgtgatatttacatgctgtcattttttattctgccttcaattgactaaatgcatacaattcctgcttcacagttacggttacgccggatccggcttccaccgagtcatccccaacttcatgctccagggaggagacttcaccaaccacaacggaactggtggaaagtccatctacggagccaagttcgctgacgagaacttcgccgtcaagcacacccgacccggacttctttccatggccaacgccggacctggaaccaacggatctcagttcttcatcaccaccgctgttacctcctggttgaacggaaagcacgttgtgttcggagaggtcgtcgagggattggaccttgtctccaagatcgagtcttacggatccgactctggaaagcccaaggccaagatcaccatcgctgcctccggaactctctaagctaacttagatagtacctgacttttcttatttagtgtgcctatgatatgttctgcatatgctgtgtcccgtctttgtctcaaactggatcgtgccttggaatgttcgtacaagattgaagcagtactgatgtgaacatgaacgctaacgaacacacgggtgatctagcacctgaaaaatctcacacaagcccctggttaacagatggatgttcatctttcatatcaagcttgagatgtcaacgtgattgatgtcaccgtctgaactgtcaagagacgatggctatggggatgttcaacgtcccaatttacattgatccaaattcagttgaattaaatctttattccgtccattcagtcatttctttttcctctctttctactacctacatacatatacatacacatcgccaacttggagaacacaaaagaaaagagttgtaagagagagatgaacgtactgcctttccgatgtgcgtaatttacatgtaaccctcgacgtaaccctaacggtcgttcttgaatttgctaggaagggaaaaaaggaagagaccaactttttcacttttttctcaacagcatctctttctacatccttttcgttcaaccttccctctctctattcatatttcatcttaaacaatggcttccatcgaagagctttccctttccgacaaggaggaggagtctgtccccaccctcgttgagtccgaggactctggcgttcaagtgagattttagattcgttttcttttccttcctttttctctttttctctcttttcttccctcttttgtttgtcaatacttttctctgcgtctcctgtcaactttcctattgagcttccgacgagagatccgaatgggattagaagaaaccgttgaaaagaggttgaggaataagccccttgtttctcggcagacgagaggctctgtttttcatctctcttccttcgacacatgatctttctctaagtttgctcaacatctttctcatagtctctctgatattgacgctctttatgggtttgacgcttcacagtctcgatctgagcgaaaggcccgaaaggcccttgccaacctcggtttgaagaaggttgctggtatcacccgagtgaccatccgacgacccaagaacgtacgtatttcctcttcgtcaatatcaattcaatcacgtacaataacactaagaagaaatcattgactccttttcatctatgggaactcaaaatcgcaacacgcaggtcctttacgttatcaacaaccctgaggttttcaagtctggatccgctgatgttcacatcgtctttggagaggccaaggtgggcagcatttcttgccttagttttgatctgtccgagctccgaatcataatcgtcgttctttttacttgatattcttcgtatcagattgaggaccagtcccaccaggcccagatggccgctgctcagcagctcgcccagtcttccggtttgaccggtgaggaggaggagggtgaggagtaagtagattcaataccctttctagttcactttcctccttgcaagttctcactgacttattcactttctcggtatcgttctttctcatcacagcattcccgagcttgagggtatccagcccaaggagccttcctctgcccctgcttcttccactgttccctacgaagtcgatgacaaggatgtcgagattttgatgtcccaggccaactgcactcgagagaaggccgaggaggccctcaagaagagcaacggtgacttgatcaacgccagtacgtgcccttctgtctagtgcttgcgaagacgtctccgagctcgtttattgtaagaaagagaagagagaaagctgaatgtttctctttgtcttatgacatttgctatggcttcatatagtcttggaggcttccgaataagtgttgatgctggagtgtaggcaaaaagattagtgtatatcgggtgttgaggcttcatcttccattttttttttgttacaaccttaagtaaaaacaaaacaattcatacatgggtttacggctgttgccatacaacaatcggacatcgagtctgagaacgtgaaaggatgaaacattgagctctgttgggtataaacatacaaaaaggctcacatatctgaacgagcaacagaaacttacacaagtgtgattgaactgagcgcctctacatttacaactgccactaaccctttttgtttgggctgacgagaaaccggacacccatcacctcctctcttctacttctgaggctactgaggtcgtctcgttccagtcgatctttaacaagcctcatcaagagtcgcgaaggtacacgaccgtcgatctttgacattcgtctgatccaggacgtgttcgaaagacaataaacaacaacaagaagccagatcatcaaacatatctgactaaacccatcaattctctttagaccatttccatatcatctagatctagtctgtacatcctagagatcctctagaaatatttggaggatgattttagagatcaatttcgatgaagggatacctgctcttaatcaggcgaccacagcctcggcttactccttgaatgcgtgagcaccttctacccaagcttcaggcgcgagggtcttgcagctttgaagtggacgttcaagctcacgcttctcgtttcgatgtctctttacttgggtacgatacagacctcctcttcctctgaaaccttgtccggaaaacatcgctccgcacttcgacttacctccggaagatctgctacccgtgctcgagaacgcgttattctacagctgtcaatcgggtgactctgtgcttctacaatggctgctatctctacaaggaggcatagtcagtccagcggttccctctcattcgtgtctccttcagtaaactcagacagcctcattcaaatgcttgttttgctttattataatcatatgtttctgtaggaacgcttgcttccgttgaggatcgtagacgaggacggttgtgatttggtgtctgttgctatcatgggatcatcaggtcgggaggatagagaagagtgcgtcagaatgttagttccgaaggtgggtataggagggagagattctggtaagtcttgatccttcgtatcttggtctctgatcgagtacactaagatagatgcttggatgtattctcttctcttaaacatgtgaccagctggctggagctgtttgcactatgcagcactacactctacacctgcgcttctctcatttcttctgacagctggagcggatcctcatctacagactagaaaggggttgactgccttgtatgttgatcgtcctctcttactcgtttgatgatgaactccggctcaagatcgtatgcatcgacaaatgtcttgcgcttcccatcattctaatagagatatcatatctgacctagactctcgagccgaacagacgatcatcttgacttcagtcatgacgtctaccccgccatcatatgattcatacagcgctccttcagattcaacctccaataaacggcctgtggcgagacgtcggtcgacagcgtcgatatctgcatccgtcgctcgatcccaactcgcgcgccgtcaagagcaacgggagcttatgagagaaaagaaagaacggtgggtgtcgacagtggcggagaaggtgggcgtcccggcaggtcggttgacggagaagatgtgggagggcgaagaggcagatgaggtggatagaaagttacagagaaagaaacgagaaggaagaaagctgatgaacgggttgaacgagtcagagtctgaatcagatgcaatcgatctggaagaggccgacagaacaaattctgtcaatggtgacgacgaggacgaggacgattatgacgacgacccagcctacagctcgatgctcgtattctccctcccgactttgccatcgctcttggattctttgatctcttcgtgtccaccaaatccgtttcctagggaatggaaggctgcaccggcgaacagtgtttatctattcgctcgatttgcgctctacagatgcgatgaagagtggttgatcgagttgctggatagtgtggtcgatcgtatagagcaagtgatctacgtatgtcgtattttctccttctcgagtctattcttgtattcagcgcaggaatattgattagactgagtgtgtttgcgtgcgtctcgttcttttttttcaataggccaatgcggatgacttgtcgcatctggcgttctggctttacaactgtaccttgcttctccacctgcttcgatcagatgctgatctgaaagttgcttgtcatgagttggatttgttcatctcccttcaggtaggcattctttttcaagggtccatttaattgtagggaactaacatctggtttttgtatgcgcgggtctcaaaggaactgatcgatgcgattcacgtgtttgtgatccggtttatcgaacgaaaagttgacattttactcgacgcagcactattggattgggaaccgatgtccgaagaattcagcgacctatcattcgagggcgaatggaactttttaagaaatttgacgggaagggggacgaatgcgaagagggcggcagagaagatagtccctcgggcactcgatgtattctcatcaaccatcaacaccagtgccaacgccaacgcaaagaatgagggttgtacttcgaccacgagaggcagtttagatctgtcaggcttcaagattgcttcgttgaagaaacgagcgtctatcgcagagattcgttcggctctcactcagtcgaccaagctatcgacctctcagaccgattcgtctgtcatggagcagactgcagaggcgaggtcggcgtcagtatcgagcgtaatgacgccaaaaacatcaaaggtaccaaaaacaacgccgacgacaccaaagacgatcacgtcgttcttgacgtccgtccttgtggtactgcagttgtatgaagtcaaccctgcgatcatctgtcaatcgttcgctcaagtctgtaagttctatccgagcttcctacttttatgaaacgagtgaggtttcttgtacatgtttgctgatgacaatttttgattttctttagactactggatcggatgcgaaactttcaaccgaatactcattcggaaaaagtatctctgtcggagcaaagcagttcagattcggatgaacgtttgcgcgatggaggactgggtccgagaggctggcttgcctatccggatggcttcgaagcatctggaatcggtcaaccaactactccaatggctacagacttgttcgcgtctggacgattttgacgatctagtagtcatggtgtcctctcttcggtcattgaacccggtccagatgagacgggcagtgagggactaccggtttgaggtcaacgaggaaaggatgagtgaagagtgtgcgcagtacctggcccaacttcagaaggattgggaaaagcgaaggacaagagtaggagttgaggcccgactccgggagttgtcgatgaacgagaatgaaagaccgatcaacactgaccttttagacgcggcggtgatgtgggtggacaagctgttcgaggagggcgacagcggcagcgggggtgaacacgacctgcctggctcaccggaatgtcaaggggaactgatggattcaaggttcatgcttccgttcgcccttccgtccgagaacacactgctcacgacggtccctccgccgggtgctcctttcgagttgtttcacctggaagaggccggactaaacagagtaaacgacaccgacgatgagaacgacgggagaagctcattggtagctggatcggttcggtcgagcatgtcttcctccagaccatcttcaagggcgagtggctcgtgttcgggcgcgcgttctctacgtttcgtcagacggacgcaccgtcccgttcaggatttacctctcggcttcctaacttggttggattcggtcgagaccgctaaagtcagaaaagaccgacggaccggggacgggaacggcgggaaagtgatgactgatctggctggtccggacgtccggacgccggtgccgttgagcaacggttcaggcgatcgtactgatcctttcgagagttgcgtagtggcgggagtcgaggattcgcgtatcgctccagaagggaggtacgacggggtgcgctctgttccgaccggatggtcacctaggatgcgacggatgactcccagccggttggacacgctgaggatggttcacgacgatcagcctgacgtcagtttatctggcagtctgtcaccgagtgcatcttcggtcggtacattgacgcctggatacaacacccgacagctcgacgacgagctggagaaggaggcagagaaagcagacgagtcgaattcttggtttcggagaaaaatgagctggtcaggatcgcctgtatcgagaaaacgtctggatcagcgatcagctgaatgatcggccggaaactattgttcttttctccaactttccttaactggaatttgattttttgttattaagtttaatctcgacactcgcgtgagcaatttgcgttgtaatcctttcttaatacatacgtttcaatggtttataccctttctttcacacttgcgttcttgcctttcctttggacctcagggaattgttctgttctattatagatgaggtcttgtgcgtgtgtgcgtgtgcgtatgcgtgtgtgtatgtatatatacattcatcaacaacagtgaaaagagaaaatagaagcactcgcaggagtcgtggcttgtttccaaaagaggcttgccgcagctcaagaagcgaaagagagcagtctggactttcaagagaataggcattgcttgagatcgatttagagggcgagcgagcgaacgaacagacggacggacgaacgaacgaacgaacgaaagaaagagacaagaaaagaggaaagaagggcgagtgaaaaagaaggcagaaaaacagggcagatcctttcaagccatccctatccatccaaagcgtcaacgtccgtcctcaacctatcaacctatcgacatccactcatccctaaccgtcgacgccgttgtccctcttttcttgtcttcctcttctttctttcctctttgtgtaaacgtgctcaaggacaagcctagctttcttctcgcttttcctttctttttcttctcgtgccttttctttcggatcgaaacccaatccttgccattctctgagtcccttcgtcgacatcctctcagacacacacatcgacagtttcagacggaaaacgatgtttctgccctattcctttcctttgccggcccttctcttgtctgccataatgtcatctgctctaccagaaccagaaccaaaaccaatcgacaagcgtgcctttcagatttataccaccctcgctgggcaaacaaccactgcgactgcctcggcctcggcggcttctgccacctctactgccgcctactcggccgccatattgacccctccttctccaccaggcgaccagccaacatccatgacctggtctctctgggaatccacagatgctttggttgatccggccagaggaaacgccaaagttagtgttgcccagaaaggaaactttatggggttcagtgtcgagttgtccgtcgtacgtatgatccttgtttattctccgagacacaaacaccaatctaatcagtatcatccctcggggtttgtcttcaaacaggcgaatcaagtctgtaagtcattgttgtcgtcgtcgtccatatcattatcaatccttgctctctaaccaacgtctgtttgttatccttcatgatattccatcttcagtgggaccatcctcgatcgagctccgagctccgtttctcaactacctacagaacttgcgttctcgtactcagtcgggagccaggattcgaatcggtggaaactcccaggagggttcgattatgtatcccgtcgacgagcttcctggaggaggcgccggagggtatgtttcaccatctgtttcgactgtcccctctccatgctaaacgttatttcttcttgattatctttgaaacctgccagatctttcctagagaaagcgtcctcgaccgccacaaccacaaacaccccagatggttcgtccttccaatccctgttctcaaccccaaaaagaccgtctctagactaactccatactctaacagtgctttacaccgaggatcttgtctatgccatgatgaacgtcagctctttggtcaacaccgaatggtattttggtttggctttcgccaatgatactgtgtctggttggaccaacgctatggaggttgcccggttcgtcgaggattcactcggcagtaatcttatcggctttcagcttgccaacgagcctgatctgtaagccaaactttttcaatccgttcatcatgttttgctcgaaaggttccctgatcacagatttcttatatagatacgccggcggtcgtcgaaactctagctacgatcagagcacatatctctccgagattgattccttcttcacggatgagtcttcggtcgatgctgacatacctaacctaaacaactttgcccttcccaacatttgctgcaagtacgtgcatgtcaactcccgtcgcgcctgtctctcacttactgagcccttttctactattccttctcgatggttctagctgggacaacaatggaatccttgatcttgggttgctcactcagtttgggtcgcgaatgaacacgctgtcttaccaacagtacgtccagagatctgctctcgtctcgtaaccgtaaaaatcttctgaccgaacgcttcaactgctccttcctgcctttatttctccgctttaattgctccaccctttctgcctatagctacccggaaaacaacgtatgtcgtcccgtccagacttcatttggccttttacacgtcttaccattttttttctttctttttttcccttcggtattctctgccggcgtatagtgtgacaatcagccaacaacacaatctcaagtcttattccccacatttttgaaccacactaacgcggccaccttggtgcagtcttacgttgaacccgccacgcgaggtatcgaggccggtgagcataaacttgaattgatatataaggacgcatgtatgagtacacagtttcattctgatatgtcttttgtctatccgtctgtgtctgtatccaaggcctcgaggtgtctatgatggagacgaacacggcctcgtgctctgggttctctggtctgagtgactcgttcggggctgctctctggtgagcacccggatttctatcttgttctttgtcaagaactatggatatgaggttgaccgaagcgctttccttccatcctttaaagggctcttgattggtcgttgaccctggctgcaaacaacttcacgagtgcgctctaccatgttggaggccgagatgcctactacaatgtaagaccacccgtttttttctttctttcaaatcgacgtcgatatgaaagttaacattctctccctcctatcgtatagcccttcactgccgttcagacgaaccaatcgaccttccgaggctggtcgaccggtcctatctattactctttccttgcaatggccgaaacgtttggaagcaagaatctcagtcaggtcactgatcttacagtacgtcttcaatatgtttttaattggtatgtctcgcttgctgtacttacctgcattctctgtgttcttcaagggcaataactcgatctatttcccggcatatgctatctacgaggacaacgctcccaccaaggttactttattcaactttattaccgactcgtccggcgcctcggattacaatgccgtcgtctccatcggcgggaagtccgaggggacgacaacaaacaccctgtccgaagtctacgtgagatacctttatgcaaactcgaccgccgaacaatgggacatcacctgggccggccaagctgccggaactggtggtgcttggtctgcggatggtacgttgagcggcaccgtatcaactgtcaacatcacatgcgaaaacaaccaatgttcgatcccgatgaaggctccctcgtatgcgcttgttttcctcacccaagacgccttgacggcctcttctggatcggtcgttacggactcttcctctacgaagtctgcgacgacatttggtacgacgtacgcagcgaacggagccggaactgcgaccgtggatccagctgtgctgtccaccagtaatggcagatcgacaggtaacggtacacttggaagcacaagcaagggaggcgctgccaacgttagtggagcgcccgagaggatctcatcaatcactagctcgtggcttatgatgattttcagtgccgtcgctgtggtttatctttgatagctacctaggactttcccttgctttttttcctttctttctttcttccctctttctctactgtgtatccagtcatctttcatacgtccttctttctactctatctgtcagactctgctactctgttcattcatcatttctgtttgaatagcccgtacacctcagacattttgacgattactatacttctttctttacgaactgcataccttggtcggccattctttgcataccgtccttgattcactcactcggacttttgtcagctcttgcttctttttcctcctttctcgtaaacacaactcttttctcctgtcctctctatcttttgtgatgtcttgaagtcactctataaccatgctcttcatgccttctgatcgagacgatatcaacgcgtgcatataagcgcgaatctcttctcttcatccgactgaagcgtggtgcgtcatcggtgtacgtaagaaaaaagaagttggtccggaatctgtctcgagtctaaccggctttcgcctcaaggatcgctttggaccatcatagccctgtctgatcggttcaaacggcctttggcatagctctctccttctctttccctcaacatggagtttttgcaaagaccgtcgaatatcgagaggttatccagcacgtatccgacacgggcggcgaatgacccagaagaaagggttccactactgggtccttcgtcggacatgcttgcctcgacgatggtgtaccctttgatc

SEQ ID NO: 684 - DNA, 5651 bp, Xanthophyllomyces dendrorhous
tggtgtaccctttaatccatgagattagaaaggatgtcatcgttagtcttcatcccttcttgttttcgtcatcctctgacttgttggggctgacgtatagatgtattaattgtttatgtgttccggtcttgtgtgggcgtgtgctttgggattttctggggattctatcgaaatagcaacacatcggtcagctcgtttgaatgttgctcaagaaagatggatcacaagttggaggtgtggtcctcggcacttggagatcagatttacagcggaacatgctcattttttgtttgacacctttccatatcggtcctgctctttctcatacagatactccgctaaattgggaacaactacaaaatccggagacgtcatatacgatcgtaaggccgttgactgaaaagctgttggcaaagaagaaccatgcgaccggtatggcttgtttccttctgatttgtcgtagagcacgtcttcgttctaatcttgtcaatggtcttgtgctctttatgttctgtttcatgtacttgctcaacgatcagtgttctgtttgatgatcaacagagttcaattcataagactggcatccacctcgctatcactctctgttctttcccaatcgagagcaaccctatgtgaactactagcgatcaggcttcttcgtgcatggtcagagaggacgatcgaactagctactgtattgctcactccttgggatctctatcaaggttgctcggacgttgttcgtcaaaagttgatggaggaggagggtgaggacggtcaagtcgagagagtggggaacgctctagaaatggccatcattagtagagcaaagaggttgatcaaatgcccatccgcgcagaaggttatccgtgagtgtttgaaagaaagagagaaaaacaacagcttcaggacggaatggtgtttagtatatgaatagcgggatcattgactctgatttgacgttccaatttgtcttgacaaagatggtatctggacgggccgcgtggtttaccaggcgtcgaaccagcacgctataatagcagagtgagcatgtttcaacatctctgaatctaaagacgcaaacagccggttgaaattcttcccttttctctttgttggtagtgtacgtttgatttgtgcccttgtccagcaatgtctccgctattcagcgttctaactagatttttcgatcgagaactgtcagaactataagaagaaacctattagcatatataacccgcacttggctcctctgcttgatcattaccgactcaaagtcccaaggatccgcgcgtttcttgaattctggaagtacgctcacccttccttcgttttcatagtgtttgtttcatacagagtgcttaccgatcgcttgcgctcatgaaattttctgcataccaacagctttcttatacttttcgtgctgtttgtgattgttctcgagacttcggacacaacgcgtgtcaatgttccagaatggctgtttatcatctatgcagctggtaagcagatcagaggctaccctcaatactctcgccgctgaaaattcctttctttctttcgaaacgccatatctaggattttcactcgacaaattagctggagccgcagagtatgtttagttttgctgatcttcagctcgccagagttagtgctctagtcacaacggcgaacctgattgccaactttctctttctcgaacccttagacatggaatgcaaggtaaaccttttcgggcttgttcaacgaccttgttgtgtctcgggcttacccagtctcttctcctaccatgtgcatagtctactcggccaacctctggaacgggtacgtctagaattatgatttcttgtcctacactgctagaatgatgtctctttaaatgatgaactgaacatctcgcgtctcgtggactgtacagatttgaccttgcatttgtaggaatcttcctatcttatctgagtcttaggatctatggactttccccgtggtttggatcagataatcagtgggcggcaacattgggaatcgacatgttggccattggagcttgtgagcattcagtgcagttgtttttcgatcttggcgagtgttggtatactcatttgcagcgttctcttttctgttcttcaaggtttgatgttcccgaggtatgtctattgagtctgttattcgcgattagaccttctacccaactaaatcaccctacgtttacggttctaccagactggtgtttgtcaccttgagtgacaatctgatgattttggctatgcggtccatgatcatcgagtttagcttcttgatgttcatcaccgtgttctgctttcttggattctgttacgcgttgtataccctagcagagagtatgtgtttgtcatgttatcacgaatctaagttcattttcgacctcgctcacgcatgctgttcatttcatatttgttgcgaaaatagagaggtatgtattattaaaaacagctatacagaaattaggcggtcgaaagcttactaagttttttgtttccttcactttttgtagagttcctgcgactacaatcgttagtacatctgcgcgctgttccagttcggtatgtcgatcgaaaagctgaacatcaagatctgtggattctctagtcgtggtggatgctcgatatctggttcgggttggatgctaccggattcaacgaagccaccaacttccatcctgtctttggtcctcttgtgattagtgagtgatctgtatttgcatgcttacgacataaaagagaatggcatactgaccgatgctcaccattttggcgcttgtcagtgttcgtggccagcttcttggagaattgagaaaaaggagttgaagtgaaccacgctgaccttatcactctttcttcactcttcacatgtggtttcacagcttgtatgcttgcctttccaatacctgtgagtcaaatagattgatttcgcttttggatcagagtgacttgtcgctgaacatgcctatcgtctatcagtgatcctcacggtcctggtcgccatcctgtccaaaacgttcgccgatatatctcaagatgctactgccgaggctatgttccgtcgcgcggttaccaccatcgagggagctaaagcagacgctgtattcagttatcaagcgcctttcaacttgttggctgttgccggaatgattccgtgagtggaaccatgttgctaagttgtgtatgactcgatcgaagtgtctgacatagacatcaacgtgtactctctattagtctcaagcctttcctctcacccagatggtttcataagcttaatgtagctttcatccgaatatctgcctttcccattctgatatgtatctcgtacgttcatgcaactgtaatttaactagtaatatataatcccgaatagattaactgaccactgagaattcaggctttacgaacgaggggtgatccaaaaatctttggtatacgagacttcaatgaactggctcgaaaagatggcggtgatcgttcctaaacggttgcataatcttcgtatgtgattgattccacttgcaaattactcgtgccgagcttgcatttggttcttcgttgaaggttggaaggctatgactgacaaaccttctcctctatcggccactcatagctttgattgaaggtctggtaggaacatcatcagagatcgaacatgtatttgagattgaagaagagtgcggaggatgggatgaatcgtcggatgatatctctgatgacggttgggacgttgatgattcctatccggaggatttaccatctatcctcaaaacggaaccccaatcgatagcgaattcttcaaacaacaccgatgcaggtcgctcgacatccaattcaccctcagctgtcatggcatctgaccttccttctgctgctaccgatggccaatcaaccagacatgtcgttttcccaaattcttccccacatcctaatcatcacccgaagaaacgacaagaatcgatcgacggacttaatcgagtgcatccttcacctcttgcccggttgttcgtagctcctcctatcagaggaagcttttcgtcaatgtcgagcctgtcgtccagtatgccaggtgggaaaccagtggggatccatcgtcgagcaatgtcaatgtcaaacccaacgacgcttccgcgaacgatcccagagaacaagcaagcttcgtttccctcaggctatgcgttgtcgaagagcctggatggtcctcggacgatgaacgatcgaacaggaggatcattcgcagtgggagacgcgagcgatgtactgaatgagcaggaactcgagccaggtgtcaagttggagcttgaggatcgggtcaaaaaggtggaggaaaagttggagcttgaggatagggtcaaaaaggtggaggaaaagttggagcttgaggatagggtcaaaaaggtggaggaaaagttggagacaatcaccggattgttggagacgatactcaagcggttgccaggcgaaggcggtgattcgacccctgatcgacagaaatcagtgggtatggtaggaggtacgccgcgagtttttctttgatctagtctcctgttctttttctcttagggtcgagtccaaggcagtgaagatactgagtgttatctgatacgtttgcttcagatttccacatggatcgttagcttggacttctccatgttcttcaaaagctgttgtatattgaaatatgcctatgatatatatatatccatttgtttcttttccctcgatcatttcgcccgtctattgcggtcgagaacactctagagaaacaaagataggagagctaaaggggccaaaacaacatctgatacatttacgggtacatggcttcctttttttcatgccgaaggctcgatctctcctaacaacatcgtagcgtcctttgaagcggtgagaactattgtaaaggaagaagaacgtcagaaagatcagaagaggagggttgagaagacagacgataagatcaatctgagtcttgtcggataagagcaataaaaagacgtactgataggctcgctcggatggaacgccgtcgctgataagagcggtaagtagaaaggaaggagggaacgaaccgttagtaagtatttgacggtgtacatctctggcccagctttcgtatcttgaaaaagaaaagactgaatggaaaaagaaaaaactcacctgtaactgttccccgatgacccggaagctattgcgtatcatcaagatattatgagggatgtgtcgtttcagaacgcgatccgcttttcttgaatacagactcgctcgcgagaaggacaaaaaaaggaagataaagacttactttgtacaaaatatctgacgattcgacgtcccagatggtcacacatcgatctccaccaccgacggcaacccgtcttccaccgtcgtccaaactccaagcagcctttgagagcgtattgtcgaagcctgctgaggttccgtggaggacgcgatggattctggaaggagacggactgaatggtttgacgtcatgaacaatcagcgtcgagtcaaaagacgatgacaggagttgttgtgcgttcggagagagagatagagaggcaatctatgtagatgaataccgagtagatatgacaggaaacagatgtacaagtgtgtgtgtgtgtgtgt

SEQ ID NO: 685 - DNA, 1920 bp, Xanthophyllomyces dendrorhous
tgtgtgtgtgtgtgtgtgtgtgtgagcatatatacacatatacactgatataaatgactggaattggagggatatcagagggactcacagtgtctgtatgaccctgaagagagtagagaatagcctttttcctgatatcgtatacctgagagatacgatgagatacaagaaagaattagtcctccagaaatacgattctagatcgttaggatggcattcagacagtgaaggtaggacgaagactaacgtgaatctcgttatcgatcccaccgacaaacacctgagctccatccgcactccagcaaacagccgtagtcgggatccccggcccatcctctcccaactcaatcactggtttctttccctcagcctctccgtcccatacacgaaccacaccatcatctccaccgctgacacagagctccttcccacccgtccgggcgatgtcgattgagttgacgacaccatcatgggcgtagtactttttttcacgtacaccggtcgtcagatcagtgatagctacggtcgagtcggttgagcaggtatagagaacggggtgaaggtatgagaactggacatccaaaatgggtgatttgtgacaagttgtaagaagagcagtgtttgtgtgcggggggtacgtcttccaaagagctgtaaatgaagaggaaaagagatagaacgatagagggtaagttagcttcaagcttgcaagtcaaggaaggaagagaaggagaaaaagatatgcgatattggtgcagacaattctgctcgtttgatagatgtcacttgaatagatgtcaactcacagacgcttttatcggcagaagctgctgcgatcatgtttccatccggagagaatctgcatgataaaatttcctcctatgagcacaaggagatagccagcaacacgttggatacaaagatgagataaaatgaagacattcaaagaaggtagtcagccctccgtcagatggcgtgttgatgaagatttcacgggccagacacgtctggttgaacccgatcttatccaccaccaagtcccaaggcagaataaaccaagagaaacacggtcacataccgaatgagctccagacagagagactataggagcctcaagcccactcgtcctcttgactgttcggatgagagcacccttgtcggtctttccggacccagtgcttccgatggcgaccgtgaaattagacggatcctcatcctcctcgtcttctacgcgtgatcgtttggaaagggcggtggacgaccctgaaggcggatgagtttttctaatcatcttgtctataaagaagctaccgggagagaagaagaggaagagaatgaaagaaagaggtgagagcacagggagaagagcacgatggatggtgtggttaagaaaagtcgagcccatacgatatgggcatatcttgggcttcacatgggcatcacttgggcatcacatggggtgcatccccaagtgatcacgccgatcacatctgccggttacaacccatggttacaactttctccccgtcggaaatctcaacctttttcattggtctctctacttccgcttttctcatcaaaccatcattcatcctctcatcctcctctctcaatctctccatgtttgcccagtctagatcggtttccgccaaggtcgcgtcctccctcggacgaaggtccatcgcgaccgtctctgagctttctcccaaggtcaagctcgcctccgtccagaacggctcgtccaccgcttcgctcacccttgtcctcaaggccggatcgaggtacgagtctgctgtcggagcggccaacgttctcaagaacttccagttcaaggtgtgtcttgggtggtctcgttctctttctgacggcctggtctactgggaggagtgatccgggtggtggagtctagtaggaggggga

SEQ ID NO: 686 - DNA, 1484 bp, Xanthophyllomyces dendrorhous
ggagtctagtaggagggggatggacaagacggagagagtgagatagagaggagagaaaaaaacgggtcgatcgattgagcttttactgatcatcttctttgctctctgttcttttcttcttgctttcttgctttcgtcctctgctttcgtccttttctttcgtcgcctccttccgttgtttcctcggtcgtttgtcgtcccggctttcttgtacgcccacggtgtgacaccacgatgaccgagaacagagcaacaagtcgtcgtccgctctgagcatcgtccgaggtaccgagcagctcggtggtgtcctctccaccacgctcactcgggagcacctcttcttgactgccgagttcctcaagggtgacgagtgagtgtcttgtgtctttgttgtcgctgtttggtgtctgcgttgtcgtgtcctttcttctcggtcggatcgcttgtgtgtgggcttgggatggggcgtgaggagacgcaaggagcacggcgaacgctgaccatgagtgctttcgaccgacctacagggactttttcctcaagatgctctccaccacgctcttcccgaagcttcagcttcacgagctcaacgagtcggccgtgccgatctctgcccaggaggccgtccaggtggcttcttcgccgtcgacgctcgctgtcgagtatgcccaccgacggttgttccgatctgggttgggcaactcgctctacgtgtcgaacgccgagccggtggtgcttgccgacgtcaaggcgctcttcaacggtgccgttcaggacgagattgcgctgatcggaactgggatcgagcacgagacgctcaagaagctggccgagccgtactttggtgaggagctctcgatcgcgctccaggagcaggcggctgcaaacaaggccggtgcccttcctgccgtcaagaccgagacgttcaacggtggggaggagcgagtggcgatcgatctgcacactctgcccgaggcgaagccgtcccttgtggttgcttatggctcggccggtgcgccctctgccgagggcttggtgatcccccacctgcttggctctggctctgcgctcaagtggtcgtctgggtctgctccgttgttggaggctgcgtcggccgtcgagggctcgaccgcccaggcgtttgtccagtcgtacactgatgcctccgtgctcgccatcgtggtcgaggccgagggaagcaagcggctgaccgaggttggcaagaaggttgccgagatcgtcaagcaggtgtctgagggcaaggtcgacaagaagacgctcgacggggccatcgcccgggccaagtttgagctggcctcgaaggcggagacgacggtgggagcggtcgagttggtggctgccgaggtgttcaccggtaaggttgccacgctcgagcagcagttcaaggctcttgatgctgtcacccctgcatctgtcgccaaggttcgtttcggtctctctctgcttgtgactgtttgtgacag

SEQ ID NO: 687 - DNA, 18652 bp, Xanthophyllomyces dendrorhous
gtgtgtgtgtgggtgggtgcctgttggttcgttgtgtatcagaagcttatctgctgggcctgtctttcttgctttcatccgatctctatgtgacacaggcgttcaaggggttcaccaagaacaagcctgctgtggtctctgtggctcgactaagccagatggcctttgctgtaagatccttgtttacatctcatcttgattatctgtatccgttaggatgttgcgtttcctaacgacctttttctttcaccttcggatcaacaaaaatccaggacgagctgggtttttaaagtgtaacggagaaggaagagaagttgatgtttactgttggagagagtcccatctcgggctgagaagggagtgatgcgcgtcatctgagattcatgtttctttcgatttctttaaacctatgtttcggtatatctacaacctgttgctatcatctaaaacgaactaggatccaaacaaaaagggtttcagtgagcgtcaaagaacatctccgagcgaacatcctttttttcccttcccctgtggttacggataaacgacatccgtaatcgtcacgtgacttgttcattccgcctagtcggaaacaagctagagatcaaacgactgacaatcttcagcctttttctttcttctcttcatccattcgcccattgaccatccgtcgtacttctttcgttccccagccgttctcgttctgcctgtgccggttgattagccttgatataaacagtagagtcctcgtctgcagtattcctatctttttctctcctttctctcttctcttcctcctcttctctctcgcttcaaaacatcccccatccccggacgatggacctccagctgtcaccagcaaactcgtcccctctttctccgttcaccgaaccgatcgagccatccaacggagttccttctccgagctctcttccttctctccagacgcttcttcatatgcagtctaacgggaaagttcaagcagagggctcggtaggtcggcctccatcggatagctcggatctgtcatcttttgatgggtcggatgatgagcctgtctctcaagggaccaaaggattagtccccaacgaggatgaggatgaagaggacgacgaagaagaagatggggaagaggacgaggaggatgaagaggatgaagctgaagaagacgaggacgaagaagaagagccagaagcagatctgccgactcccgttagacggccacttcatcaacaaccatacaagcagcaacaacaatcatcaccatccacttctagacaccgtctctcccattctccaatagtcaatcgaacagctgtatcaaacgcctcgatcgctcctcctggttcatcggcatatccctccactcgatctcctacgctcggttcgccccccagacgcgctggatctcgaacacctacctccaatcgccatcttcgacagccagtcaccccttccaacctcatctctaacacctctccctcactagtttcagcctcagcctcagcatcggtatcaaaaccggcgccgccgatatctctacttgcatctcacgtgtctgcaacccaacaagaccaagcggcacgcgtcttcccgccagcacctcagtcgttatcatccacgttgtctgatagcgatgaggagccagatgaggaagacgaagatgaggacggagaaggtcagctcgatatggacgtcactccggaacaggaacagagacctagaggggctgtcgacgtcgatatggatgccgaagcggacgcagagaacgaggacgaagatgaagacgaagacgaagacggagacagcgttctggctgaaaggtcgatcagatcccagagtacaactgttcctccaaagacttctgttccaataggaggactagaagtcaaaacaccccaggaccctataaacctcggcctggaagacattcaagtggaggaaggagaattctttgagaacgacgcgctttcagaaacagcagggatcaaccacgtcaagcacgaccatcttttcgttccttcatcaactggtattgagccaatcatcacggtagaagacggacaagtggtttcagaatcgaacggaaatcaaacccgagtctcggacgatatagaagaccaggaccaacttgtgcagaaatctttattgaaagacaaacagccatctgatttcgagtcggtagtgatcaacggccaagcaaatggcaactcgaaggaagagacccaacaacagtctccagtcgaggagaaagagttgttagagaaacatgtaggaggggttaagattaccgaggcggtggaggctgcagaagagcaatcaaaggatgaagatcacccgaaagccctcaagactagtaccaagcccgatgttattatcaccacggttgacgagagtgagtcttcaattggtctcatcatctttttagttcttttgctgggctaagttctgatggcccttctttctttctcccctcatgggctttttgtttctagatccctctggtgtactaccttcacactctttactggctcaacagcgagcggacgcattagaagctctgcttaagatcgagatcgcgtttgccaggctacgggataaattccacgtcgagaggatggaacaatgtctaaaagaagaagagcaacttctagatggtacgtcaaactcctcatgtacttactttctcgaggtctttgtttaaacgcgttctgtcgtgtccgtcgaactaactgtgtcggccgttctcacgcatcttctatgaatggacgtatcttgtgttcgatcacttgcagagtctcatccggttcttgcacatttccaatcgagattatcggacttgcgcgctcgggagctcgtttatatgggaaaacggtcaaagacgtttgaggtctctctcgagaaagtccaacaggccgacatcgaagcaatctgggagtggtggaggaatggtcgagaagaacttcagagagatatgatggctgacgtgatgcggaaacgaaggagagttgatagagagaagagggctgtcgagggaggtagacgtaagtgacttttcaacatgatttttgagttaacggctcataaggccaccttgtgtccttcgcgattctgatctctcctttggtcgacttcttttcaaaaccaacccagccaaacgaccacttcctgttcctccgcaaaacgcgtcgaaacgaaccagacaagatagccaaccgcctgaccttgaggatctcctacctggttcgttcttccatcaccgaccggaagaacgacgtcgaatacgggaagaacgagaagcgatcggccctcgtccgggcttacttggtctggacgagcgatctcgggatgtggatcttcaattattaggtgtaagtttttgagagatttgtcctttagctttcttactctcttttggatgctgtttgttaaaactctcttatcgccttcttcatctcttcttcccacccggcgcgtatccagattggatcgtcgatacggtttcgaccatttgagcaagcgcaacacccgttgatggttcctccaaatcctatggctcatcatcaccaccatcaccatccactccaccctccgccaccgcctccgcctcaatctactgcacagcttgcttctcagcagtatcacaacgttcattacccacccggtccctctcatcacgccatggcattatctggaggaggatcgcaagggattccatatccattccgacaggggatgccttcttatccagctgagcaacaacaacaccagcagcagcaaccatcgtcacatcaacactcaaatctacagtcacaacatcagaaccaacatatgctcgtgcatcatcaaccgacgctgtcttcctcccagcaacaacagcaagcttctcagcagcagcaacacaactcgcacccatatttgtttaatgggctctcaaatggaggatctttcagccagccgcatctttcatcccatccgggagcctcgtttgagacatagtttggactgggcatcattctatttacatttgaccctccctactcattgaagtatatatttcttcccttataatatcatgtgtcttacgtgctttcctatcagatttgccctttggcagccggtttgataaccgcccgttttcttgacagttatattcattcactggtttatctcgttgttctatttcgtatcctctactctttcttatatcctcctcaatcagagtttctcttcggaagggaacatatatttcttcctttgttcctctcttttttctcttcccgtgcacgtttcagaacagtgtcatgaggttaagtgtatgacatatggacatgtccgtccaactttttgtcgtctttattttagtcttctgtcttaacttttgttcttgtccataacgaaaacctgattcagatcattgttccctactctttcaaatattcgtccatccgttcatctctgtccagctcatcgtgatctgtacattgtcttcccccgcctgtccatctgacagatctgaaagagccacggggaagcaggttcttataaaagtgaattgaatatatgtgtggatgataaagaaaaaaaatgtaaagctctgtcctccttctttttcccagttgaattccgctcgagtggtttaggttcgaatagactatcgatctcgtgctcgctccatggctaaataatcggtatttagatgacaatgaagaaagatagtcagatatgtacatcgaaataaggcataaatctgatcgacaatcccttaacagagataaagaaagaagaataaaaggatgaacgaacggttgtactgtaggagcttctcaatcaagtcctatcggaatcaaattttgattgcgagtaaagagaaatgcgaacaacagatatcaaaggttatcattaagagtgcgttaggtcaagtttggtaatccagctcgactagatagcatggcgatgagaatataaggtagtacaaaagaggaagagggacgcacgacgtgagtgagaaccattctcctgcagcagtacctcttgagctgaagcttgtcgagcgcctctctatttggccgtacatcatccgtcaagacaatttcggagagagggagatagaatatgagaaggataaggaagagagagcggtacaatcgaaggattagtcagagaagtgtgtagaggaaggataatagaatagagatcaatacgtacccttcagtcatatctgtagtaagcagagcaaggtaggactcccacatgttaccgacaacctttccacatgagaagctagaaacaagacgaaagaatgagacggatgagctctattttcaacccagttctgccatttgttctttggaagggaaggagagaacgtaccaacggacagggatgatctgaatatgagagaaagaaatagaggatcagacaacattattttgatcaaagaacgaacccctagcgctgaatcttcccacgactgacaataaagagacggaagaacacgaaccattttgatattctgaacgaggccaaggaaaggaggatgactgtcgagagaatgttgaacggaccgggggctgagaggatggaagcaggtaaattatgatcagtggttacggatcacattttgccggccaacctcgtaaccatccagttggcttgctctccctaaccagaggtctcccttttttttctcttctccctttctcgttcatcatcttcattcttgcaacacaatacacttattgtctcaggtttatacccgactcaaccatcatgtcggccgctttcaggacaagctctcgattgcttagcatggcaacgcgctcgttcgcatgccctcccaaatcttcctctttccattcattctcctggcctgcgtctacgatcccatcgagttctagattgttctcatcatcatccgtacgaccggcttatatcggaggttcacctatcacatatgcctcaaacgcatcgttttccactgagggagacaacttggttgtcactggaccgctaggttcagaaaaggtattcatccacccattcgtacgcctattccaccaagcacccgatgggtcagaatcggaaggtcgactggaagtcgcggtagacaaccagaatttagaacatcagagggaaatgtggggaaccactcgaacgttaatctcgaatgctttgcagggtgtcaccgaagggtaccgtatgcctatcaagatggtcggtgtcggttaccgagcggcgttggaggaggctccggttccgcctgggatgaagggtgaggagtggcagaaccggctgaggttgaatctcaagttaggattctctcacccagtgttgatggttgttccgatcggtatcactgtcgaagttcctcagccaaccaagttgtttatcatgggtaccaacaaggcagacgtcgctcagtttgctgccaaaatcagagaatggaggaagcccgagccttatcgtggaaaggtgtgtcccgtctttcttctcttttgttcacacgtatgcatacgcgcatgtgtatacgttggaatgtgtcacatttataaatgaatagtccacaaactgacgaactcttggtcgacgttttgacagggtatttttgtgtatgtcttctaactctcgacttggaaagctttggtcttcacatgttggataaactcaactgattcgcttttcttcactaacttgacttcataggggtggcgagaccatcaagcgaaaggagggtaaaaagaagtaaacaaatattatggctccaatatattaaaccaatcggtctaccgaagcagcatgaacggaagacacatcagatagatatagacgcaatctatctttcatacctggctgggcacatgtcgaagtactgactgggcgaataagcttgtggacgagacatgatggctgaaagaacgaacggataaatgaatgatcaaaggatgtatgcgtcgcctcgtctccaaaaagacagcgggatatagaggagtaaccagtgagacagaaacaggggcttacgtaaccatgtgcttaaacccttgcctggttccttatctgttcctggtacctttttttccctttcgcttgtcactctttgctcctttttcttcagcttcttcttctcctcttcctccttctacttgtctgccgttctatctgcccttctctcttggtgtcaagctcgtgtttccattctctctcctcctcccttgttcatctccccatcctccccgtatctctagacatggtcaagaataatttgagcatcaatcttacagaagacgtcgtgtttcttcggggatctgcgactgtacgttcctgacaactccccttgttccttctccgtccctgatggactcattatagagagccacctctcttactgctgtcaactttccatctccaatgttgactcaaaattcttcactcatgtatgcttgtgtcctacccgtcacatagggcgaggattcaagaggaagacgggtagcaccaagggatgacctccctccggctatgcttagaggagtcgtcaccttaactctggcaaagtctagtcgaatcaaaagaatagacgtcactcttgaaggaaaggctcgaacagaatggccagaaggtacgggtcgtcttattcaagtttgtttccaagtcctcgttctatctttccaggcctcatatcagaccaactgcaccgagaaggcgctggctgattggcaatatagtatttcgggcaatggcgctttccgcatggacctcttttttccaaatgtttatccgatcaatctattcttcttctgttattcctttctctgtttgctcgcacgaccggattcgttttcttttgagaactccgacaatcaatgtatgctgcgtttgactgaatgaaactctcttatctctctatacaggtattggagctcgtcggacagagatccatgaggaacacaccatcttcgaaatcagcaccactttattctctcatgatcttcctgtccctcagcccgatcgctcgtcatccgtggcgcccacggttcggtcatcctcagttgctgcagaaccctacggagatccaacggtagactggtcagagatgagttctgcattgagtcgagccatccgtccatctagcagcagatcgtccagccggtatgagcctacttcagccgctcatgtcgaagaagaacgaggtcgtgcacggttaaatctgaaccacgtgagaggcccctcaccggcgtacactagaaccccctcagtatatgtcccgatgagatcgagcagtccaatcaatgagagtagtcggagtcccagtcggagccgaggtcgagccgcgggattcaaagcattgacgggcgcattaggcgtaagtaatcattcagaagacgacgagccaggctcaagaagtgggtctagaagtggatcgaggatggcgtttgaaaaggacgaagagagacactggaaagagttcaggaaaggttcgacattttctttcggattcccattctttgtcctctttctttcttctgggcgcttcctgatagccagacctttctctttgtgggaattctttgttacataggtgaatacaattatccgatctcattcaccattcctccttcaaccccgccaacgatccacgccgattttggttcggtcatctaccgattaagagcaacggtttatcgttccggagcgttgacaaccaacatgtacgatgaaaaggaggttagaatggttgcttgtccaggagaggatgataccgatgagtcagagaacgtgatcgtagaaaggcagtgggaagatcagcttaggtttgttcttataccttctctgcgcgtgcttaatgaatgcaatatgttccctagtcagattgaactgacccgttcgtcacgattgtatcaatccggattcatcggaacagatacctggttgcattgagtgggaagagtttccctattggagggtctatgtatgtttcttcattcactataatgttgacatgtttccactaaccattacaatcttttcgtgttttcttctctggtgtgtatcgttacaacagtccgttaagcctgcgtctgatgccgttcgaaaagatgaagatatatcggatatcagttatgcttgaaggtgaatttaagtgttctgttgatgtacttgtttgtatgtctcaatatgggcaaaactgctcacagtttctgatcatatatcttccggctttcgcttttcacggccacaatagaaaaaatcgattactttgcgcatgacaagaaggttgcccgccatgaagccgttcgacgacaccaacttcttgctctcaaacatttgaacgcccacaaagcgcccgtgcccctgttaccaatcgacgacaaagcctcggatgcgctccaaacatctccattagctagcatggttgttgccgctggagaaacagggacagacgaggatgacgcactttcgtcattgttgaacccaacagggccttggttgatggaccagatgttacaggtcccagatacccactccaaacttcactttacgacaaaacacgctcagacaaacatgacggtcgcgcattgcttgaaggttgtttttagagtcgagagaggggatgacaaggcaatagattcgaaagggaagagaaaacaggttagaccgagacattcatcatctcaatggaatggtaccagcttcatgaaactaacacaactctaatgtctcttttcttatcacacctctgcagtttgacatcatcatgtgcggttttgtgcctctctatctatatcgtgtgtatggaaatgcgctaacttgcttctctcgaatacgttttttcttccttcagagaaacgcctattactattctagatgtaaggacctcgaaatctgtcttggacgctttcttgcttgctaaataatgatttttctctttattgaacagtctcgctgtaacattcaatatacctctcttccaaagtatgacacccgagtggtctctccaccaagctacgacgacccgaactacgactcgaatcctgaatcgaacccacacggcatcgttacccgaactagggatgtgccgagtagatctcaatccagagcacccagtcgatcccagtcgagagcgcccagccgatcgagctcgagagacttcaggtcggaacccagctcgaggtcggattcaagcagtcggatgtcggtcccagggagtcgaacgggctcgcctctgccggtgagtcatctggagtcaaatagatttcatctgctgagaaagatgaaccattggaaatctaactattcctcattgcaaattctttatttgttcgtgattgggtgggtggcataaagtctctgagccgtgggcgattttaaaccggtgatttatctttctctgccctctgctattaaaatttcaacaacatatacaaaacacgcaaacatccattctttctttgttgcttttttgatcttgcacttcaattgccttactctttatgcttgtctatgaagtctttctgttccctcgtgtttggacctatttttttttatctcattcaactaaatatttgcataacatcacccaaggacggtgtatatccctttcatagctctttttactatttcgaactcggtccttcttgtcttgttttttttttcctttttccatctggaggaaaagaattacaaagagatgcgtcgatgcccatgaagtcggtcaaaatatcatactgaacaagaagggggggggagttgcaaggacatcattgatcgtgataagaagacttgaatagagttttgaaagggggctaaacgaaaggtatgagaggggagaacaaggacagcaacaaaagggatattgacggggtggagacttgaaagacaggaaatatagacgagatgaaagaaagaaacataaactgtgaagaagggggagaaaccgcgcagagaggatatcgcacagatcctcacaaagaatggcgagagtgcaaagaagcagtcgatggagaaccgaagaaggagaggaaaggaaagaaggcagaagagatgaatcatcgaatcttgatcccaccagtccttccggatttactgagatgaccacccccaccggccatctctgattcatcatcgaatccaccgccgggttttccttttccgaccggtctgggttcccagattttccagaactattatcgccagatcagagtagagggtggaggtggttacaagcagggaagaagcgggaaagattagtttagattgaggctcagatagttttcgcacatgacatatttgacgcgaagacatttgttgttctttttaaaagcgctaagagacgtaccttcaagttttcatcactagcagctgtaccgactgtacttccatccggacttagtgcactagccaagactctcgtgtcatgagcaggcacctcccagatcttttgtaaagagggataggaccataagcagatattgttatctgggaaaccgtgggttgacaggatctctttggagtgaggcgaaaagattagggatgtcacttgggaggcagtcggtaaggaggagattcgagatccggtagtagatgacctgtaagaagagggacgtggaaacaggacaaacgtcgtgttcaaacccaaggacaaagagatgtcttgaaaaaagagagagaaatttaccagaagtgaatggtttgatcgcctgttcctcctccggttgctagcagactgggttgccagggacaccaagccagagcctacaacgtcgattgatcaagaggaaatcaaccaagtgcatatgagcatcatatgtattcacacgaagagaagaatgatggtcatttcttacctttacagcggcggtgtggtttcgttttgtccatctggccatagcacgagtcgcgggctcgcctgatccgctatcattcgacatcatagcgccggccgttcgagcacttcatgatgaaaaatagatttacagcgagagactgatgatcaacgcgagggacctcaaggggggatatatattgatgcagagaaacgaaaaggatagaactcactcccagcaattgacaacattgtcgttacctcctgaagcgaggacttgaccgtcgaatctccaggataatccacagacctttttatatacacacgattgagaagaagacgttcttgaaatttagtgtccgcttttcaaagggagaaggagtgaaacagcaagaacagagcgagaataagaagacggtacctctgctgtgtgacccaagagctctccgaccttatgtcgggccactcggacatcatggtgatgaattgatccatctcgacagccagaactgagtaaatggccgtgccatgagagaacaggtactcgagactgcgcgcataacaagccgttccaaccgaagaaagaagaagtggaaaagcaatcaaccaagagcccaagagaactatacgcgtatttctttttctttgttttctcgcctttgcttcgcgttgtcaggagggaacctaggatcaaaacttacagcatgtccggccatcgttcggagtttcaccccggtctcgacatcccaaacttcgacgtctcctttatcgtttcctacagatagataagatccatcgccggcccaggtgagagagcaaatctgaggggattcctctgtgggtctagagtttggaagacaattgggtagatcatgataacagatgcaatcaggggtgagtatgatgtgtgtgtgtgtgtgtgggcaaatagagaagtggtcaagaaacacatcaacaaggatgtgtcggcaaggagggtcgttcaagcaaaagcacaaactcactcgcccaattgagagaccccaccgctttctgcgttccagacataaaccccttcgcctagaccgataccgaccatgttgtctgaactccaagccatcaaattcaaataataatcatcgaccatacccggcgcgtccagcactctttccggccttgtcggtatcgctctctttctctctttagcgtcgacctttgcgcctgctgaagcggctgccgaggcagaggggaactttgtatattttcgaagttgcgcatgggttagatcatgagatgtcgaggccaatggggctggttgagcaaacgcaaggattctggaggtgggcgcttgggagagagacgtcaacgaggcggaggaggaagatgctgatgaatgatcaaccagatcagtttggagagcggaggagattgtgagggtgttattggatgaagagtgggctccattcggggtggtgtcagccgatgaaggaccagctggaagagcaggagcggatgtgccggaagaggaggtgagagaccgttgagggatgaatcgatcaccctatccaaagaacagagacgaaaattggttggcatccacattcatttagggaacatgtaaaacacaaacgcagtagagaggagagaagcactctcacaggcttagcaaccggtcctgccttctttcgaataccatccatactgttccccgaattatcactagccgagtgaccagtccactcaacatccttgacgttcattccacccatcgcttgactgatcgacaatgttccgtccttgtctgaatttcgggatgaactgcgggaggaaggagcagatgcatcgttcgatgaacctttcggacgagcgagaaacacgttggacctgtttgcgtgtaaaaaaaagtacgtgggttgtaaagagaagaagggaagactgtattagcttcaactgaacaagttccgatcaagtccccctctctccctcagaacagaaagcaggaaacccccaagagcaattaaacaacatgcagggatgagagaggaagaagagagagaaagaaagcaatacgtacgtatcaccactggtaaatcctttgcccccaccaattgtctgtccaccagcatcggtactagcgattgaaacattggcgaaccgatcgaccagattcactccaaacgagaccttttctggttgatctcttgatccagagggcgtttggattctttccttcttctgcctctccatatttcttcaactttgttttttcttctgtttctctaaacaacttcggtcggatcgctactgtagaagaaggagaacgagagagaagaagagaacagtgaaggagacctagaaagtggaattaaacgtgtagaagttgctcaacttcaaggaatcggagggaaaaaagaaagagttgtaatgataaaataaaaaacaatcgcgtcgacgcgttttcatcatagtaatcccaggccagacttgtattcacacgctcttctcaatttcattcatgcttccacaatgtttgttgcgttcgttcgttctttccatttgctttcgtttgtgttgcttttgaaatacagtctgtggtcggagctttccagaaggcggccacacaggaaatgagcaaacacgcttaagtataagtctatggcgcgaaacgagaacggaaaaatggaagaaaacactaagagggcgtgtaggagtgaaggtaaaaacacaaaacaggtagagttcaaagcagacaaagatggctgaggaaagacccaaagaggatatgaattggggtttaacaaagaaaaggtgtattcaagaacgaaaggccagaatctagaaaaagaaatccgctagatttagagctcctcgtcggtgaagacctcctctcctcgcttcctcctggccattcgctccttcttggcctttcggaggtcggcagcagacttcttggcaaccttctggaccttggcgatcttgttacccatggagtcgaactgatcctcgtcatcctcaggcttcttcttgtcgattcgctctccggtaccctgtccctcgacccagttgtgtccagaggcctcgaggtgaccgttgttcatggcccaaacctcagagcagatggactcagagaactctcggttgtgagtaatgacgagcactcctccctcgaagtccttaagggcctcgataagagcggcgagggactctcggtccaagtagttcgtcggctcatccaacatgatgacgtggggtcgtcgccaggtggcggctccaagaacgaccttgaccttttgtcctccggagagacctcgcatggtgttgtgcgaggtgaactcggcctcgagaccgaagtcctcgaagtgcttctcgatctcctttcggacaagaggtcgcataagacccaatcgctgggcctctcgggtgtcgagctcgagaaccttcttctcgaatcctcgggtgataagctcgtctcgggccatccagatgttctcggacgaagagagtcccttgaaggaaatctcgtactcgtaagactgcttgagcttctttcgggagacaagctcgtcgatgagtcgcttgactccctcgacaacgacgactccaccctccttcatcttcttctcctcctcctcggtaaggattcggttagccttgtggagctcctcgagatcctctccagtctggtatcgccagaggaggtagtcaagaggggtcttgtcgaggtgctgatcaatgtggtggaaagcgtgctgggcgacgtatccaatgacgacgttggggtgcttccagacctctccacccttgttgggctcaagatctccgatgaggagcttgacgagggtcgactttccggatccgttaggtccgagaatggcgactcgggacgaaagagagacctggagggagatgtcgaacaactgctggacgggctgggtagggtactggaaagcaacctttcgcatcttgacaagggacttctccttggtcttgactccatcaagaagaggagggttgggcagcttgaacttgtactcgtcagcggtggcgagggagaagtaagccttggcctcaggaaccattcggacgaagtcctcgaggtttccggggtatcgcttgatcttgaatcggttaaggaagatgatatcggtaacggttcggttcaagaagtcagagtcgtgagaaaccatgatggaggtgcagtgggtaagaccggtaaggtagtcgataagccacgagatgttgacaacatccaagtggttagtcggctcatcgagcaaaaggatatcagccttgaacaagatagctcgagccaaagcaagcttcatcttccatcctccggagagggatccgatggagtgaccctgtcggtcgacagagaatccgacctcagcgaggacgtctcggatctcatcctcgtttcggaccttggtgattcgctcatcggacttgacccagtcgaagattccaatatcggcctcggaaccatcaatgtcgtgggcgacgtaccaggttcggacaacgtcgggggaggggaaaccctcgacctgaccgttgacgatggcgttcatcaaggtggactttccggaaccgtttcggccgagaagaccgtatcggtgtcctcgcttcaatcgaagggtggcggtgttaagaaggatcttggctccgtaagcaagggagaaggtacagttgcagagatcctcaccctcctcctcgtcgtcgaagactcgggtatcgatgtcgatctcggaagcggccttctggaggtactcaagggtgaccttggtggcatctccggatccggaggcgaagccaaggaagggaacaagagcggtctcccaggaggtctggtcgaagtttcggttgttgatcaagttggcggccaaggtggcagcgtacttaacagagacggactcggccttgggggcggcggatccgaccttagcgtacatggcaaggatggcggccgaggtctgggcagcgtcagctcggggaagggggggaaggtcggaaccatcagaatcagccgggacgtttccgacggatcggagggtggcgatagctcggttgacgacggatcgggcctcagggtcggcgatgacctcggaaaccttgatcaaaccaggaagaagcttggggatgaaaggtcggacggtgtgctcgttgtcgaccaacttggccatgttgtcagtgatgacggcgacctttcgcttggtcgaggtcaatcgctcgttgcatcctcgggaaagaaggggaaccatgagggaaagagtgggggagtcgacctcagagacgaaggtggtggcagagagaagctggatggtcttggggacctcctcgacggggttgataagggcgttgataagagcagggatgaacctgtgagcaaggaggagagatggttagatgtgctcaaaggcgctcgaaaacgattgaagacagactcacttctcaatatccttgttggaagccaaggcagtggcgttggtcatggaagctcgggcagccttcttgacatcggccttggtgtcccaaatggcggcagcgaggacggggacgatatcgggcatgagcttggccatctgctcaggggcgatcttgacaagagcgtcaaggagctggagggaaccagtcttaacctgccactttccagcggtctcgatctccttgaggatggtagggaggatctcaggggtagcccaggggctcatgaccggcaagagcgccttagtggtggcaagggacgcagtcctgtgaaagaagaaaaacagtgtcaatatcgagtctaacgatacatactagcaacgaaatcaaggaaaaagaacgacatactggacagacttggccttgtcggcgaaaagctcaaggaggacggggaaaaggccctcggcagagcagtcggtaaggatgggctcgacggcgtggacggcaccctgctcgatgagggtatcgatgacggcgagggcagcctccttgacggcgacgttcttcttgtcggtaagggcctatgagaaaaaatgaagatggatcggttagccgaacgaacgtgtagaaggtttgttttttccttcaactttatccatgtttatcgccacctattcacaagcgaagacaagtggagcgaaaaaaatgtatggagaaaaatcaacccaccttcttaagggcagcagcgagctcgatctcagcaatgaaatcgggtccaccgttcttggcctgggaggcaagagcctgggcaggagccttgtcctctccgaagagagtagagacatcaaacttggccatttttttctgtggcgattcccgacaaatcacgtgcgagttaaaaaaaaattatgaataaaagtttttcaaccgatagagacaaacagtcggttagcattgtgtgtctaatgcctctcaatagtttacacagacaaacaaaagaacatacgtggatagaggggtcggagctgatgaggagattgggttattggaaaaagaaaaaagaaaggagaaggaaaaaagcgaagtgaagaaagttagccacagcggacctcccccaacgcaaatacccacaacacacaacacacaacacacaggaacctgagcagatcgaaaagctacaggacgtatgttctgtctataggacagccaaccagggcaaacaaaaagacactcacaaagaaggggaaagaggaggaaagggagagggctctaaacactgtctggggagggtgagacagactctaggtggaagaaagagggaaaaaaagaagaaaagaaaaaattaaaatacggtcggacgtaacgttgaaaattcttcggtcttaagatttttgattaaattttgattaccgaatattttattttattttattt

SEQ ID NO: 688 - DNA, 27057 bp, Xanthophyllomyces dendrorhous
ttattcgtctttggtctcgttattgtcatctttccttcgcctctgcaagtcgctctgggatcatccatcttccggatacatgttcgacaggtccgttagggaatggtgtcaagagttctgctccaaggtcgatagaccgtagtgttgttctttgtatggcgagacttcaatgtcttttgacttttgcaaatggcattcacattgaatttctccggatttgcctcttttttctcttctcttcttatatccctgagaattcgagacattcaccattcattctactccatcccacgaaggcacacacacacactctctctctctcactctctctctattcttctagatttccttcttttggtcaaccttgacggcaactaccgccggctccttccatccgagccagagcacacagaaaagcacgaatgcaccgacggtagagagcgcgccagagtagaacggccaggcgccctggatgaatcttgggtattcgtcgtgtctgaacggaaccacagacaccgtctgagacgaatgaacaaacgaccaactgattgaaaagcaagagatgagagtacagagatcagaacattaagcccacggtcaatcccagagagcaactaaagcaaattaagacgttctcacccagcacgcttgtaatcgaccaagaacttaaacacgccgtgtctatcgggtgccttgaactcggccgagtactcctgcccttccgatctggctccagctccagcggcaacgggcaacaggtcaacccggacgtgagggtccaacatggtgaaatctaactggagatccttcacttgggctggtagccaggatgacttttttccgtttggatcgtgcgactgaagagtaatcgagtacgactaggagaggagaggagaggagaggagaacaaagtgcgaatggtacgagaaggagacgggtagatgcgcacgtaaatgaagaagctgtcagtttcaggacggctacatacgatcccatagccagacaagaaaaccttccgactcaccagatcatctttgattcggtaaagctctcgctcctcggtctccccaactcggtgatgggttgcattgaccacgcggaggacacccttctcctggaaggcccactgggtaacgtccttgacgaaagcccggtttccagtactcgcacagctgacaggggagggaaggaaagattagagatcgaaaatgagaaatcagaaaagaagaagaaagagaagatccgatactcagtcaagcaaagctcgaatcatccaatagacaggtggaggggactcactcggctggcacatgagccttcttgacatcctgggtcggaagctggaccggagtgtcccagaacttgtccgaaaacagatcaatactgccagcaaagactactctggagttatctaacgtctgaaatccagataccaactgagctttcgacccggccaggaactctgggggataaactgagtcgtccggtccctccggcaccctcggctccgcactatacgacgactttgagccatgtaagatcggtaccagtagcgggcttggctcctttccgtatgaatgagcgattcctcggtagacgaccgggcacttgtattcgtacccggaagatacgaccgcagcgttgtggacaattgattcggcgtagctcagagcgagcgccgtgtggggtgcctcagcctggtcgaacgtcgacgaaaagtgggcgtggtcaatcagataggaatccgaaggctggaactcgatagagaactctcgggcaaagtctcggttgaactcagagattgagggtgacgtcccgatcaggatgtttccgttcagggagaggtgcttgattaatgcctgcgggctcagatccggagagtaatctatttggacccaggtgagacagatatgtgaggtcaggatgagctcattctcgcctggagcaaggaattggatgatctgttttgtgggagtaagtatctagaacttactcttggaggtgggagtaaacaggatgacatgatcgaatgatcgctcatcaaatgcggtaagagatggtgatgtgtctagaggggacttgaacgtaagctcgtatcctcgttctaccaagcccgacaataaaattgacagcgagaggagcgtatcagtatatataaacacacgagtaggttgtccttcgtacgctttgtattcttcatatttctaaaggaacagagaagaggaggattgaacaaacctctaagacttgcccaaaacttggaatagtcattttgggagacttgtttttccaacgcgacgagaatccggttgccggttgaagatgctgcctgaacagacgtcacggcgagaccgagagcgatgcagaccgatagaagagatttaggaaacatctttcttctttttgtttctacctagagggagggagatgatgagtatgaggcgtgtagtaagccgagatttcgttcaagatggtgttggtcaaaaagaaataaccctaggcagaactttgccgggtgtctgtgggcgcgcacgattttgtttccctccctcttctttttctcatctcgctggtttcacttagaccgatctagagctgacaatatgatccgatcagacataggtccttcataacactcccatcgctctttgtctcttcctaatagaggagtagatgcgaagtagaatcgcgctctctcgctctcctaggtcactgtaaccacgttcaactatttgtgtaaccattggctttcgaccgaacatccgcctggccttttttttctgtttttcttcttctccattatctccatccttcgcttctcgcatccttctttctttgctcttctttctttcctttttcttccacaagaaatcatcatgacctctgagattgatcaccttaaggctctcgttagccaggttagtcatgatggagtttttttcttccttcataggcctagatggctcggataatcattctgataggctcaatatttttcttctttctctttccctctctccctataactcaaacctttcgctactcagttgaacgagaagattgtctctcttgagaactctgccgttgatgccaccaagaaggctgtcgcctcagtcactgctaccaagaccccagccgagcagctcaggatgattctcatcggtcctcccggagccggtcagtctcgttctttgccctacttttcccgataagacggaatacgacgcgcagaaccacctctcatcgctcatctcttcttctacctttctgttctgacaacacaaacaaacaaacaaataaataaacaaacaaacaaacaggaaagggaactcaggctcctacgatcaaggacaagttcaacgtctgccatctcgctaccggagacatgcttcgagacgaggtcaccaagaagaccgacctcggagtagaggccaagaagatcatggaccaggtttgttcttactcatgaccttgcctcctcttcgttgaacaagcagaacgacacaaaacgctgacgcctttccatttttatcttggactgttcgtcagggaggacttgtgtctgatgagatcatggtcaacatgatcaagaagcagctcgaggagaacaaggagtgccagcttgggttagtgacccagactctccaaagctctctatcacctaaatgagaccgatgataagcagagaagctaacatagaaaatggttcacagtttcatcctcgatggattcccccgaactgttccccaggcggagaagcttgacagcatgcttgctagcaagaaccagaagatcgaccacgccatcgagctcaagatccctgacgctcttttgatctcccgaattaccggtcgattgatccaccctgccagtggacgatcctaccacaaagagttcaagtaagacctttctccttgaggttttaccttgggtctttacaattacgactattaacatcaaacccttcatgcctctattccttcctgactgaaatagccccccgaagaagcctatgactgacgatttgactggagagcctctcattcagaggtcggacgacaacgtcgagactctccgacgacgattgaccacctaccaccaggtaagcctccctctctcctgtctagtatgatgctctccgtccgtctgggttcattcttattaacatctcatttcgtttgttgtgttttaaacctaaaagcaaaccggaccggtggtcgactactaccgaaagtccagcatctggaagatgatcgacgcttcccagtcccctaagcttgtctggtctagcttgtctgccatccttggcgacaagaagtaaaagatcatcgagaagaacaggaaagaaaaggaaaaggagaagagtaagagtgagatatgtcgtaggctgttgttctgtcggtcagatatggtattcgctaggtggtagatgccagggagcaggaaagagacgagttatgatgattatatattttccttctatatccacaaaatcgtaaacgttttctagatgtctgatttcatctgatgttggacgaagatctgtcagaggcaaccgcccgtttatgcatccgtttaggagaggcagagaagcagacgacataataagataatatctcaaaaggaataagaaatagaaagtgaggcagagagaaagcaaagggaatgagacaaggcgaaagaagagggttcaagggatgggtatatggtatcagaagagaaaagctgaaagagttcttttgtatgcataagatttggggtttcagacccggctgaagacgagaacaagaaataggggaatgaatatgccaagagtcgagtcgcagaaagagaacgagtcgtgaaaagaacggtaaaagagaggacaaagagaaagagaaggaaaggaacatcattctcaagcgcatcgactgcttatgcacattggtcgtttccagcacagatagcgccccccaagttgctcaccaactctccaagtttctcaatgttgctactcgtcacaaccccagcagaagccgaagccgaagccgaggcagaggcggaaacggaagcggaggcggaagcagaggaaatagcagaagactcctcagcctcactcgcaacggaggaaacggcagaggatgaagcgctagcagaagccgaagcactcgcgctcgcactaagacttccaaacgagctactagaggagacaacgggagaggcggatgacgagacctgggcggtaggagacgaagaagaggtcggagcgacccaggtagacgtcgtaggaacggccgaagaggtcggaggggtataaattgaagtagaggtcgtcgttggcgtccaggtcgtcgtaggaggggtgtaggtagaggtagaggtcgtggtgggactaggagaccaggtggtggacgtagtagtgggagctggtaagaagaagacaatgaaaccgacatcaggtcaataacccgctgaaaagaaacatcagaggactctttagaaagaaggacatactccaggtagtagtgggagtcgtggtagtcgcaggcgtggaatccgatccgtacgcccaagttccgtagactgatccaaaccaataatttaaatgagcattcgggtttctacttctaccatcgtaaatagcttgaaattgatgcagactcactaactccgacactctcggcagcaaagtaggtgaacaaactgggagagagatcgagaccaccgtaagggcactgccgtcataacggaaacgtaacataacgtcagcgtccatgcgagagaagagatgatcgctgatgatggtgccaacaaagtactggagaaaggaataaacttgttcatgcgtacggtagggcattcatcctggatagtggccactgcagtctttccaccgtaggtgattgtgatcgactttccacagaccgaagggggatacgaggaatatcctccggccgcattcagctgatcagagttcagggcgacggtctgcaattgataagagcgggatggtagaaaatcatgaaggcaagtaagcttgagaaatcatacaagctcgaatacacgagacggtagaacttacccaaacatcgtttccgttgtagtttccacaactgaagagaccatccagtgtagatgaacaaacacgcatgtttgttagctcgtaagaagattataccaaagaaaagtctgaactcacgctccaagaccgacactttcgagcaggaaatttcaaaagaccaatcaaatcatcagtaagaaaggattgaacactggagctgggagaaacaaacgaagaaaaggagattgaatcaagaagtttcaaccaacctagtactgtataatcacgaataaaacaaacacagttagtctcttagctttattgccgtcgtacctaataccttttcatccaacactgtgatgggtggtgatagtacaaaaagatgactgaatatatagacgaactcataataggtgaatctggcgttcgaagcctgcctcttctccacatcgaatgttgccgccttcccttctttaatcaatctggcatcaatctcagccttcttagccttaatggaggcagagtgatgtccatgttgggactgatgaccagaagcggcgacgacagagagagcaggaagagcgagggcgagagtgttgaagaacattgttgagagatgtgctgtgtatttaggatgagccgatcaaggggaattgagggatgatttcgttcttatgttatattgatcaaactatgataccgtaaggaggacttagagctataagatctgaaggagtgtatacgttctctttatcacaaaggagagtgggttccagaaacggagggagtgaggagaggtcttgaggtgattgattgaggtaagtagagttatgcgaggaaaaaaagcaaaaagaaaaagaaaacaacagacgcctttggttacgagagacggttacgcgtcgaaaaagaaaccgaagtcgtggtattggttacgcgttcgcaaccacagtggtacacaagaaatcatgatgtcatcagtacagaaagtaacatcaagctaaaaaggtatatacacataaacagaaggttcatctcggagagtacagcatcgcaaaagaagagatgagatggaaggtgaaacgtattgagtccgagtctttcggtgaagaaagtgtacacaagtctacaacttgcctgacacgatacaatctatcagacatgagcgacctctccccgaattcggaggatgtcagaccgagtgatctgagcttggtcgcacactatgatcatagtggaacgtgaattcattagcaggtaggttgtatttcgcattggtgaggattacagaaaacatactgcttctaaagatcgagtcttctcgatcaaacagctctagcggaggcgcgaactcgacgacttgaccagcatccatgactgtcaagatcagcccacagcatgtatgtcagcttggtttaagccacttggaaggacacaaatattcaagcttaccaagaattcgatcgcttttcgattggtatcagatatttgtctgagcgtcagtatcttgctgaacaataatgcaacacgcacgcttcaagaacgacatactagaaagcgatagtggcaagtctgagcgataaggagaacaaagaagtagaaaagatgacaggacaggttagatttacaaactggctttcgaaccaatagctgagagtcataaaccaacctatgagcgatagagatgatagtcttgtcactgaactcgttctgatcgacataaacagaggaaacaccagtcagaatatgccaatatcgaccgaagaacattattgaagctcgggtagaaggttgatacgcactctgattgtgtcttgaatatttgcatcttttgacatgatagaaccgaaacaatagacggttgatttaaatgactacttggaggaagacgaatactgcagattgcagaagtgcgattgacttaccagtttcgacatccactgacgacgtcgcctcgtctaatatgacaattctgagagaacggttcaacaagccctgatatcagcttgttgtcatgaggaagaacgtttgcgacaagatgagacacgaacttggaatctcgaacgaccactcgagcgagcgcaatcagctgtcgctcgcctgcactgaagtttgctccttcgtcctggaagcgccaagatgaatgacagaagcaacaaaacgaagaaaatcagtacggaacacagaatgaattacggcgagagtagaagagtggacagcgtagactcacctgtaccattgcgtctagcttgaatttctcaagacgcgcatgcacttctggcgatgcatccggtccggccaccagatgagttcgcttgctgtcaacgtcgtcaagcacgttaagcacgcccggtcagtatgtccaaagatatcacagcgacatgatgattaagaagcacattaacacgttgaatgaaacatataatttgactcacagggcggagagcagttgctcaggtgtacacatcccatcggggtccaagtttgacgcaacagttccgttccagagcaacgggtcctgtaaacgcacaacacatatcgtaaacagagagaaaattatcagtatgtacgcatgttgaaaattcatgatggtgtatgcgatatagatgcccacctgtggtacgatgcccaacttctttcggatcggttctagaccaatcgatcgcagattcactccatctatctcgatacgaccttctgatagctctacgattcggaacagggcctgaagcagacttgactatgagctcaggcagccagtatcaacagaacataacacgagaatttgaaagcaaactgtcagcagccctccttatttaggttgtccagtgattgatggctacgattatacctttccggctcctgttcgaccaacaacactgtgaagaggaatggcaacgatagcgacaaagtgataagaaacaatacaacatcattgagttagtcggttatctttatctctcacttgccttagtcagcaccgaatcgttgtaatcatcatcatcaccatcactcacccgatcttctcgcctccatagatggtgaacgataatcccttgagtacagcaggaaggttgtcccgatatttcaacactacatcccggaatttaatctctcctgtagaaggccaagtctcgctcggatcgctagccgtcagtcgagccgcctcaggcggtaggtcggcgtagtggccgactcgctcagcagtgttcatatcttgctcgactacgatgcacaaataacgatgaggtcagagcacctatatgtaaatcaaattaacggacttgctacttacgcattgcaaaagcacttgaaaagtcggtcatagaatgagagtttcagtataggtgcttgacagagattcctctagtttaactgagaaacctactaacttcactatctcagtaaacaattgggtcacagccaatgtatatgtgagaactactccaagcttggcaggagactgtggattctcagacaaatggaaacatgagtttgactaagtccatagaacgaacggcaatggtcaagcatatcttaccgtagaatttctaaatgcgattccgaagaatgaaatagctagtacaagcaagttgccaagtatatcgagcctagcgctcaaccagcttttagaaaggggtaacgatcgcgaggggcattctatagtgagcagtagaagtgacgaggactaatcaagataaaaactacctaccagatcaggttgatctgaatgaaatagcacttgttctccgtgttgatagctttttcggttcgtgacgtaaaccggtcttctgaatgatacgctcgtatagaagatatcctgaaagggtaatcaaacatcgtgtcagctcacttaaactcctgtatgagcagacgggaagagaagatatcaaagtatgaacccatcaagagactctgaaaaaccaatggataaaaaatatcagccacctgagacgagagtgtactcaaaaacagtagcaagatgagcgcaaatatgtattcacctccgaattgtgcatagatagtagatcgcatgatggaatctaaacgtttaacctctcgagatgaagcacgataaaagttggcagcggtatagtagaggaacaacatgggtataaagatgagtccgaggtacgggaaagctgtccatcaagtgttgaaccgacatttagcgattaaagcagatggattaaattattcacaacatgccgtttgacgagacgtacagtagaatacaagcgcgatcgtcccaagcatggtcagacccatcgtcaggacgttgaccctgtcacatacgatgaagaatagcgttgatcaatatttgagagtaacacagtgtcaatatcactgatatagtacgaaccaatccctaggaagttgattgtcaagagtgctgacatcctttgagagcctactgatgatccgtccagtctaaggaaaagaaaaagtaagatgtcaatgtcacgacacagcgcatctataggccggacgaagaacgtactggggtactatcaaaccaagtaactggagctgccaaaaccccattgtaggccttgttgaataggttgtagctagtggcaattccagcgaaatatctgcgagaagattgtttggagaaacagttttatcagcgagcatctatcttcggcggttttgacgaacagaaagatacttacacaagcaaggtgcccgcaacttatccgttaaaataaactatcatgagaatctgaattcattaagtggttgaattaacaacttagctagaacatacatgtgaaaagtgcatttgccaaccccagctgcaagaacatgatagtgaatgaatgagagcaaacaggggtttcaactttagaggccagtggtgaagaaataaagaggaagacaaatattcgcgcgtacagaggcgtagactgccatgtctgttgagaagaaaatgctcttcagtcagcactaatccgaactgcttataccacacctttaactgacattgcccttgcttccaaccgtttatggaggattctgaccaaatcccaaggaatacagtagtcgcaacactcgcggcctgttcagatgcaatttgaatttaacgaatgtcagaatgtcgtaaaatcagcaaccaggtgatgaacttagatatctttacctgagcaagcatcatacatgacatgactttggggtaaatgaatgttcacgttaaccagaagaagtcgagtagatttcagaaaggaaatacaaatgacttacaaacgatcggaaaccagacagaccccatgctctgtatgtatcgagtgtaaacagaccacgacactgcgccgatctctcgctcctcctttaccgtaagcagagctcccggatttagagcctttgcctgttcagcgaccgagccctcgtttgtctgtccagtattgagaacaccagccggttgattctgcttagccgtctgcccaattttgatcttgaccgtcttgagttcgacatcctcctgattttcgatcacatcgcctccatcaatcatgctgttgtgactcgtctgggacatgtgatcggccatcaacttcgctaatgctccatccgcagcgagcagttcttgataagtgcccttttctgcaatcttgccatcttccatctattgcaggaacataatgacacagcaaggaagtcacatacaaaaaagcagatatcaacagaagtaacaacattgttaggcgtggctccgtcacatacatccgcaaatgcgcgatacttattgcacttactgcgatgatcaggtccgccttcggcagcacctctaggtgatgcgtgatcaagactcgtgttttgtctcgaagcggtccgttgacaagaccgtcgacgagtatcttactcacgtgggcatccactgccatgcacacacacatatatatatatacacacacacaagagagtagcgtaagtgaacagtcgtcattactgacataattaacagtctggtatcaagtatagccaaagcgtcgcactcaccagcagaaagctttaagaacggaatacgatgacgaacatagagttatacattgaagataagaactaaatcatcagcaaactcacttcaccattcgtcataagacgagggttgagcggcaagaggaggaacatgcacatactggatcatcaaagaagtttatgtcatttccggagtatactgcccgcgctagacacactcgagcctggagggaagcagtgatagcaatgacagtgaacgatgaagcggtaaccgcagcggcgagaccgagagaaacacaaatcattgaacagtgagcatcagttagtcttattatctcgatcccacagcctctctgttcattcacataaacaacgagtcaaacaacacaaaccttctgaccaccggaaagattgatgcccttctctatttgtcacagaaacagtgtacatgatatacatgatatccatcagtcggctgtcactccctatcttgcactataacatacactcgaagtattgaactgacctccaatctcagtgtaaactccatgagtgagcatcgcgatatcactctcgactgtgtacagcaccgcacaacaccaggcaacgtcgtaccatatcagaggaccagagcagatggaaagagagtgaaaaaaaaagttaacaaagcaaaagttcaatcagctcagattattgccgtttgcgagtgtgcagtagtatgcactcacgcgcgcacgtcttgatcgcagcagcaaaccggttgtcatccatttctgcgccaaataatatgttctctttgagtgtcgcgttcctagacaaattttggggcaagtgcatcaatagaagtagcagtatcgtcagtacgctcggaagtattcttagtataacgatcacgagaggcgcaatgtagatttctgccacgcgctgcaagcaaatgaagcattcgccaacacatgtgaccagtctatcactcacaagatccatggcgtttggggaactgtgtatcgttcaggcatacatggagtgccataccaattgaccaaaaacgtactcagtaagtcaccgtcttcacctctcatctattatggcagaagaagtgtcagcagacgtacaatatgcacaagatccacccagatactagcacaaaagacgtagatgtatttgcagggagacaagccaacagaaagaacgttaattagatgatttagtcatagcccaatagtgttttcgtacatatatacatcatcactaaccgctcgaccagatactcgcttcatttctcctagtagagcctgcatgagacttgatttgcccgatccgactcggccacagacgacgacaaagctgcctctggggatatcaaggtcgatgtcttttaatgaaaatggtaagggagaaggaccctgcagctcgatcggaaactccccttccacgttgcctcctttcttgttcttgtcattcttattcttcttgccaacccgctgaggctttgattttaatgcttcattttccgccttgctgggcttctctacagtttcccagcagtagcttccgtgagcggagatggactatgtgatgaggaaatattagaacaaatagagtatgagaacgtcccgctatgcgtatgagctttgaagcgatccagaaaacgactagcgtggcttgccgtgacgaacgagacatacatattctgcgcctggaatgactgggacaggattctgaatttcctctgccaacaggcattttgaaattcttcctactcccacataagcatctgttacggcttgtaaagccatgggaaggatccaaagagggagctgaatgttattaaaagcctggagagcggaaaagatggtggccgtgtcgagttgatggcctgatagcgaataggtgatctgacaacgagggggtttatgatagatcagcttcaagttggaaacgtttagcgagaaacactcacaaaagagagaactgccgcaaacacaggcacaatattcatcatggccatcaagacagctagtgatagattgaatcaagaagtaagattgaagatgagatacacaacaaggaagaaaatcgtaataggcgagatttcctatacctctcataaatgcatttatcttgagcttatctagttctttccttcggatacctttgatcctgctctcgaagtaggactcgtacgacatgaatttgatcactctaatcccttggaggacctcctgtaacaagcgtactctagagtctacgaactccattgacgcttcacggactttcatcagttgacggaaaagccaggcttgaaaaggaagtccgatgagaaggacgccgagtccgaccaatgctgaatatccaatggtgtaaatcaaaatacccaacctgattttttgaaaatagacggcccaggaatcagtgcctgcaaatctggataccaacgagagacgcagagaggtcacaaacccaacaacaatctgcaaaggttgaaggtagaggtcatgaagtaggactgctacatagtccatgaaagaagcatcggtagaaatatatgtgatgaggtttccgttcgggtgctggttccgagcctggcctgaaagtcggagagactttctcgagataaccccgatcaaagaacctcgcatcatgaaactggcatgataattgtcccaacaatggtcgatcagccatgcagaaagctagtttcagtctgagcaggaatgcttttaccctgttaagagtcctctttgaaagcaatgatagtcacacatgcttcccacctgacgcattgcccaaagcgcaaacacgatcccaactccatacccaattggctttggcggaggaacatccgagtcggcacctcgatgagagtatgcataagaagcagagatgtattgcagaattaaacgagacactaggggagaggttgctgacaaggtggtcgatattactccaaacacacccgccaaccagaacctggtggattaaccggatatcaagaagcggcacagaagagaagattatgttataaacagatggattattagtctcagactcaagatagagcgcaataaaatgagaccaatataagcttgctgacttacctccacttcatggtgtgatacagggcccaaatcaaattacgatcgtacaccttcccattctcggttatctttttaggatgtttagcttctttctctggttctttcttcgtttttttgactcctgtagaggcagaagtctctcgtccgttatgcttgctcatgctacttaaaacatcagtaagctcaatttcggcgtccttatcttttgattcagcggaggcatcgatgtccttcggagtgttgtcaacggaggattcagaaacaggccggtatcggtgtgagcgctgactgggagggactcgatcataaaacctcttttcgagattgtcggctaaaacagttgcctgataatcttctgagagttccctgagttgcgcataattgtaaagaacggtatgaacatagatggttagatattccggcttgcttgagatttcatctttaccatagcttaaatgatctcctaccaaaaatcttcgacttccaactgcgcagtttgtaaagtgtgtattgttggtgtttagtgaaaaaataaagaagggaatcttcgaaatacgactactgaccggtcttgagtaaccgacctagaagaatgaagcgatagctcggttagtctttcattgctttactgttcggcgaacaggaactcaccatcaagatgggtgagatccaagagaagaaagctcgggagaagatgttggctcgatattccggactttctttaccgtcagcatatgcagcgggcctaggcttgatcttgaaccctaggatctttgcttggatgggcgtatcttgagcgctttccaggtctgtaagagtgattgattgtattggtacagcggcggtagtcacgttcgttttaagtgctttcaccatcccagatcagacttgtatgtttcagcaaacagcgacaaaatgagaagaaaagtgaggagctggatgaccggtcatcaagaccattgttttatacgatgaagaagggagtgcctttctgcaacatagatcagcacaaaattagattattcaacggtcaagtccggagagcatacaagaagagagaaagatattcagagtttcttggcattcttcgaatgacatatctagactgttaattttgttctcggtcgactcattgaaaggtgatggaacccacatgcttccaactatcaaccggcccgaattgattgctcaccgtctgcgcagtcactaccatttgtaagcgggctggttgcttctgggtggattcgagactcttcctaatctcgtcaacagacatgtaccatgtgttcccacccatgagtgatatcgtgagccgatatgctctgattatgactcttaagtaaatatagttaaagccaggctaagcaggacctggccggagccgaattctagtgtctgtcggccataggtcaaggcaggccgcttgaccttatctctctcctctattcttcttatatgtcaatatgcgtgcccataacacaccgactgccccatcgttgtgtagcttcctcctatcatcgtcgcaacctgagacttgatcatattctcatctactcatgagatacatcgggagcaagtctttctttccttcagacacactccccttccggctctgttctcttgtccttacatgtactgttctttgctctacattcttgtctgctttaatgtatgaatttgatagatgacttgattgaatcctaagagtataagatacagcagtccaagttgttagttatctcacttacttgcgcacattgtcagctcacgtgttcgacaacttagacatgatcttgattagctgtcaggaatatggcctgagtatcaaaattttgttaccttcgactggcagaccattcgccttctcgactactcttgctcttgcaacagatcgaatgagaagtacatattcatacagcgcacatgcttcccacgcattctatgaccgcccttttatgcagcatcgttggaatctggagttcatatactggacaagatttcgttgtcatccacaacatagtctctcagatttggatcctttgtcactccttcctatgatccttgttctgattttttatcctttcaattgatccctatatctcattagtggtctatcagttctacttcctcgcatctctgttatcatcgatcactgccaaagaacccaaactagtcacgattgaacccggtatttggtgctaattgccgggcttgtagccctcggtcttgccagcaaggctcacaaccctaacagtatagaaagatagcttacgtacgcactacgtaagtcagcctgaaccgaggctgacatgaatagagatgcttgtggttcgatctgctctccagtgcttaaacattcctctgaacaattctcattctatctatcagaaccccatacagaacactactttgcccaccagtcgtcatgtctgctgctcgagaccctgccacttcctcgttcaagatgaaccataccatgcttcgtatcaaggatccgaagcgtgagcccatctctttttattgcggcttgattttcttaccaatctcttttcttttctgagtcctcctcttcatgtatctgtattgaaaagatccctcgcgctgacgtctctaccttttggtctcactatcgcacgaactcttagcctctttggacttctatcaaagaatccttggaatgaagctcatctctgagcacaacggaggcgactttgtgagtgctttcttatccttaatcgcttcactcattgtctcttccgtttaacctccttccttctttcgaaacaaacctctagacactttatttccttgcattcgatcattctaacggaaaaatgactaaggaagaattagaggcttccagattcgatcgagagggaattgtcgagctcacttggaaccacggtaccgagaaggacgagaacttcaagggataccagtatgttcattgtagtcgccttgtctttacagtgacggcgacttctgtcactaacttcctattctttaccacctctcgatacagtaacggaaacgatgagcctcaaggtttcggacacatctgcattacttgctcggtttgtccttttcttggtctttaaatttgactcagcatggtctagataaacactgactgaatgcaccgctgactgacgtttcaacctgtaacttaataggacatcaaatcgacttgtgagcgattcgagtctctcggagtcgatttcaaaaagaagcctcacgagggcaggatgaagaccatcggtatgcttgctcttcgctctttgccgatctcatctgtttcaccgtcactaagcatggattggtctcggcattacgtcatcccttcttttactcatctagcattcatctacgacccagatcgatactggatcgaggttgtcgagaacaagtaccaaatcgagtagagttcgagtgtaaaatctagcgccgtttgtatcgcaagcaaggagattaatggaaaaaggatcgatttgtttttatctaaagcaaacaatgccgatgcactgaacgaggataaaaaatgaacgcaacgaacgccaagttgaccatcactaataaacgagaggtcatcacattcaaaagaacttatcttctcacttctacctgctttcagacgaatcaattcaacagacttctacaaacctgtccaacccatttaattcatcatccgtggagacgtcgtcccatctagatcatgttcgtaccatctgacggtttgattattctcaactcttccttctcgaggcgaagaaagagagagagatgaatcgagtcgaccagttaatgaaagtgaggatattgttgaggataggcctgggctgggcgtgaagtctagaaggaatggacgtgctggtgttctagaggtttagaatttatattacccgcccgaaaggtgtcaaagagaagtagaaagaagacaggtcggcgcaagcaacgagctggcaagagaggggccgcaaaaaagaaaggaaagaggacgaacactccccaaactcttcctcctctgacttccagactgcctatctcgccaaccttcccacctccctgatctccagggacaaagaccgtccagcctggactcttcctttgtcctccactaccacacattctgacatcccatatcccgactctgcccaaggtactctgtccacctaacaccacccttccatcttccgcacctgcacatgaataataactctcttcggctaatggatcattgaaaatcgctaccggtctagccgacgctacgcggacgtcgtgaagcaacactgccgaacaaggatttgaccaagcagaaatgagtaggtctggatcgtgaggcgaaagggaagatacagagtaaggcgtcggaaagcttgtccgagttgttagaggaataggtggaaggagtgttcgtaacggagcacacgtcgatgatgatatggagtagatagagactggagaagatgatgaggtggctccgatggctacagtggacgaacgagcgcacatatgggtgcaccatggttttgatgataatttgatagtcatatctggaacggacaacaaatgtccactatctccaaatgaaagcgaagtctcagactcgactatcggagccagaggtgatagtgcatagaatgagacaagacctgagtataaagatgtcaccagagaggagtgcgtagagagaagactctgaacaggtgaagctggatgagggacagtgtgtaacagtttgagtttaggtatcgcgctctccggtacagtcggcctagcctttgcgagtttccgggaggtttttgaggtatgcgaagattcattggacggacggccgctccgtagattgaactctgagcatgacggtttggaagggatacgaacgatttggaccagaccgttcccgaatgtcaatactaccctcgactctggttcgtcctctccttcgtcctcctcttccgattcggtgtgggggagagcgggaccggtgtagaaagcaagacctgtcaaatcgtttcccagcaatcctcccttaagttcgtcctccacggtcaacgttatacgcgttcctatgtgttccccgaatccaacctcccaaccctccccgagttcggactctgcgaatgcctttgtctcaaggttgtccgattcaaaatcccaaataacgatctttccctttcgaccacctacaccagcggcgacaatccttctggtccctacggccagtaatggcttaatctgagcttgggaagcatatttgggagcttgactgctggaaataggtggtagagcgagagcaagtgaggcaaactgtcgacgccggtggtggagggatgtcaggtgaagatgacgagcgagcttagagctaggccaagaagcccgtgaaggaaacaggttggaagatctgagagaggacgaatgatgcttagaaacatatgtatcatatcctaaagtcgatacctaggtagatggtgattctccaaaacgatagagcgaacagacagtcagtcagtttgagactcaatttctgtcgtacatgagggatacacaccctcgatcggttgaatctatcgactgctccccagctagtcagatcgcgtatggtaaaatactggaagaaaagaacaagaatgtcttcaggaactgccgcaaacgggttgatcagaggtttcgatggctgctgcttcatcgaaggagactgatgaatgagtaggtggatgtagacgaaacttttgactttgtctacagatcgaatggctcaagaccagacagactaattcgccttatatgttcctcagcatcaattaactctgaaaacatgcagctccataggattcaaaatattctctatgaatcttcccattctccattcacccgaccagtctgaccgatgggctgctgtatgatatggcgaagaaggtgacccggccgaacgcgttctatcacaccggcgcgctgcttgacgcgtctgaaactcctcgaccaaaagcggccaacctttttgacgcactcttccatccaactcactcggtccatattccttctttctttcatccttcatctctttcttattctctaggagcgacattgacacagccagatcccggttcgtctttcttgtatagccatcgtattcgtccaatactcatcagctcagactcgcccagcaggaacacacttatcgcatactatccaacacgcatccacgtctttatccgtcttgaagcgtccttatcgttcttagtctttcgatccggtcagctgaaccaagaagcacctcaagaacagatctctaggtcagagagaaagagaaagacttacaaccaagcctgaggatgccgtacgaccctatacgagactctgcttcgtccgcgtccggctcagttcaaacaccctatacgccttctaccaacatttcccagacttcttcccaagcccgacagccctcatctgtttcgtctaccggggaaataactcccagatcgaacgcatcgtctcctatgacatcttattttcaaccccgcgtcggatcatccggctcatcagactctcttgccatacccgacggatcaaatggtttggccacccctcggtacaacagttcataccttagaggaagtacttctgcagataatactttcagaacacctgtatcgagttcaagtgggattgctcaagttccggcaactactaagcggctcagcctttccatgcttctggatgatacagtctccccgaacctttctccagacgtcggtacgagattgaccgcgacaactgctccttccagttcatcctcgctgttgcctcctccacatccgccgccggctctcaatccggctccccctgtacttctctccagagcatccaggccgacgtcttcctcttccagctcatcttcgtcgtcgtccagccttccttcgaaccattcacatagaacatatcctccgaccctacagccttctctttctcctttgaaccacgcgattccttctccgtcgccttctcacgcttccatccaatatgcacatccatacactttgacagacactctcactcccacgctcatcccaccgagaatacagactccatccccaatattctcagagcgtcctcacggatcatctatccataatctcatgggtcctcctttgccattatcagcgcctccgtcccgtccaaccgagcccgcagtgctagtccctgatacaacgtcgggagaagcaggcgaggcggaccacgctattcgaggaagcgagcagaatatggctgatgtggatgctgtggatggtactgatgctcatccagaaataacaaaaaggaagagctctttcccgagtcgtccgctaggcacatcttctcctagagaggagcccgaaattatgtctgcttcgcaaacacctcattctctcccttcctcctcccagccgtctttgtctcttcaaccagctgccctctcctcccttcctcaagttccaagctcaagtatatcagccataacgtcattatcatcatctcctgtttcccttccattggctcatccctcgttaccaccccgaccatctctgggcaatcggtcttctagtgcaaacaccaacagcagtttccacagcgcgtcgtcaaattcttgcggtccaactgcatccccttcgtcagcccttcctgtcggtcgtcagctctcatcagcaactgatgttctctctaacaaaaccaaaggagtggaaactgagatggaaacgagaagaatacgatacgaacctcggcgggtcaaaccgggcatgtcggtgttcgttccgctagagaaagaagaatacaaacgagctcaagcgagcatagcagaggatggggtgaaaaatccgttgagaggttgggtgagatctgtatctggtgatggaggggacacaaagcctgtcccaagagcggaaggagaaactggattggcaaagaggctgagagaggatgaggaggacgaaaaggaaagactgaagcaggaaaagagaataaagtctgaagaagataagagtggagacgttgccgtagttgcttctcattgttagtcttgtctagctctcaagattctctcattttctttacgattctggtgagcgggaaaattgactacgcgtacttacatgactctcgacagacaatcaccgaccagaacttggccgcgacagcagacggttttcgccaatctttggcctcaaatcgttcaataactggatcaagagttgtcttgtttccaattttgctcgtcgagctatcccaggtggtggcggtggtcctggacagaggaatgcaaaaccaaaaggcagtgtgttggaaatgggatgtggaaaaggaggtgatcttctcaaatggaattcggccagagtagctagatatgttgggatcggtatgtgaccctgtctttcttcgttgaatctggtcttttattaaagtcttaaatatgcattcgacatcggtcttggatctgtggaatagatattgccgaagtctccgttcagcaggcgtacaagcgtgcgcaggatattcgaaaccgatcgtttgagttcgatttccatgctctagattgctttgctgtgagtttagccttttcccttctcttcgttcctgaattatcttcgctacctacggctaaccatttctttgttttcgactcctcctcccccatcttcctagcatgacgtctccactgtactcttcgctcgccgacctatacctaatccgactgtcgacgtgttcgaccttgtaagcatgcagttttgcatgcattatgcctttgagaccgagcgccaggtcagacagatgctttcaaatgttagccagaatctgaaacggggcggtctcttcgtgggtacagtgccgaacgcggaaatgcttgtgtaggttttcccccttgtggtattagtttctctgtgtgctaatagcgccagatcggcagaggtcgagctaagaaatttttcatatgatcttttttaaatcaaaatcaacatagtgaacaactccaatccattccaccagattcagagaggctctcatttggaaactctgtattctcgatagaattcgagtcgagaaatcatccttcagtatatggccatcggtattcgttcttcctacaggacgcggtggaggatgtaccggaatatctggtccactttgacaactttcagacgtacgtccggtttcgcattcaactgtctcactttggctactgcctatttccgtaactgatgaagcttttaatctccgggtttgatcaacagactggcgctggactatgatctagacctagtctacaagaaagtgttccatgagtaagcctcctacttgactctctttcgtgatcagttagtcttacttgcatcctctccctgttatgatttgttcagaattttcgaggaggaacggcagatcccagagtttggagatctcctcactcgaatgaaagttatcaattcaagaggcgaatcggaaatgacggaggatcagtgggaagcagctagtcagttccttcttagctctgataagcgatctgtaagacagtcgatctgaagtaattaaattcttttgcatgatgaacagatctgtatcttgcctttgcttttgagaagaaatgagtttccttaagaacatgttttctctaattcctgcttctttgtgttctctctataacacgtatcaacaccattgttctttcaacattctggtttttcgatttttgctctaccttctacattctatccttcacaatttttggtttgaagatatttacgatacagcccctttatacaccctctatgtctcttgagaaagactttgcgctgcttctgttttgttgttgtttgtacacctatctttgtagaggagggagaaaggagagggaaggaagaaggaaaggggcggagggaggaaggactcccatactatgtatgcatatgatactttcttaaaggttaaaatgtcaaagacgttgagccggatccaaaaattctttcgctgttggccgaggtcggttgaaaaccctgcttggtcaccttcattctttcatccatctcattcatcacattcttcatacgtcgcacaaggaagtcgtacatcatggatttgtaagtgaaagcaggcagaagcaatccatctctctggccaagatatgagatgcttacccatccacatacgtatctacacgcacacagcctcgacctgcccatccaatcactaattgtgaacgatctaggtcgggctttcccgtctagtatgagtcaaagctcgatcgcttcgagatcaaccgccaatctttctggactgactcctaatggatcatccaactctcttgatgataaggtaaatctcatgttttctgatatgacgtgttttcattcaccatcagctgtgcttctaagataaatcagttgaaacggtcaagggaagtgaaaatgatctgatacaaggatacgtgtgtctctttttgtgaaaactctggaacaacagcttcccgcctcgtttgctccagcagaccggaacaagcttcgatcagtactcgagctaggtagatacaatatcgattcgaataggcaatcaggcgtgggcgcgtgatacgtgctgatactatatctttcctcctaatctgaatgagatagccttgaaggagttgcacgtctcgcatgctcatgtttcttctacagacactcagatactgaagagcgaattagcggaggctgcccggtcaattgacaacagaactggcacgatcaatatgcatcagcttcaagatctcctccttagaggagctaatatgctttccacgtccgacaaggtttgtcgatattttccgttcctgtggttttcatagttagctcaaacttaacatattggttctgttttctgccttctcaattgcctcttgatgattggaatgcacagctcaattacgatatactacatcacctcgtctttgttccgatcaaagcattcactatcaagtccattcagtcgggtattgaggcatggacgacactactcaagaatcgacctggaacgaccgttgctttgttgagcgaagtcaccaccgcttgggcatggactattcgagaaaggaaaggtttcttcaatacgtcactcaagtgagttcgccctgaccgccgatcatcttcctgttcggcgtgatctcgaaataagagggatttgggcccgtaagaaaataagtttgacatcggacctatctcttatagcgcatcggatccgttcgttcaccctgtcgagtattcgccctctgatcacgccacgatggatgctgcactctcgactgccaaacacacgttcactcctcatctgctactcattcagttcttctctgaatttcatcaatcaatctcagctccggaaccggctttcacacacgctctggttaggactgtgcttaaatcctgctcggctgtggaccagatgaggtatgtcctacggtgatccatcactgctggtgtgtcggacgcttggcaatcagaatactcaaccagtctctgactcttttaccgaaactatcagcacccattctatagctcgacctgtcagattccatctgatgctatttggactacaactccttcgggtcagcaagctagaagcagtactcgaaattaagctgagagatgaggtctacaagcttgcgtttgcttggttcaaagtccgcccgcagtgcgtatcatcgtagtgctgttactgttcttcattctcaaagcatatgttgtcaagattaatcatagtcaaataccaatttcccggttttcagatggtcttacgcaacagccgacgagatcaaggttttacaagatgttgtgtcaggtttagcatcagattctattcaagctgctcaattcatatcgagcgctcgaaaagaagacaagtctgacattcttcctggtatattgcatttctgtgttatat

SEQ ID NO: 689 - DNA, 61585 bp, Xanthophyllomyces dendrorhous
gtgttatatatatatatctattgtctaaacaagataccgaccgttatttctatatctacattcacaggtggacaaaccgtgtctgactataggacgctgcacgcggaaaagttgaagctgctaaacctgctgatcgacaatgagatcggccggctgtcagtatggtcaaatcctatgagcgacgccgcgcggactcaccgatctactttggagaagtctatcgtgattggccttctccatctgttcatattcagactgactgtcacaaagccaaacttctaactattctatatatcattttacttgtctgttattctccgcattggggcggaactagagaacctggcctcatctggttaaaacagcatggggaatatctcccgctgtggcagttcatatggccgagcggttcaaaaacccgatcgtcatcaccgaggtttctgcgcttatccgatctcgacccaaagaagctatcgacgttcctgaagcgttgcatttcttgttgggcaatcgattggagaggactactcgaaagggacttcaggtgcacacattctgatgagttttcgtctcttgcacatacacaagaagtagactgactcatggcctccaaccctgcggatttgtacgggtatagtggctaccgttgtggtcacctgtccccccagtgactgctgtcacttactttctgccccagtataacagcaacccgctcttgcttcagtacgcaatgcgagtacttgaacagcaccctgttcagttgacgttcttctttgtcccacaggtagtccaagcgttgagaacagacgcgttgggtatgttctcattcctcttctgccacctccaatcaattcttatatcttcttatcttttataccttaggttatgtggagcgattcattttcgagacatcaaaggtctctcaattattctgtcatcaaatcatctggaatatgaaggcaaattgtttcaaagacgactcggctactgaggtgagcattctatgaccaatcttaattatacgctctctagaaaactgtcaatgttgatcaagaagctatcttgatagccggatccgatgaaacccatgttggataggatggtggataaggtcgttcagtctctttctggcgaggctcaagcgttctacgatcgtgaattcagattcttcaacaatgtaaccgatatctctgggaagctcaagccgttcatcaaatgtaccaagccagaaaagaaggtactcgattcttgcttgtatgaattcgaatatctctaggtcaagtaaggctgaatatgtctcctttgataatctcaacgacacaggtcaagatcgacgaggagatggcaaagatcgtagtggacaaaggagtctatcttcccagtaacccggatggagttgttgtcgatattgacaaaaagtctggccgtcctctacaaagtcatgcaaaggtaagtttgtgttcatgctcacggacaattgacatacttaaacgtactaacaatcttacctcattgctcgcagacccctttcatggcaacgttcaaagtccgcagagagaaggtcatgcttgatacagacgccgaagattcgcttgctccatccagcataacaaaccagaagacgttcgaagaagtttggcaggccgccattttcaaagttggagacgactgtcgacaggacgttctcgcgctccagatcatcgccatgttcaaaaatatcttcgctggcattggtcttcctgtttatctgttcccttatagagtcactgctacagctccaggagtatgtcccgctttttcatcgactcgattaacttttcagtaaaaactaagagttgacaatatctcgttctgtttgtactcacgcagtgtggagttatcgatgtcgtccccgactctacttctcgagacgagatgggccggaacattgtgaacgacctaccgagcttcttcgtgtcaaagtatggaaaagctgagacgccagagtttcagaaggctcaaagaaacttcatagagagtatggcagcctactcggttgcttgctacattctccaaatcaaggaccgacacaatggaaatatcatgatagatggagaaggtcatattgttcacattggtatgttctcttttcttttgttccgttaagctgtgtttgtaatgggatatgttgttcactccttccacgtatgtccctccttaaacgtactccgtacagattttggatttttgtttgatatagatgagttcaaatccaggtttatcatatattccgacttcttcaagctgacatgcgcgttctggacgacttttgtggtgttttgactgttccctctgttctttattcttgttgccatcatcacgtcctggagtgagtttctttaatattctcattggctagctacaccaaattctatcgatgtgatagcgttgtctctgactcttatttatttcccgtctatactagggtgttaaattcgagccaaactctttcaagctgactcgagagatgatcgctgtgatgggtggggattcttctaaaggttatcgacttttccaagagcttaccgttaaagcgttcctcgccatccgacctcacgccggtcaacttgtcgatactgttcgactgatgcttgagactgctcttcccagtttcaaaggcgagggcacgataagaagactcaaggataggttctgccttgatttgaacgagaaacatgcggcagagtatatggtgcgcgttatcagaaatgctcatgccaataggagaagtatcgtgtatgatgaatgttagtccctttttcttcttctcttttcgcgcctatccttcttctcttctgttttctttcagagaaaattagcactggggttgatttgatatctgacgacaagagattatatcattttcacttctaaacatttacttctggtctcacagttcaaagggtaaaatctttcactcgtttcatcaatcttcctggacaaaatactgacgccgtgtatattatcttgtttcgcgtctttcattcgctcatatcctccatttgttgatacccgcttgtttgggtatcaaagatacaaaacgggtaaggccgcgatcgatcaaatcactctgtcttcttctcccggtttaaaaatccggctggcttactgatcatcaaacgatgatgactttcgattttatttgatctatatcgcaacaggatcccttacgctagataaattcgtccggtattgcttggggagagaaacggattccgttattctttgttttctattcgccatatactatgacacaatacgttctagagcccatattagttatctcgagagtattgataagagttcgttgaacgccacgatcacgtaatctcatgatgatacaatctaataataataaatcgtgcctcgttgtacaacgtttacacgtggttgttgctgttgaatctttcggtccgttgagtcatgttgtgcacaaaggagaaccgaggaaatcgtatgatattattgacaaagagaccaagaaaccagaggtggggagtggttgtgagatttggaaagtgtgagatgctatcgaacattatcagaaatgtagagaagagattaagatggacagaagactacatgtgtcaaagactcaggtactattaaaaaaagtgtagatgcaacggaacggacggctttcagaacgacgccaactcaagacctttacaacggagatttctttctctacaaaacattatgctaatgaagggacgatggaggacggaagaagaaaacgcagacaaacaaggaaaggaactctcaaggggaaggtgacaacaggagttcacgatgtatctccagcttttgcagtctctcccatcggttgagttccattcctcttgagcaagacaatctcttttaaccacccgttctctcttcgaagctcaccggcttcaagctcgaggtcccggacgctggtctcgagagtagaaaccgacacgctaagatccctgacttttgctttcttcttggctggtaaaaaaaaagtccacgtaagcaagatgaaagtggttgacaggacacagctgaaaagacgaatatctacctctaaaccgggcggctacataattgataacaaagacaggagaaatagttgaaagcatagtcagtgactgggtcgtgacacggaggaaatatcaaaaactcacaagcctcggtgtttctccttcgtttgtcctcctcatcctccgcggtgatggtgtaattctcttcgtcaatcgatcctgcagagatactcttcgactttggtcttgtcgacgatgttttcgcaatagtccttagctttggttttggtgatattatcggcgaggtcggttttgagcgatcgccagactctgaccgaccggatggctgagtccctggtgtcgatttcgaatccgaaacaggtgtgatggaaggggacgcaagaccgggagtccgttcggaaggagagaatgaccgtcgttttagactagaggaagatgaagataggggtaaagagatccgtctgtccacagagtcgcttctgaaaaaaggctccggaggtgggaatgcatagctggatggcgaagccgagggaatagatattggtggtattgacaaaggcacagacgaagagtcaggcgtcttgaactgttgagtgaaaaactgataaagtgggtgactttgatccggtccctgaaccggctcagagttggtgttagaacggttgaaatgttctgaatcgtaagaatgcgtcttttgcatgtctgctatcgagtatgaatcttcttgggttctctgctgggcgaggctcgaatgatctggaaacaaaggggaattggatggagaaaagggtatttgtgaaaagtctagtccaggaggaatgagcagatagggttgattggattgatggccgttcgatgtaggcaaagggaggtgagtggtcgacgataagggtctctgctgtagatttggttgcgctgaaagagcagagatcaaggatagccaggattggtcacctagaaagagatcaagacagatgagaaagcgtggtagtaacaagaggaaaaagcgaaaggagaagaaacgggtgagttataaggttcttgtacgaaatggtctcatcctcaaatacctttctcggtctatcgagacacgagggtttggttggatgcatcagactgtacggaccttgtggttggagttcatcagtttgtctcggagattctctaaaggtctctggatggctcgataaacttgcccggttggactctcttctggcgagctccatcgcgctgagtgcactctgtctttgtcgggattgatccttagtctgatgcggatgggtcattcgaaaaagcgggagatgggatcaagtaacgagacgagggtgagagatagaaaggaatgcagagggaaaggcaattttacggttgatgcaggtcagaggtgacaaaaacagatctaaagagagagacagactgaacaaggaaacgaaagaaagaggaaaaagaacgcaatagactagacagattgcaagaaccagatgatctagtgaaacagcaaagaaaaaaaaagatggagtgaatgagtgagcaaggggaaggaagagactgtcctggatgatgctcaatcacgccatttcaacaaggagcacgtcgtcagcaagcaagatcttagaggtttgttttctgggtctattctgtcagcgtcagctttcaatgtcttcatcctgtgatggatggatggtatatcagtacaaggatggaacgaagaaaaaggagagggaaaagagaaaaagagattaaatccgtttgttcttatgtaccctcccccgaaagttgtgattatcttcggatcgcctcatcggccagggaattcggagaagtcgatgagattttatcggaattccctcttggggggccctaattattcaaatatttccttagataagcacttaggcaaaagatatcttctcgcggatgctaacacttctcaaaacgtgtttccttctctcatcggcatcaaggaacaaagaagaaagaagaagacaagagagcgtgggtagccaatgaggagaagaaggaagcgcgcagacacatacacacatagacccctgatgtaggaagagcaaaaacggacaggaagagattgaaggccggatataacaaaaaaagataacaaaagacaagtagtaaagaatgaagccaaagtaaaaacacagcaagcaatatacccaaggaaagaaaacacaacgatagaaacaatgaacctaattcccatctaaagcagctggtccctggatccaggcgtcctaaactcgagcggtagctccgaagccggtgcatcagacggagataccctcagcggtggcacgggcgagatcgggggtgcaggcgagattttcgagaaacctcctaacgggaaaccgagccctgctgcgtcggtgatactcaccgtagagagcgaccggaggaacggtctgaacaaagagtcgcccgaggttgaatggtgtctcgatcggggcggccggacgatctcggacgacagctgcgacgaaggcgacggatgggacgactgatccggtgattgggaaggcgtaaaaatgagtgagttcggtcgacgggacactgaatcaaagaacccttgggacggccggcgagagagcgaagatcgagaacggtggtggtacgtatgaggttgaaattgagagtttgcagctgtcgaggctgccggctgaacctcctgagccaacggatggaaggacgtgctcggcgacatcgccaatagaggagaatttgcgtgaatctccgccagatgggacgggcaagaagatgacatcggtactgtcgtaggcgacggtggactgctcgcaggaaattgctcggccccggcgttggagtctattggaattcgtccttcagggaacacaacctcttcggtatccttatcctccgtataaccatcagccgttccgtcagttcccccatcttgcagtctttctccgccctcgctctcgccctcatttgatagcataccattggcgagagcccctcggatgtaggcagaacctttgacaggctgcccttccccctcgtctccagagatcaacccaaccccaggctcgtccacccctacaccctcctcccacgggggatccaactcgtccaccgcccggacttccgccctaaactccataacctctcgctcgatcgacgtccgaaagtctgcaatctcctccagagcttcaacctcggcccacttatcgaacacggctggacagctcggctcgtctgattcgtcgtgatatgcagataggtatgggtgggatagcgcctcggtcacatgcattcgtctcgctgggtcaaacactaacagttttgacaacatgtccacagcgtccggctctgcatgagggaacagcttcatcaacggcacagcaggcacaatcggtagacttcggatgtatttgcatgcctatagaacggtaaggaagacaacgacagcgattcacaatgagcgacttgaacgaacgtgaacagctctcggaataccgtcgttcagactaaccttttcacttcctacacgattcagcgtttcatcatcaggtgtgcccagcacactcaatatgaggtttagctataatccacgaaacacaaaaccgtcagttgatttggtctcaatggcattatcgtacgatccaaatagactcgctcatacctgatccacataactaaaacgtgattttaatacagatgatagtgaaaaatagagatacgtgggtcagcttacggtttccggtgacttcaaagatgatactgataaactcactctttgcctttaaatataggctttcctgacaacagttcggccagaatacagcctatactccagacgtctattgcggttgtatatcttctataggacaacataatttctggtgcccggtaccatctcgtcgccacatactcggtcaacggggacccgccgtgggcaggagagtcttttgtacccggatggaatcctcttgctaatccaaagtcgcaaattttcaactaatatagtccagcacaagatgcttcgttctcatcagctgttgtctaagatcatttagagctttggacatagtcattgcaataagtcacatacctcgcagtcggcattgaccaggacattacccggcttaatatctctatgtagcacattcgccgagtgaacgtactgtgtttgaaccgattaggagacataattcgttattttaataacattcgaaacagacgaagattatacagatagcgtaccttcatgcctctgaacagctgatacataaagtactggacatgagcgctcgataactgttgacctgaacgaataatctggtgcaggtctgcttccatcggctacagcaattgcaattcattaaaacatgagtaatagatacacgacgcgtaaatggtcaaggaaaagttacttacctccataaacatgtacacttcattgaaccctggatgaacgatgtctaggtcaattagaccagtaatctgcgcagttaagggttacaatacaggagaatggtgaatcagatcagatattaatgtaagccatacagtatgaactcgagaaaatggcgagtcttacattttcatgtgctgcgaaatgtcgtaataatgtgatttccctcaaaacccttcgagccaaaatgactttatcaaacacactaaacagctcccataggcataaggacatcagaagagaaaaaaaaagaaaaaaaaagacatgtaagtattttattgatgtgcaaggtatccagtcgagcaaacaagaaaacacggaccgagtgatcattttaatagctattgtctctcctgatatatcatcttgagccgagatgaccagcccataggctccttgtcccaactctgcacagaacatccgttcagccaaccaaaaggtgtatcaaaaagttagaatcatgcgcacgaaagtacacgcacgagtaaaaaagaaaacacaaatgcaagacgacaaacctctgacaagcttccatcgtttttctacatgaaacggtcttcctagacacataaagctatgatatcctctctcttccaacttgccagcactcagcggatgatcgctatccgcctctcctccagcaggaattccttcccccaaggggtctgccaccaagatttctgttccgttgagatgttgagctgcaggaagtaaatgtgctttcgaggccgctgctgctgctgccatgcctttcagaccagccgccaccggcgcgggcggtacaatcaccgccggagctccagaagagaaagacgaggaggatgaggaagaaggggctccattggtaagcgctgagtttgggttcgagggccctacagacacggtggtcattggctgggattgaggaggcgtgatatgtgttggagtagatgattgttggcaggacgagaaagaagacgaacgatgagtcattactggtggccgtgaaggcggcagagatggagctggagaaggcggtggagatgcagaggcagtcggaagaaccgaggagagagaagacgaaggagtcgggggagagaacaattgaggcggagccgtgcaatagtgtggatgaggggtaccgggcatgattacaagctctttgtttcgagattcctttgcgatctcaagagaagaaaactccctggggtacgactagtgatgttgacgaagaaaccaaaaaaaaggaaaaaaagtatagacttgttgtcagctacacgcacacgagtagatgtttggaaaggtgatgataaagacgacaagataggtgacatttagcttgagctgtttcaactcaatcccaacatagaactgtcactggacctctctagtttcatatattgatcagataaagattccacccaagcaaccagacaactctagaggttatagaatgtcccttcaaaggattcggttcataagttgtaccccaatgcatgacggcttaggtccctcaagttcaccaaactcggaacgtagttctgtagctcaactctgcccggataaccgaacaccggaaactgttgattggactaacctatatgtgaacaactatcgactctttcaacttgcttcaggataaacaaactgatggattgacagtcaggtgtaaagattttgccagggaggttgatagtggtattgaacagagatctgcttgaatgaaccgatagaacccgactgaaaagagataaaggagaggatttgtatcggctgtcacatgccacacccaaagcgggacagttagtactttgcgagtctccgtccagaggacagcaaaaacagaccaactaaccttaacggactcgccaattttgataacaggaagcaaacacgtgagggaacacgctgttgtttggacaagacttatggatgaataaaagtaaagggttggctatgacaacgagaggaggaggtaaggtagtctgctcaggcgggatggatcaagttggggaaaccaggagtaagtgtaaccgtgtaacgcacgtgatcttcacgctttgggattatataggaccaccatcgttcctcttgcatccgtaaaggcgggttaaagaagaaagatatggcccttaagataagttggccgtttagaatttataaacgagtcttatagatcgacattgtttcaagatgagtctcagtatggtatgtagatcattatatactgtatgcaaactgccagattgcttcgcgcaacgggtctttcaagagcaagaaaggtgactaaagcactaccctcttgagctccctaaacgctcggctgaccttgacatcgactccaagatcttctgcatcctttccgagtccctcaacgtcgagcatcatttgaagcttgatgttttcttcgtcttttgcttcgtctgctgcattagtggcagagtttccagaaccaaacagagagaaagtcgattttctaccttttcggtatttacgaagtgattcttctgctttctgagcggcctgtaaaacggaagcataactaggatatccgtgggaacagattaaatataccattaacagctgattgaacaggatactcagaagcgaatctacttacccagccgcaatctcctcaaatacagctcccgtccattcttgtccaaactctgtcttcaaagtcgcctcagcttgtccatttgagaagtacgttcggaccggcttcatgatggaaggcacaaagaaactcggctctttgggttttctcttatcagatacacccagatattgcgaagcgactccccggaccaatcttaaaggctcagtacatcgacgagtcaggatttgaatgatctgaccagagagcggggacacataagcggataaggtagagagcgaattctctaagacgactgttcatgtcgataggaaaaccaagtcacgacacattgagtttcacagtttatgagaaatgaaacagatgatgaacaaaccttgcagatcgatttcctcatcttcatcctcagatcttaactctgttccttcaaaccgaggctgaatttggtccctccagagagtcgaaacttttgtctcgagccgtctaatgtcggcaattataagtgaagcctttctcagtttggaatcctcttgtgcaactagcgctgggtccaaagtactcgatgtgttatcagaagtggttccagacgactatccaaatatccatcacaccatcccggagtaagatgatagaaaccatcagcaatgcttggttggtaggcagatacatcatagcactaaccttttcagtagagttagacgtcgtcgtctccagaacaaccttgttcaaccaagttcgatatcgacttagaatctgagaaacgctcagacccatcaaagaagattaccatgaagatcttcacaaaacaacctgggttatgagcaagaaccatcttacctgcaaggttaatctccaaaaacgatgtgataactcgggaatgaagatctcatcggcccaacaacggtcgatagctcggaatacagctaacgactgaggcaagaagaacccgtcttggtctttggatgatgaaaagataaagttcaggttaggattgcacaagaaacccaataaaaccccatcagtcagacttattctcagttgtatcaagttggcggtcaagaaaattaacgcctgattacacacaccttttccgtcaggctccccgcttggtttcatgccttcttcgagttttcccacgatctctttccatctcagctggaaatagaccggaagctgccatctcttctcgaatgccttgtatgttggatgatccctcatcgcaagtacagattgaattgacggcgccaaagactccaaccaggtgaagaacgcatgtgtttgggtgtaatgctgttgaaagaaggaaaggccggaatggcatgatcgaataaacaagacaaaaatactgattttagctgatctatataaaaataatctgacatgcagacactgaaagaactgaaactaaccaggtgcagctcttctggacggccagcagcgaacagttttgttcccagctcatccattagcctttccccaatctccttccacacgacgtttccaaaaaattcaaactcttctccatcttgaccattcacattcattaatgccaagcggtcgtctcctattctgccgtcaaggagagcctgattgtccctgatctttgctccccctcgtcctcccctaagtttttcggcgccttctaaaacaagggtacattctttttcgattgcattaagtagctgatcaaacatctttcccagcggcgatgaatcgttcatatacactttgttcgaacccactgtggccctcaaagttccatctgttggagagatcactgctgacggcgacaatgaggcatggggcgtcgccaggtcgaatggatttatctcagcgtgactagaggactcgagctgggacgggtctttgaacggtgttggaggaattacaaaggatgttggcgttgagggggtctggggaccaagttcgaggctcgatcgaatggacggagaaagcccgaaagactttcgagaaggtccatcaagattggttggaagagaagcgaaaggtgtagcaggaatgggtggatcaagaagcatttccaagttggaactaacaataatccgtctcacaagcggccgaacaagttcccgacgaagaaggtcttcagcatctcgccaacccgaaatcaggtcatatgtcttaagacacgcctgaagtgtgtgatgcaggctcgacgatgatgtagagtagtgggatgatcgagacgacattgagaacagggtatcagagaacaaatggtcgagatctttatgaagagtgttccgaatccgctctatacgctatatcagaggtttatatctgtttgatcagcatcttctcaattgattgaaggaagctttaagaagtagcgaccaacccattgaacttcatccaagattgcacacccttctctcctggctttatccgcaaggtagagcactcgagtatattcatccgccactctagcaatcaatttttctccgcctgaggtagcagcttggcttggttttatcgtcgagagcgcggtggaagtggtgtctagcttggataatatcggccggtcactggagctagcagtctttgaactgctgggctcggaactatccgcttgatctatcatcaacagtgtttccgctcgagtgagggagtctgtcaaagagagcagaatttggagaagattcttctcttcccgaagggcagatctttcgtcaagcttctgttggacaatttgttcgttcgagacaagcgaggaccggatgatctgagagacgagcaacaagcaacaggtgatgggtaagcttagtggaagatatgttctcatgattaaggacaaactcacctcaacatcttttttgagcacctctataggccctcgtacgaggtccaatctcttgccttctcctcggagaccagtaccgagactgatgaattccttgtaatcctcgttgataagctggacgagctcttccttgagatctgcaagataggcccgaagatccgttctgagttcatccaagggaacatgcaaccgagaaaggaggaagttatctacatcccagtttggattcgaggacgatagtaatggatgtgcatgggataagggaagcaaaaagggctatgagaggaagggatgtattgacgtgtatttaaatcagaacaatgattgagatagttggacatgaaacacactcactaaatcatgtcgatcagactctgtcgactgcagagagagacggccatcttcgaaagcaggaggtatcagtgggacatccggtgttgctgacaccatcgtgagtatgcttttctgatgttcaaccgctgatagagatgatgtagacggcattaacacaactcaagttaggcattgactccttgaatcccaaccctagctataaccaatctcggggcgacgtggcggatcacgtctccttctatcaatatatcccctctatttctcgtcgaccatctctttgccttcgctgaccgaggctatgaagccaacatctgattctgtgtcgtcctcaaaggacaaatctagtgcgtcaagaccgtacggacttgaagctcttgctcttgctgccttatctagtggatcgaatgataacaatcgtatcaacagcagcggcagcaacggtgttagaatcaacaacaacgacaacgccatgaatagtagtagcgacaacaccaatagacggaacgatacctctgagtttgctctcactgaaccaaaacacctctctgagtcatcatccatactttctccctctttgtcaactcctaaagcaacttcaaatttcctggctagaatgatgctgaactcgggtagcgcaccgtctcctaatcagccgcctcagattcctcaagcaattcttcagcagcttctgcaagaaccgtctatcctttccttgctttccaggctagaacaacaacaaccaaacacgagtggttctccgtcaggctcgctttcacataactctttcccatcaaattcctcattcaccgctgtccccggtattcctactcctctttccaatggatttacaccagagccggtcacgactcgatcgggcaggccatcgaggcctcctcagccatcactacaattgtctcataatctcagtcatgccgatgatcaactggctgcattgcatcaagcttgggcagggctcgacacgtcttttcttgatggaattgctggctcactcaacatatcaaactctctaccatcttctggacctatttcggcgcaccttcctacggacccattcacatcatccgcttcccttttggagccctctccatctgcttctaatgtgactggcacagtaacggcttcaagcacaaacctagatcttggttggtggtggccgtttcaggatgaagagaatgaagatgaggatccgtcttatgacccctcgatggcttacccaaacctcacccctccgacgttcaaccttataacccctggtccttctacgaccaactctcttgctgaggagagttctcagccggcagcttcgacatcaggctcgatggagcgcctgctaaacaatgcatccaaaacatcatccaagcggaaagggaaaggaaaagcgatcctggaggaggctctggaagctagcattacaaacacgagtgtgaacatagatacaacgaaatttaacactacggagtccgcgccagccaatctttttttcaataacgacgacgttgcagctggctcttcaatccaagatgaagaggatgacgatgaaggagaaccgggtaggctaccgacgccgggtggaagactactccggaagcgaaaggttaaagagagatctccgccaccaccatcgaagaaagtgaagctgacagcagaagagtcggccgcgcgtcggaaagctcggaacaaagagctaggttcatcttcgtcttgtctgattggtagatatagcgcttgtgaatttttgaacttgcggtattgacaaaaaccatgcgcttactctccagcatcgaattctagaaagcgccagagagactacgttgttggactggaagctcggattatagaactcgaggcagaagttaagaaatacaaacttgtgtatgtttctgtctcacttttctcttagttcatctctgccgtatgataagttgacacatcatgatgcttgaattactgatacatctatcttttctgcttttttcatcttcgtagatttcaacaagccgcccgaagtatcaagcctggccccggtaaaaacatttacgatgtcgtctcagggggcatcaaaaaccctcatccgtttgcgaacttaccctcgataccagcttcagttccctataaagccagtccactgaagaaaaattcatcaaagaagaaacacacagagggtgaagaggaggagcaggaactgcctgccgaagttgcctggccggaggacgaagaagaagatgacgagtggcagagtcaaggagaggataaagaagtgagaattcatcatgatagcgatgagcgtcaaggtgaagggcacgacgataaccatctggaggacatcgaaggcagaccagccaaagttctggaaacgagcatcgggccctctgaggagggagtgaaacaaacccgggctgaggaggtacgaggaaacgaagaagaggaagaagatgaggacgacgatgaggacgacgaagattcagactcagaggattctgcactggaggacgaagacgatgaagatctttaccagcccatcatagacgtcccgatccccatcgaactcgctccacctccaccaactacacagacagagacagcactaggaggatcagacgggccaatggacgcacctggtagtataccggctggagaaaaagtggggaaccaagagataatggatctactgaagaagctactggcaaagatgggaggtgcataacgagatttatacatgactgcccttgaaatcatctggtcattgttcttctttgtgaatctgtaaattcgtgagatgatcatgagtgatgctgtatgctgaagggaacagaaaagtacgttttagacagtttcatataggggatatcttgaatccgttctggctagtttcctctccatgaccctatcattcgcataacgacattttcaatctgaacggagggagcgatagcagcagatgaacgaggtatcagtacgtgagtgttagggttaactataagcgtaaccaccggccccagcttgaggggtcccatgagatggattcccaggtatggatcaacaccaacattctctcgtcttccctgtctgatctaaaacctccatccaaccatgcgaccatctccaacatcttttctccaccgtgaatggcggaatccttgggagagaagagaggcctggagatatcaggctccgttcaagggtggaagatttctaacgtttgttttcccctctcaattcctgatgttctgctcgttgactgaacggccctcagaattggttgcaagagtctgacgggctgagcattctattcctgtctttggtttactgggtttgatgatctcatggactctcacctgacactcctgctgttctcgttgtctttcgtttcacctgctacgtcaaaatcggggtcgtccatatttctctcggcggccaatcgaatctcacagatatacccccatgcttcttcctacacttggggtttttgccgtatatgttgcgttcgatgagctcgtcaaccacggaccactgaaggagctcgtttgggggcctgattctggcgaccacggtcaccattgattcaacccttcctcgtgatgtcggacgttgtcaagaacggatgggtctgaatcgcataggaagagccatcttgtgagtgagttcaacagattgtaatcaacgtggaggtgtatcttattttgatgaaatttccctcgtgtttttaagtctaacagctcaagattggaatctgcttgatcgaaagagttgtatgacttgtaccaaacaccttgcctttgtatcagatgaatatcttataacaacatatcattttcaagtctttcccgatagtgttttctatgcataatctagtcgagggcctagattcatgatacagaccaggttaactgcatactgatatcaaccttgatttggggtactcattcaacttttttgcccttcagggtctatgcagtcagcagcaagagaaccatcaatcaacaggtgcaagtatgcatagcacaacggaactgtcatctaaaagcaatagatggcaaattggatcaaaaatgtgagcagatgaacaaacagtctctcgttacgttaattccatctgcatctttgctctggatatctgtctgcttcgagttcagtgccattcacgaggtatacatgggtgcaaggtgataagtgaatttgtgttttgaacatctatttggcggttttgattgttaacaaaagcacatatgaattcaaggtttttgatatcaaaggagaaaggctgaaggaaaaaaaacatatcaaagaagatatatatggtattcacaaagataataatgttgtacgcaacaaatcgagcgaaggaatcaaatcgaagatgaagatgctctcctcttagaggattcattcatccttacagatatccacaactctatcttccatcttctcccatccgggtagaagagctccataagcattccaagcactcaggtcaggatcagcaactttcttcataccagcgatagcatccctctcgacggtgtcggtcttttggtcatagagttccattcgagcagtattgacgacttcctcgaatgatacaccaggcgagaaaagctttttgtgagcccactaagagaatatatgaattcagcttcaacattggtacccgacgaggagagaaatagccgccagaaggaggaacggagagatacggacggcagctcggtaggcggctccaatggcgcatccctgagatgatccactagccacataaacggggcaacctgagcacagcaaatgtaagagatgcaaagagtagttctaagcattcgagcattgaaaacagatgcaggcagagactcaccgaggatatcggacagcaacttggtgattacagggctgagagagttcacccagtgtataacatgattgaggattctaacaacacacaataaacatgaagagaacaaatcatgactgacttgaccgacccgccaccagctacgaacactctgttgagtctctctccttttaaaatgctagctactctcttcctgaaactcaaaaattgactctccagcactcttctcggcagctccttgagctcattctcgctcaactcaacctctccaccaggaagataaattccgtctcggaaaatatgaatgccggatacaccggaaggaataatttcaggtttgtcatagttgaacgtggtaataccaacattagaatctactgtcggagtggatacatagccagcgagaacctgttgattaaaagtgtcccaagacgatccgcagtgggtttcacgaactcgttctcggctagaggatattttagaaggaaatagacatgtcgagagatagtgtgacggaaagagatataagtatatcgctataagatgtatcggtgtggagaactcacgaaagggagccattcttgtagcaaagcctagatagtatttcgtcaaatatgatgagacagtgatcatcgggaagagattcttgactgatcaaatcgagcacttacatcgacatgtatcggcgctggccagattgcgagtctccagcaggggaggcaaagacgtgataatcaggagaggctatcaccgggtaatatcgtttcttctcaacatgtatttttgtgctgcacatggaatatatacgcgggcacgtcttgcagaggaacttacggagatattcgttggaagcaagaaggacagtatctgatgttcctaacgatatgacagcatcgcctcttccagaagcagcatgatataaagatcagataaaacgatgagctactgtaaagaaaatctttttcaacatctcaaaccccgtataattcgagagtcatatggacttacggactcaagatgaaggacagaagagtactaggattgtctccagtgaagggcgcaacgatgcactccttgttaaagttccatcgatcgacccaccactttccgacgcgaccaatcgctcgtcctgggtcaatctcgactccagttaacttagactcgagctccaaggggttgcgattgggcacagtcagagagaggacctcagaagaccatcgtctatttgggagacttgtaatgtagtgcagaggtcaagtcagaaaagataagcctcaacaaatcatcaagctgacggtgcttactcccataaattcatcccagaggcgtcggccttaggttgatttgaggttaaccaaggatctgtaaaacggatgtatcttactaaagcatatagaatatacagactgacctcatcgtagcccttgatctctccgtctgcacaaatcatagtggctagccagttgctaacaagcgcaattttttccgtcatttcccacacctcaggaacacctctagagacaagctttctaatctgtggcccagtaaaccttgcgtgagccttgcttccagtagtttgcgcaagaccatcagatccaccagagaaagcttcagtgatttctttgcagtcaagtttagtcgaggaatcctgccagttagtgacagtaggtgaagaaaacgcgtcggctaattgcgaggcaattggttggaaggcagacaagttggacaggagagaagaggcgcgggaggagaaaagaaccatagcatgttgttgaccggctccagaaatagatataacgttgttgaacggaaagttgctttttaagattcatgaaagatagatagattcaatgagtagaagatctcaaggtcaactagtagaacttcgaccaagaggctaggctagaacagtcaagtagaaagcgaacattattttgagtttctctaggaggagatcgatagcctgaaggtacatatcaacaggagcattgaccactcctcccgagtgcacgtggactccagattttgtgctgagtagagcaactcatccgaggaaagaaacatcatgtcacaattgaaataaatattggccttgttcatcaatagctcaagggcggtacaacaggtgggaactcacccaaaacctggaagttctaaactgaagtccaccttaatttcgtagacaacttccaaattttcattgacagcaactgctttgagtccttgagtactacagtcgagacccatgaagagtttcttctcgacgaactgtagagatgtaccatcagcgattggtgcagtcacagattaagatgaacgagaagacgggcaagttcatgacgtgcgcttacagtcaaggaagcatcttgagatgaggacgacatcgtgaaataagtttctgaataagagtcagattggtcgggagatgcacttataaagtatggtgttttggcagaaaggaaagagagagatccgatgctcttggtctttaaaatggatttgagagattctccggaccggaccggagatgttctgtttcaggaaagacccataaatctgtatttgtattacataagctagctggcgcgtgtcgcgtcgcgtcgcgtttctacatctagctcgcgaaggcctaactgtacaaggtcattattaccttcgatgacagttaagacagcttgctctacttctctttggcacacatctcaacgatagcatagcatatatccaaatatcgtaaccacatcctggtatagggccctgctaattaagaatatcttatcaacagagatataggctctccttggccttcaacttccacgtcattcattcgttatgcctgtacccaacccactccctcaaaggtcatccacagctcttacagctcccctagatcaaggtctcttccctccttatcctcaaagaaacggcatagaatctcaaccagacgagatattccgatcaggccagaaccaaattcaaaatcctgatccatctatcactcctgatcagtatcagctcaactccaaaaggctattaatcgggtttttcgatctttgggtcaaccctctcaacccaagaacaatcagccagcctgtcgaagcttgggaacttacttatgtcatcaatctaaccggactatacctcgaccgtgttgagtcctttcaatgggagctcagggaagggctaggagggatgaggtggattctggagaggacttttacggtaagagcaaagctgctcagtagaaagggcgtaggtcttgacgaagaagtagacgacagaatgacaaggatggagaaggccatcgagaatttggagagaagagtagttgggatggtcggaaaaggaaacagagatgatcatggacgcatgaggatgagacgtttgggagacagggacagagggaaggcttgggagagtctcttcggggacatctcgaaagctataacaggtaagcatttgtttgtaaaacagcattgggatttgttggaatcttggaagctcacatcggtctgatctcctatccctatcgtctcttacctcctagttctcgatcctaacaagacagatcatctctctcaaatcacgatcttctttaactctaaccgtacaggctcatcatcccaacatgacccgtccttcaatagtcctgtgggaagccctcctgcatctttggattcctcatcagacatctttcacataccgctcaacaccctctttcaacaacgtgccctactactggctctactctcgttttctgtctcgatcctcttccatcattctattgggtccccaatctcttcaattggccccgaaccgtactatccttttgttccgaaatttaagaagaccgttatccgagccttgttacattcatggccggttttatcttccgaatcaagaggcgagcgatctgtgctggaagtagagtatattcggttgagcgagatcttaggagaggttgtcaatccaagaatatggatcaaaatcatcgcttctctgaagggtcgagcgaatgaggcttgcgatccgaccctgcacgaatacacagatggcatggaggttgatgaggatagtgatttcagacagattgagtcaaggaagcgaggtttgtggaggggattagacaggcagctcaggagtgcattgagcagcaccaggaagatcggaggattaataaacaaagaagactcagccgtcttgatagacggcatgggcgatatcagttccttggtcgaatttattaagatctggaacgtgtatgagagggaaagcgatttgaaggtaagcttgggctcgagtctctcgaagttcgttctgagacaaggcttctacctggaactcgtttggtttgacttgatttcctttgctccgtgcatatctaacaggaagctatcgtctctgctctcagcatcttgccttgctctgcccctgcactcaagccgattgcctatatattcgcgtccaactcgtctccaacaaattctccaattgcctctatgcggacatctctcgcttcccaacctcggaagcggaaacgggacgcggatggacgtagctggacctcgctcactcgagaccttatgaaaacgtgcttcggaaatagtttggtcgaggaagccgagcagtttgaatcacaggctgggttcggacaggagacaagaagacggttgagtgtggcgctgaacaagaatatcaagcagctcaaactaatgtaggttttccgcatcttgcacccaatcttttgaataaatcttggtttaccggctgtctgtactaagtgcgtaatacttctggaattatgctttaacagctcgtctaattctgaagaaataagcgcctttcataagatactcccctcagttttatatgcatatgctatcaccgttcagatccatccgcctacttttcctgctcgtccacctaattccaggccggctctacaaaaattcgcaaccaatcttcgatccatacccatcgccgtcctttcagagcttgtgaggaagtatgatccgtccatgccggtcaaagtcaagatggcattgctagatggtgtgagcctagtgttgaagcatgtatacatagcatctgaacatgcgaaagagctcaaaacggttgagcagagaatggtggaaatgattggggttgccttggaagatctagacaggaatgttaggttggcagcaaggtatgagtttgaattctccttttgtgaggacatacgattacgagaactgaaaatcgggtaatatcttcaaatcactgctggatcagccgaggactaattgctatcgtcgactttcataaagatgatcaggcattgttcccagcggtcgaaccaatcttaacacgtctgttctcagtccttgggaaaccagcggtccccgctaaagaaaccgctcttaccgctttaggtgcgctaggcaagataagatcagacgatgtcttgttggccaaggttgcctctcagttggctattcaattgggagatgttgattcatggatcaagtcgctagcccattcgactgtcagtgtatgattctgttcctctcatatatgagtaaacaaccaagattaaaattcaactacttctgctctgtacgcattcttgtatatctcataaacagattctcagtctggctcactttcatcaacgaactccccacaagctcttctatccctatttcaaatctatcagccttcgtctcgtagattcactcatcatagcaccctctgcgctctctgattttgtcaacctgatcgacgaaactcaagaaaattttctggaaactactgttgcctacaccgttcctcatgtcgttctccagttccggaaagatattctgtacgctatggggaggatcatgaagaaagaggtcgctgagattcttttggataacattctggaaattttgtatcatgtactgatgcaatcggcaccgttgacggaaaagggatttatattcttgatcggagcagttggaacacatgcaggcggagaagaaggaggcaagagagattacccggtcaaggcgggagacctacttaagatggctgaaccagtaaagctgttgtataagctggttgtggacctgggcgatgaagatatctcagtgattcgaaaggtgatttttgtattcaattcttctatttatgagataatcatactaacaagccctcatttctaactttcaacctatttttatctacctccgttaaaaaggctgaagcaggcttgtcgaaggctgagaagaaattcaaagagttagaatccaaatcggctctagaccttggggattttctgaaaccatacatgttggggataatctctaatgtgaacgagcttcttcaggatggccaaggtcgaaagaccgctcaagacaagattaaggtgattcgaagcttgggtgcactaatgaagaagatcggacctactatggccacgttctcccagcaggtgagttttgttcacttttgcaaatcctcttctcgaagactgagatcacttagtgcttttaatacagattatggttactcttcaaggcaatctcaacaaaccaccgctccgatttgctaccctccaaacctggcatacattcctcactgtcctgaagttcaaggatattgcgcctcatatcggtcctacctctgctgctttcgtctcttcttggtcatcctttacagaagaggagcgcttcctggcagcaaccatcatcgattatgctatcgttgagaattcagagtttactgatctagttctagacgatgtcgttgatctagagggtatcgataagctccaaggcgcctctcgacgcctcaaagcagcaagaaacaagtggtcatcaaccgatctccttaataatcttatcagacgtgcaagggatgaaaatgttacaatcagcatccgcgctctcgaggagctcaaaggggtcttacttaaaaagagtcaatttgcccaattggcctcgggtgatgtattcgaccctgtcgttggagaactcgtcaagacgttggtcacttctgcaagtcgagatggagatcacgtcgaagatctccgggatattagtttagattgtcttggtatcattggtgctctcgatccagacaggtttactatccggactgaggaaacttcttggcaaatcactgacaatctggccacgcttgaagaggctcaggtatttgctgtccatttattggtcgacgtcttagtaggcgctttcaaggcgacaaatgacacccgatatcaagagaatcttgcatacgccattcaggagctcagcaaattctgtggatttaccaaggaccttcttgacaagtcctcttcctcttcttctcgggcgcctgttgctcttcgaatccgagaccgttggaagaaaattcctcctcagaaacaagttactttggccgacatgttggacacgaaatacgtcctcaagctcattcccgagaaacagtttgaacatcctatatatacgacctgtccaacgtatcgggaatggattcaacgttggacgagcgacctgatcccgaagaccgctgcggggaacgctcgccagatatttgatatctttcgtgtggttatcaaaagccaggatgttcatatcgctcggcatctgctgccacatattgtcctcaacatcctcatcaatggtgatgcatcagcccgaaaagagataagtgcagaaattcgagccgttcttcttgatcaggttgaccctcagggagattttccgtcagatcgtcgactccttagcgctcaggtgagattataagctatattgtgtctatattaatttatctcactcggacttataattggttttgttgaacgattagaccatttttgacctgatggaccatatcagtaaatggctccgacaccagcgaatggatctcgcaactagacgcaaagaggctcaaaaggctgggacgactagtcaagccttcgaactggcctcccagcagctcagcggtgtcgaacgagtcatttccagtatcgacactcagcttaccgcccaggccgctcttcagtgcaaagcatatgcgcgatctctcctcaactttgagcaacgaatcctcgccctcaagaaaacaggtgtacctgaatcaaccccagaaactcagcaatactacgagcatcttcatcagatatatgctgatcttgacgaaccagatgggatggaaggtgtatccactaaggtcttgtctccgtcattggagcatcagatccgagagcacgagagtaccggtcgttggaccgctgcacagagttgttgggaagtacaaatccaagaatcacctaatgaacttcctctgcatattggtctgcttcgatgcttaaggaacttaggacactacggtatgttggctccttgtgctatcaattcattctacaagactgaagttctgtcttcctggtttacagacaccttacgaactcacattgagggattgacaactcgtcggcctcaatgggaatctatgcttagcagcttccaagttgaaggatcttggatggtgggtgactggggagcagtagagaacattctcagcaaaaacaaagagacaagtcctgagttagctattgctcgtgttcttgtggagctcagatccggtggtgcatctcttcccacagttctgcgaacagcccgactcgaactaggccgcccgttgacggctgccgggagagattcttacaatcgagcctatgattccgtcattcaactacatgttctccatgagctcgaactaatcgctacaaccacacttccacagttcaaccattgcacaggcgggccgaacgatcaagccctcgcaacccagagaatcgttaccatgaagtcagctttggctaatcgactgagtcgaatcctaccttctttccgcgctcaggagccgatcttaagtatgagaagaacggcctttgatctttggtaagtgtttcaattttgagatatattatcaaaaaattctaatgatgcattttatactggatgcacagtgcgacgaaagccagtgaggctctcgatagcaaaggagagattggaaaggcttggttgttaacgtccaagattgcccgaaaagccggtcatactcagacagcgtacagcgcggttctccaagcgagacaaaacgatgctccttatacattcgtgcaagatgcaaagcttctactctccagtggacaagccttgagagcgctccaagagctcaagcacacattagaccccctgatcaaagatgttaataaagccccgaaggacttccgactagtaaaggtccgtcaagcttcgtacaattacatttggaacaatgatttacctttagcggccctttatccacctaggcggcgttactaaatgccagatggtaccgagatgccgatagatttgaagtgaacgatatagttgcagcattcaagaaggtcattgctctcgacgcggagtgagtcagctcgttgggaacttcttgttatgtttttgcagttcctgacaagacttgttctaatatgcatgtactcccagatgggaagcgccttattaccatctaggtcatttctatgataaggattctagcgatgggtatgttcagatgcgtgctgctatgattgtactctgctaactttttctttttttggtgatcattcgaccatgaacagcgaggtttcaatgcaaattcttcaactcacagtggagaactatgctcgagcgttaagattcggaactaaattcatatatcgtacaatgccacgaatgcttactatctggctcgacaacggtgcaaaggagcacattcttcaacttgaaagacaaaaggataagtcggggtaagtgcacatgactctgttacttctccgtcacatgtcttctaacagcttttacttcattgaaatctacagagcatcagataacgccgatctcaaatcactggcgaagatgactgctattatcgataaatgcacgagcagactaccagtttatcaggttggtgcctgtctctgaatctgcccctcgtaatcgattactcaacataattttgtcgtacacgttacgtagtggctcaccgcctttcctcaactagtctcccgtatcggacaccctaacggatctgtctaccgtcagatctaccgaatcattgtttacgttgttcgcacttaccctctccaatccatttggtcgatggtctcggtttcgcagtcgaagaaggaagaccgggttaaaagatgtgtaggaatcttcgacaaggtgagtccatgatgaccttgcgattggtctcttaagaattgagtgattaacgcttaagattgtctttccagcttcgagcgattgatgaagttggaaatgtctcaaacttgatagacaaggcgctactaatgaccaaggagcttctcaaactcgctaagctagatgtgtccaaatcaacagccgacgtcagcatggatcgagtagcaagaagtctcaaaagtcttgcgccatcgcctctcatgattcctattcaagaagcattgacggtctcacttccatccgaggctgtcagtaagggcaaggatcataatccctttccagtagctccggttcggtttgcgagtgagcgcctattattgttcttctcttgctgtttgatccatgtttctaatcgatggttatcatttcagaattttttgacaacgttgaagtcatgtcttctctcgtgcgacctaagaagatatcattggttggcgatgatggtcaaacctacagcttcctttgtaaaccaaacgatgatctcagaaaagatgcaagactcatggactttaatgctatgatcaacaagctattgaagaaagactctgaatctcgtagacggcatctttgtaagctacttgttctttttctcgttactgacatcctgacttgacactgatatcgactctcgtgacgcaaagatatccggacgtacgctgtcactccgttaaatgatgaatgcggtctttgccaatgggtcaatcacacagtccctctgcgaaacatcctcacgcagagttatacaccgaaaggaatttcgctctttgtacgcctttcaccgctcttttgaatatcttattgaataaagaactcattaaacacttcacacagaatcgagaggtgtcagaaatctataagaagtacgctactcaaacggatgctgaggtggcagagcatttccaaaatacattattacccatgtgagttttcatacaagcaatgtgctgaataaatatttagctcatcatgttgatactcgttttcacataggtattctcctgttttccatgaatggtttctgaagactttcccagagccgagcgcttggttggctgctcgtttagcttacggaaggacatatgctgtcatgtccatggtcggttttgttctagggtacgtcttatctttgtagcttgctgtttatagaattctaccatctcacctgcggcttctccagtttgggagatcgccatggagaaaacactctttacgatcaaaactctggagatgcagtccatgtggatcttaattgcttgtttgaaaaggtgggtctgagacagaatgccgaagatatgcacataatatttgttagaactgatacactgacttttactttcgagatagggtcgtacattcgatgtcaaagagcgagttcccttccgtctaacgcataaccaagttgatggatttggagttactggtgttgaaggtcagttgaacttcatattcttgattgatcttgaacttcttgcttagatgctctttgctgtcatgaaatgaaacgacaggtgtctatcgtaatgcttgtgaagttacgatgagaatattacgagataacaaggattctctaatgagtgttcttgaaacattcattcacgatcctcttgttgaatgggagaacgataaacgaagaatggtaagtgtcattcgtttaaattgcatcacccacactacatcttatggtatactccaaattatctccatcttaggatcgcgaaaaggcaaagtccaaaggaagtcgacgtagtctggacaatagcgaaaccagtatcttggcacttgctcaacgctctcttgaacctatcgagagaaaattacggggtgttcaagctggttatgtcgctcctaatcaaccagctcctacgaaggagatcaccgtgagtaatcaagttgaggcgttgattcaagaggcgactaacccagttaatcttgcgaggatgtatgttgggtaagtggatcctatttcttgttgtatgtcttttcatgaagcgccagactaattcttgcgtatgacgggtacatcaattgtaggtggggagcgtacttataactgtagcgtacatgcgttgatagtatcgagatttgtgtttcgtaatgtagatgatctcttatgcgcaaatgaaaaaatgacgaagtactcaaatttgagagaaaagcaataacatatgattgaatcacgccaggaatgcactagtataaaaagttagacggtagccgtatccttctttggttttttcttcgtcttagcctccccgctaagtccttccttcttcgattttcgcttgagagtaggagtagcattcgattcagatttggactcatcctcttcagcctctttcatctccacatcctccgtcttcttagcgttcttcttcagctccttcttttccttcgcattcttagcctttccagaggcaagctccatcagttgggccatgagagagtgaagagcactcgacgatttgaatctatcagactccttcaccttgacgacgagagccggaatgaactcgtacgaccaaacaaccggtcggtcttctgggagaatcatcggcgaggtcgatttggcgagcttgacggcaaacttgagaacgtctcgcaaacgatcagctttgatgctcttcgaggatgggtcgcacgaagcctcaacgaaagagaatatggcttctcggcaagagaggacgaaagctcgaatttcagagtcgagaccttgtttggacaagacagagacctggttcgtaagttcgttgagaatgaggaatgcctgagttcgtctgaaactgttggctccgtcagatttagcataggctacaagaggatctctcaaggcccaagcgatcgaagggaatcgagagaacatgttagagaaaagaactggtcgaattttggttgactttttggtcatgaagtcttcaagcgaggccttgtagacgtctagaataggctgagcaagatcctggctgttggaggatgaaggcgtagatcgatcgtggagaagcgcacgggagacaaacatgctgcatgtgctgcacgttttggccacttgcagagattgggcttttcggcaagcgttgtggagctcttcaagtacctcgacggcctcggatcggtcaacgatttccatgtcttccttggcccgacaaatccggttgagaataccagtggccttagaggataaatgctgctcggtggggctggagttaaggacaagctcaagaagaggaaggaacaatcgcagaatgagggcattgctaggctgcttctttgcaaaggtttcgacgatctcaagaactctattcttgaagtgcacagcttcacgctgagcatctggagaagcgaagaacaggataagggcaacaatcagaacgattcatcggtctgcatgatttctggtatacaatgtttgaaattgcacacacgaacctttgtttcccttcttgccaacgacctgggacttgaaaatttctgccaactgatcatctaacgccagcatctgatcgtcgttcatgagcaagtcgtcatcgtcgtctgagtcatcgtcagctccgttaagagtggtatcagctccgttaacctggagagcctcggctatcctctttcggagctcgggatcaacttcaacatcgccctcatcttcttcatcatcctcttcctcatcttcctcatcttcctcatcatcctcatcttcttcggcctcgtcatcatcttctcctttcatctcatcatcttcatcatcctcagcagtgacaggtcgctcttcaagttgctatagcatcgcccatttggaaagattaagaaagcatcacatcagtattcttcacctgagcagcaggcaaagacagatacaacttacagccaataaaagatcaattgtactctccgaaacttccccagacaacatcccaaagacctgagtggctaaagttcggagctgggcgctagatcgctccatgaatccgatcaagacatctaccagtaagtcgataggagcaagatcttcaggctcgtccgttccgttgtttgtagcggcagcagtcttcttgctcgtcttggtctttttggtgctgaacatcttctcagcacatcccttgagctccgcaagaatatcgagcgtatcctcaggctcatcgaatgactgcagaatcaccgactgaatcaacaactccaaacctttagcagcctccttcttctcgtcttgaacggccttcagacctttaacgacaatcctagcatcctttctggcatcttcaatctctttctcagcgtccgtcacgctcaccaggtgcttcttgtctctctcaagttcctcggcgatagagagcgctcgagtaacccaaagggtaccggtggagtcagttgaagcagatcggtgagccttgcccgtagagtccttgacaagagtggtttcagacgttaattcgctgagcaccagcgaaagcttggatcggcagtaagcgtgcaagttgtcggaaagcgaaagttgaggggcggtatgaagctagtatggaggagaaaccagagatccggtgaagacgtgattagaataaattcgaaatacacaacagaatggaggacgtacatgaacaaaaggagacttggggttggccgacttgatcttatataatccgtggagaacgaagaactcaatgatcgaggtcacccaagagtcgtccttggggatcgagccgtttcggatcaatgcaacaagctgatcgaaagcccagatccttctagcttccaaaccccggagatcgaatctgtgcagataatggtaattgcgtaagctagatatgtatcgcatcaactcatatagaagacaagagcaaggcttactctgaagatgaagcaaatccgtcatggacgattcccttgaggaaatcaatgtactccttgacaccatcgatcgtgagggaagataagatggaggagactgtcttagtcttggtgatcttatcgaagttttggtttccattcttgccgagcagctgagaaacgagggtaaatccagcagtgggattgatggtgttgatggactgaacaagcttggcctaatgtaagaaagatttgggaattgaacagatgaggaggatagacacgtcagactggtggatgagacatcagagaacggataagacaaacaatagacagagcagccttgtgaaggtatcgttcttctcctcccaagttgttgatccaggttcgcatgaagttcggggtaaagactaaaggaatttctgaggcaggcaatcgagggaaggtcttttcaaagatctggaatccccaaaactttcgctcggaagaggacttggcatcgaacaaagaatctgttttgtcagattgccaatcgagagatcagtcagctcatgtccaatcaagcgtgcacgtaagaaaagtgacaaaccgtccacgacgactctccagaactctgagaatggagccttatccacctgaacgccaccggcgttctgtttctcttttgggaaatatcgatcaagaatcatatcccaaacgaaatgaggatgaggcttccagctacctgttccaccggacttattcccatcttcttcatcatcctcttcctcggcagaggcagagacggaggcttctttaagaattcgagcaagaataggaaggtttgaagcgtgaagaagagaaggcgacttgaagggaggaagaaggaaggttttgaagggaaggttctaagtgacagagaaggtatgatgcaagcaggacgcgctcaggtaatgtttcgatcagagcggtcaaaaactgaaaaaacctacagggtgagaagcctgaagtctcaaagtcactgccaccttttcaggagtccactcctttccgccgacctcctctccgcctcccagcacaaaaccagctatccattcggtagcttcttccttccaatccagttttttcccctctagtccttctaaagccaacaagaccgaccaccaacagctctctctcagccagaccttctctccgctgacaagggcgagctctcgaacgaccgtctggaagttggcgatgcttgcagtaggaccgtacaaaagacccgactggacgacggtggtgagaccgaagagtcgagcgaaaagaaggtctcgggtctcttgtcctttagtagagaccgtgactcgagagtatcgaagaacaagagatattatttgggtaggggtaatggtcgtcaagtgggagagcaactgcacacgaggggcgccatacgcacagcgagtaaggactttcgtttagtatgatatgcttgatgtgctgatactaaaccacatgtgacaaatatagatgacaaaaagatgtgataaagtggtacatgaagaaacagtcactcacttcagtcaaagccaccgcaaaacccaatcgagagctttctctaggactggccaaacctctgaccagtcgctttatactatagctgacatcctccgagtttctagcttctaattgagcgtccaatgccctggactctttgtctactggctcgtcttcttcatcgtcgtcttcgtcgtcgtcatccgcgtcttgagcttcgtcactctgctcgtcttgggcgataggcggaggaacagacgtgagaggagtagcagccgcacgggcatacgccggagaggactcgaattcggtttggaaatgctgaagagtttgaattagctgagcagaggaggacagtcttttggatcggacagaggaggaaagatcccagaagagaggaagcgtcgtgccaacggtggaagcagaagccatggttgggatgaaacgaagaagggctaaaacaagatagtattgaatcgaacatcatcagccaaacagaatactaaaatttcgcgttgaaaaataatgaaaaccaaccaggaaagcttgtctgatagaaatcgataggtatttaacacgagaaagtagagaaagtagaggaaagaggaatagagagggaagagggagggtgagcttctcggtgttgctaccgagaaaacggagagagagaaatctgaagaatttggaaacggtggaaactggttgggcgtggcgtggtgacacgtgatcttaagcagtgtttgtgatcacgtggtttacaacaaccctaagacgtcctatcgtcatcgtcttaaaacattcaagagacgtccacttattccaatcacctacaatctcttatttggttcatcaattgcgacgcgccatgaccccaaagaacttgtccccaccaactaatcagccatcagtgtcgtctttctttaaaaggaagtcacctccctcttctcaagcttggtcagaatcttttccatcgaaaaaacctcgggtgttggctaatgatcaatcgctcaaacaagcggatgcgacttcggccaatccgatcgagatcgaggactcaccatcaccttctgccaatgattcgtcttcatccgtatcatacatacctccacctccatcgactactgtcgctttcagacctccttctagagccccgtccgttgtgcctttgtatccaaaggctggcacaacagcatcggccaaggaacggctccgaaaactagcatacgtcgaagagagcgaatcagtacgaaaatcagagacagtgataacgaatatagataagaaggaacgtgaggaggaagaggacacatccaaaaagattagacatgagctcttcaagtcaagactcctgggagtggattttggaaggcgtcgatcacttgacttggaaaacgcgcaagacgcggctatatcagctgctgatcctgggtctgaccaaaacggagaggcagttgaagagggtcagccgacctcttctgcttctaagatgcagagtctgaagcagaaacttagcgctagaggagtagccaagggagctggaaaagcaaaggagatgttagggcccagtgggaaatcatatactcctttggagaaacaggtgcgcatctaatcagtataatagtttgtatgatcagaaacctattcgctcttatccttagctcgatggttatataaatcaaagattctggaccttaaagagaaatatcctggaatccttctgataatagaaggtcagcagaacctaccaatatgatctcagccgcctgttctagcttgttccttaccctcgaatctagtcggttacaaattccgattctttggagaagacgcaaaggtttggcacttcattctcttcaagaaacctgcaagtatatatatatatatattgaaacctcaacttggtaccatcagattgcatcccgatatctgaacatcgtagctttccctgagcaagtgattcctgatacgtcttccttcattctctttatctgactaactggttctttctcgaatcacagccgtaattttatgaccgcatcaattcctattcaccgagtcgatatccacgtcaagaatctcatcacgcacggttacaaagtgggtgtgtgccggcagattgaaactgccgctctcaaaaagtctggtgataacagaaacacaccgttcatccgagaaatgaaggaactctataccgcgactacgtgagttcatatctctcttatctctatctatcggctcgagagaagaaaggtcactgaatcacttctaatcccgtctttcatcatagatttgtagatgaactgtcttctttcgactcaacttcagagtttgaaagagccgccgctgttccaccttcgaatgcactattcatcctggccaagtgtactgaatctgatagaggagagaaattatcagaaacaaacaaacaaatgatgggcatggtcagtgttgtacctagtactggagacgttatatgggacgaatgggaagtaggatcgcgaggggatcttgaggtcaataattccatccttcgcacattccctcttgactgtcatatttgaagtgccgaaagacttatggtggtctgatacaatacttcacaatcatatatagacgagacttacacacatcaatcctcaagagtttcttttgccaacgagtagattatcaaaagaaaccgaagggcttctcactgacgtagctgagcgcgggtatgtttcctttgactttcatacctttcatctccctgaacaatttgatctttacatctagtcttgattggctgattttgcgatcaacctgtgtgcaggaacatccgtttagagaggtatcaggacgacatgagtttcgacaaggcgcaaatctacttgtcttcattccattcaggcgaaggaaagaataaaggtaagttatcatgttaatgcatgtaaatagactagcaacgaagaatctgatacatccttcctctggtatgatagctgttttttcaactttgacggacttccccaaggccgttgtactcgcattagcctatgccgtcaggtatctcgaaggtacacatctccatgtctcatttacatctaggttctttgaatcggatgactgagcaagatactttctatctctatctctattcagatttcaacctctcatcctctttgttgcacactgaaacgtccttcactcgattcactgggctctctcacatgcttctcaacgcaaacacattgaagtgagtttcagttgttgttaagcactcatgaagtcttcgctctcttgttcttactcgtcctttacatgaactgggcacatcgaaaaagcaatttggaggtatacaggaattcagacgatggtggcgagaaggggagtttgttttggttgttaaatcactgtgtgactaggttcggaagtaggctcctcagacaatgggtggggaggcctttgataaaccagacgtaactatctgtttttggcttatatttgtctgctgaacttactttcctgctgcattttgactaaattcgagtctaaattccatgccggtatctgagactggtagcatcttacaggctagggttgatgctgtggaggagcttctgaccgatacagacggtagagtcgagaagctgatagatcttctcaaaggattatacgatttaccccgaggtctagctcgaatacaatatggaaaggtctgtattgttttttttcctttctcgcttcggagcaaaaaagaaccgaatacacatatcgattagtttcacattctgaatatgtgaggcactaatttgattgtatgaatttatccattctagtcatctcctaaggaactcgttacccttctcattcagttccgtcggcttggatcttcctattcctccgtttcatcgttcacatttgagagcgatatattaaggagtattgtctcttctctagctggtatcttggaaccggttgaagagcttttgaaagaaatctatgagaaggccgcgagggagggagagatagatagtctttggaaggatgagaacaagttcccagagatcgcagagtaggttcattgatagatttgacattgtgtgaggttattgatttatactcaatagttctgtatctacgcactttataggacgaaagcgctgattgacaaatgcgatcgagatcttttcacagttgtacgtcctcgtcatagctgaatgcaagtagaaagaaatgcgtcaggtttctgggttcttattgacttcgaatgtgattgtttgttcgcatgtagctctcagagattcgaatccttctcaaacgaccaaagctagagtttagtacggtctctaacataagtcagcatcttgaatcatctgccgatcttgtctagatatagagagttagcaacgagatctaacggaaggattgataaattccacaatcagataatctaatcgaggtcagcctgcatttttgtgcagattcgttagaatgaactgctctttatgggagattttttgtttttctgttccaactaggttcgacaaaccgatgctaagaaggtccccaagaattggattaaaatctcttctacgaagctggtgtaaggattcattcatccacctcctgtcaatcaacacattcttatacaccgtacctcttgccacctcttttagagttcggtttcatactcctgagattctgaagattctccgtgagaaagaacagtacaaagaaaccctcgtctccgtttcagcctcttcgtttcgagcgttccttcgagaagtaaacgagttctatgatatcttccggtctgtgacccatcatctagcaacacttgactgcttactatcactagcaaagacggcaaaccagcctggctacacgaagcctgtacttgtcgatgagcccaatctggatgtgaaaggcggatttcacccggttttggcagctctgtctgatgagacgtatgtgccggtaagatctattcgtttggttatcatctctctatccaaggacgtgatcactggtagttgaaactggagggcatcttgacaatagaatgatctagtgatgagcgcaaagaacggaagaagcaagatcatcacaggtaagtccctccttggaatcaaacagacagacaagacaatttcacacctaacctgatccaacatttaaggtcctaatatggtcagttctcatgatccgttcatgcataataaacaccatgcttatcagctgtttccttctatacgggctatctgtataaaagggtggaaaatcgagtctggttaggatggtttgcttgatcgtgctcatggcccagataggtagctatggtgcgtcaaacctctgcccttaccttggctttcctcttgaataccttttcttttccacatcttctaaaagaaaccatatttgttctctgctgtatacgaatatacaattcttagtaccggcttcagccgtgactatgggaatacacgatgcaattcatacgtgaggctttaatggtgatttctcctactcaaaatacatccactgatagtcgcccaaggtcaaaatattctcccgtgagacagccgaatgggagcatcggacgacattaccggtggtcagagtactttcatggcaagtttaatctgctatctattcgtcttgagacgctggctaaagtcaagggacgattgacaggtagaattatccgaaacgagcgagataatgtgagtttggttgtttcttaagtgatgtatatattcatctgatcccatcttgacctttgacattcaattcttatcaaaattagccactcagccacggataggagtctgatcgtattggatgaactgggtcgggggactagtacattcgatgggatggctctagccgaggtagtttggtcctttcttctctctacggccaatgtttatgaatcatttgatataaaactcaccaggttatcgtcgggtgggatggggggttaggccgtgttataccacctagtgaccaagactcggtatgctatctcgtcttctattcgtatctcttccgaaaatcattcatcatgagttgaagctaacacctgagatgaacactgttgaacatttgttagatcgaataatcttttcatcactcactatccgcgtaagtcgaccttttcacgcttttctccgacttggacatagcacctgactgatgatatcctctgtcaaataaactcgctcagttgtagcgacctcactcgccaaacaggtctgttcaagtactctacagaacgatctaccttctacaattttttttctgatgatctttcccaatatagcttgaagatgtttcgaattgggtgagcgggttcctaatgaacataaaatttcctcttgctcttttgagcgaaattgattgagaaaaacttatcttctgaatgggatgtgccccacagcatatgggcttccgttcgtacttcatcctcttgccattctactcgctcctcgggcagcgcccactaaaacttacatatgacgcttcggataacaacgataacaattttttttccgtcaggccaaatacctcgaccggatggaagtcatgagataacatttctataccgactctctccaggtctagcacgagcgtccttcggagtggaatgtgctcgactggcaggattgcccgatgaagttcttcgggtggctgataagcagagtaggctactcgaggaatctgttcgactgaagattgaccgatcaaggtatgtgatgtgatctgtcttctctttttcgggtgacagagaagttaaatcgagttccgctatcaaatcatcgcttactttgtatctttgcttacaccgtggatgcatgggtgatggattgatcacagagtgagacatatgaaaacattcatccgagttgcccttaattataaaaacgagaaggagcgcgaggaaaaacgagtcgaacacgctggtttgcaggcgggcagagcattgttgaatttcgaacagctgtgatatgtatggtttagactgtgtagcacaaagacactacaggttgcactcgggtagacatgaactttcaacctgctctacgggacacaggaatatctgaagccgaccaggaaacgtgtcgacgcgtcaggaggagaggagagcttatatgacgcgtttacggcgcgtcaacagagcgtttcgtgcgtctgtgcctgaatgaaaccgcatgtgtgcctgtcgatcgttactccgtcggcctgtttaactccttttctttttaattctttttccttttttctttgctgctactttttctcatttgttctggttgatttctcttcgtcctttgctcgatcgtccccaattcttatccctctctttccctcgtttccttcctagagtgcttctgaaattcttttcttggtcacctaattttgaatttaactgatttctgcatctcctgatatcttctcctccctatcatctctcatcaactcttcaatgatggtttctccggggtgctccctcattcttcttggcggcctcttcataacagtcgtccaggcaggtatatctaccttccagatcactcagccctcacaatgtagtccgatgaatatcacctgggtgtgcgttcatgttcacctcttcttcctttcttcgttctttcttcacgtctttttctttgtacactaaaagttcaatgcctttcgttcgtgcctgactttgatttttcaccatctatggctttgtcgcgctcttcatgcatacattcttatcattctataggccctcaggctctatcgtctcgacagaatttaatctgattctcatcccaactacggataatacccaagtactcagcaatatcagtttcactgctaccgataacaggttcgttcttactcttccgatgataatatcagtcaactcaagtttgaccatcagaacgtctctcgagtttatcaagaatctactctgtttcggtgtactaacttgtattttctccttccccttctacactctataacacactccatagctacacacttcctgctctcccacttacaaagaatgtagaatttatagcgatgctccaagatcggaccgacggggcgtcccaaggaagagtctctcagatcgttcggacatctgactcagacggagcaggaacagattgcttggcagacctccctcactatctggattttgttggtcttttcaaggctctcaatttcttcctaactcaacctagaaccgcgcatgctgactggaccattcatctaacaggtcttctcgatcgagtttgaaaatggcacctcaaaccccacgcaatgtgctacaacaaccgtatatgattggaacaatgcaaccgcccctagtgtgtactttttttgctcattcttttatccgtttctgcactcgtcctgacgctcgacctgctgtcccatcgttctgtaaaaccagttggaatctcggggcttattccgggaggagaatccttcaacgttcccattacggacatgaccaatcaacgggcggattggaccactgcaatccctgctggaaccaatgtcatgttcatcatgagtgatggtggacctcggtgagtgactatcgccctcttgctgtaaatttttcaaaactgatcagaccatgcatgttgctctcatgctctctgaatgattatagaggatctggaggatctactggtatctacaccgtcgcggccggatcaagcagctgctttacagccggggctgagatctactcgtcccttcctattggtgacgtgtaagtccttcactcttctgttcttggctttatagatatgaaaattgacgtcgcgtttgtaatgtttgcgttgttgttctcaaatctaggccgacgactcaaacgtgtgtatctcttcacgttgtgttgaactctcagaatcggatcccaccaaattaaccttgttgaatctctcttcaacacagtgtaaccacaacggtgacagcgcctgccgggagtccatctggttcttcatcatccaccacgggagatgtatctaggaagacgtcccatgtaggcgccattgctggtggtgtcgtcggtggtttggctggtctggctatcttggctggtctctttttctggttgtccaaaaggaaggagaagaagaacgagactgagaaagaaggttagttttttttgtatcccttctcgttcttctttcgtcctgaagattcaagagttactaatcattgaggttgatgtgggcttactcgaaagaaatgatgggtgtggcacgaccatggagtcctcctgtgcctgaggatcctgagaacgtccgtacatcggcctatctatccggagtcggagttggagctggagcagctggaggtgctctcggtggtctggggaatcgttccagccaaccaggaagcatctcttctcctcagtttggtcgacagaatgaatctttcgaaacaactcaggcgcaatatcagcttacgccgttaaactcaccattcggaaatggtacatacccaccttcatccttctcgcacatcccacctggttcggtaggcgccaacacgaccattgcatcgacagacagtctttcggaaagccgaaggtcaacagaaaagagagcattcacgtttggtggtccatcgagcaataggctcagtggaggatatcgaggcgtgccaacagcaggcagtgatggtgaagatgaagatgtgcaaggacgaggcaacgacaggggtgaagaacttttagatactcgaacggaaggctcatttgatcaggagccccatcagtcgcaacctcggttcgtgagacacgaagacgctggattgattgaaggcgctcacgaaagtgtaccgaacgataatgaagtggtagacctaccgcctctttgtacgtctcttcttcccctcttcgcgatgaaccgatcgaaatcttatcgctttcttgttttttcttcgatcatgatattatagatcaagatgctggaaggaatcaagttggcacacagtctgttgttcgagatcaggcaactatcaacagctctggatcaaaatctggccttcgatagctttagtaaccgggcaacttcataatctctctttgtgcgcttattccattcaatcttctcgtttcttgttgcgtacgtttcttcggcgatcaatttgatcgcgatttctcttcctatacccttcctaaactcctgcatatcgcgtttttccaagcctccagttatcatcttgtatctttaatttagctttcatctatctgctttcctgttgattgcttcggaccctttgctctggacagtgtttctctttgcatacacattttctatcttcgttataagtctcgataatcctaattccttccagtatccatcatcaccaacatcttgatgtgatatctgtttgagagttcgcacattcgatagatgttaagtaatcttcattctgtttgaatcaatagtaaaaacccatgtaattctccttccttctttctgttacagagggagaggatcgaactatgtgtccttgaaaggggagggagaaagaaaagcaagagaacgatgcacccctttctttgcttcgaggccctcgtttcaagtttgaaatctggggaagttttaattcttcatatttgatttcggtcaagattattctcatgagggcgcacgataatttttttcccaatttctcgacttctcttcctcaatctttttagattccttttctctcttacgggggaggggctatctcatgtgatatagacggttctgcacatctttccttctacgtctcttgtggaacgtttggaatcgaacattcatctccgaagttggacaagaggatctatttcgagatttttccacgtttcattctatagccttttccttttggggatagagacgatgggaataggatccgagaagaggagagaaaagtcgatgatatcatgcatgtaacatagcagatattaaagaacagagataggtagcagacagtgatcatcaaacaccactaataccacacgagcaagaacagaagaagatgaaatgtaaaataaaaggatgaacgatggtctagaagcagaaatggaaccaagtgaatcacagaaaggaagatctaagaaagtaagggccacaagaaaaaagagtttgttttatgaagaccgggaaagaccggatgatcgaagacggagttcttgtgagctctgtctagtcttttcattactgagtcgagtcatggacagttgaaacgacaacaggtgagctgaatctgtgtatatcaaatattgagaggatgtgggaatgaaacgtacatggtctctccaacttcccttccagtcccgtgtcctacatcgtctctttcccctttctcgctaacctccccaacttctatgacaatctgatcttcttcatcaaccgaaagctcctcatctccttcatcatcactcctcgtgtcttcagctccggatccaacaacgactttccaggcgacgttgcagatcatggcaaaccagatacacatcaacacccagagcacagagagcaggacaacgaagaccttgtgggccgccgacgtgaaaggctgacatgacacaaatgaagtagacaagaagaaacagtaagaaccaatgaactccttttcatgcgcgcacgtttttatcgagcaatgtgaatctagagagaagatggctgaccagatcccagggccccagttgatccctgttagaaattccgtccggcccaagcaccagcctggcgcaatccttccagatgctgatgatcacaaccagtaggccgacctgcctggtgatcaaccaagaaacgagaaagagaccaaaggtgatgtcggtgatcagtcggaaaccaagatacttaagcatcttggctgaggagagcaagatatcggcaagatctagtaggacgagaatgacggttctgagacaaataaaggaagtaagaagttgccattagataagatttgtatgagtttataatttaaatccgccaaagaaaggaagacgtacccgatggcagtcatatttgtaagataactaccaatgaccaggccaatagtgatataatgatggctgagcatctgataatggtcctttcgccgagcctctatgtttagaatgagaagctgatggaaccagaacgcaagcctggtttaattcccatcgattgaagtgatgaatagagctaatgatgagcacaaaaacaaaaacaaagaaccagcaagagtatgcagaccagcaatacgaactgagtcaagtagtacgccttctgttcccatgtcaaggtggtttgtggataggatgtccatatggcctcgaaatctatcggaataagatgacctggcctgtaagacgaagaatttaagaacacactctgttttgacgattatgagcatacacccgagtagaatggtcagcaagcacagtgtagtgtgaaagaagaatgaacagagttggatgtaagtactcactaggccaaacggccaatatacgacataatacaacagactccagccctgttcggcaaacctgacggcctccttctttctcgtcctcatctctctctccccagccttcttcaacctgagcctatcttctgtgctgaatttgcttaattcatctgggtttagttctagagggacatccctatgaacgatccagcgctcggcaaggggtgcaaggataaacctcataaggacttctcgggttacgataaagactgcgagtgagctaacgatcacagcaatatctttaggtcctttgacataaagtggttgaactattgattgaaaagatgaatagtatcctttaaagtttgttgttgctgtcgttgagggtacggccgatgctgctgctgctgctgttgccagagcggttgcatttctggctattgttggatatgatatgtgcagaaacgggtgtgaccacgaggccagcgacatggtgaaagagagaaagagagagaaagaacaaggaatgtaagagcgagaatggccagctaggacaccgaggcagaggtatattgagaacaccaggagatgatgaaagagaaggcaaaagcttgaaaacgattcgatgtcgggcttgcgcagtaatcttggttatttgtgattgtgcgggtcgcaggcttgtgggtaacgtgaggggttacagtcgttgttacttcacttgactatgtgtgtcggtagaaggactgagactcctcttgtatgttatcgcttggtttgcagttcactggctggagaagattctctgcaaaaccacacgataataaaaacaggttggatgaggaacgtggatacggcgttcgcacaagattttcagcttgggaaatccttgtcaaggaagagtgaggtcgtccctcttatatcagggttccttgcgcataaaatatgagacgagctaatacatatgaatataataataactcaaggtcataaggagaggaaagccaagtgaagcatgaaggaatgccaaacaagatgatgatgcagagtaggagaagaggcataagcaaagagaacaagcaggacacctagtggtggtcacataagtccagagtacgtactcataatcgtaacgacgatgattatgaatgttacggattacataagctggaagtaacttgatcattacctaagctagcgtacccccatctttgattgcctctacggttccatctcttgagcctcgacacccatcatacatatcggcaaaccaacaaaacttcatctagtttctattctagcacgttgtactggaaagatggctacaaagtatgggactgtgtgcttgtgtcgtatctggcagtgtcaatcaattacattttttgttgactagggtcctggtctctcttcctttctcctatagttctgtcaaattactaggggtcacccctcctatatcgacagagccacccaaactaccagagatcaacgcgaccaaaggattgatggaagaactccgaaaacaaaaaacatttgaatcaaaggaggaaggcagacttaggttggtatttccctgtttctcctcgagagtgagctataaaaataaagatgaagacaagagaacaaagaataagtttgaagcgtgtcggacgttatatcagcttgggagtcgccctgttctcaataaagatgtccatgctgattcatgtgtatgcctgtatcctggctttccttttctttactcagagaaaaacttctgggatctatcctttccctcgtcaagcaatttgtctatcgcgcctcgatagcaaaagggctgtctgaacaagcttcacgtgaagcaggcggcaagatcttcacttttggttcctaccggtccgttcgcccttgtctctttggatcttttcatgtatcagtgctaatagatggatgggcaattgaaatgtaattgggctggaacacctaaatgcttatatgtgggtgcgaacaaatcaacaaattggatgggcggtgcgtgtgtcgataaaaatctacatacctgaaacaggctcggtgtccatggaccaggatcagatatcgattgtctgtgtgttgtaccaaaacatgtcatgcgggaggactttttcaccatctttgaaggcatgctaagaactctgccagatatgggagagatcgcggtacgcctcttgtcgtatcgtcataggacgcccagcttcctcgacgaacgatgaatataatctctgataactttgttttggtgttgcctgatagtctgtcccaaatgcatatgtgcctttgattacggcagtcatcgccggtgttgacttcgattttacctttgccagagtcatggctcctacggtacgcatatcttctattatatccggtcatacaattcaaaaaacgctgactcaaaagtcaccctcttttgcttggatctcgtcaggtcccggatgatttagatctctcagatgattccatccttcgaggcatggatgaccaaaaccagcggtcgttgaacggttcgtcgcgttctaaatgcatacgagcacacaaagatatttactcaaagaatgaaatctcaatactgttccctctgcttctgcactgtatacaggttcgagagtgacagatctgatcctccatttggttcctaatgtcgacgtctttagagacgcgctccgggccatcaagctttgggccaagcgtctgttcttctgaactctttctacaatcctggtcataatattttctgacattcatccttgggatccgtctttcatctgcgcaggccgggcaatctactcaaatgtgaacggttttctgggaggagtggcttgggcgatgttgactgctcgaatttgtcaactttatccgtccgcccaggcagcgggtatcgttggtcggttctttgcaattttttcagcttggctctggcctcagccggtgattttgaaaaagattgaaaacggaccaccgagtatgcaacttaaagtgtggaatcctttggtgcgctctctttactctgatcttgagattggttcatataaattggagaagaatcaaacttgacgtgtttccattttctgttcatcctcagatttacccgggcgatagagcgcatttgatgcctatcatcacgcccgcttacccatctatgtgttcaacccataacgtgatgcactctacaaaatccatcatgacggccgagtttcgcaaggctgcagttatcgtggataaaatcatggtcaaatcatcgaatgacccggctggaggtgattggagtgaactgtttgagaagcatgatttcttccaaagctatcggttagtctgtttctctgttttgaaccgtttccttctttgccctgtcgggtgtttcgtctatcgagactgaacggcttctccttctgtgatcgccttagatactatcttcaaataatgtcttctgcttccggattcgaaacccataagaaatggtctggtacggttgaatccaaactcagacagctggtgatgaagcttgagaatgcgggagaagctatgctcgatatcgcgcatccattcgtcaaaggattcgagcaggttgcttactgtttgaatgaggatgaagtcaggatggcagcccagggagaagccactgaagagatgaaagctagatcgaaagagtcaattgaaggaaaggaggcagagggtgctagagcaatttggacaatgacgttctatattgggttggaggtcaaaccgaaacaacgtgagtcgttcaatttccccctttgtttctctaccggacgccaggaatactcacctctgcccaacctacttccttccttttcttcaagcgggggataagaccaaacgtaaactagatatcagttatccgacaaatgatttcatgaagcaggtcaagatgatcgatacgttcgaggaggctactatgggtatcgtgatacgacatatcaaaaagtgcgtctcttttgccttcctcgtatcaagagaacttttctcgcctgttacttttttttgtcgcgttgtgtacatatggttctttcatctgacggtgattacaatcaatgcttgaccttttagtgttgatttgccagaatacgtatttgaaggttcggccaaagcgccgccaaaggtgttgaagagaattcgatcgacaaaggttcgcttactcacgagtgacatgtcatgtttttattccccattccaatcgatcgtgatggactgactaagttttgggaacccatagacgctgaaacagcgaacacgagtcttacctgctcaaggcgattctacagagtctagcgagcaacccactaaaaaacgattgttcgttcttctacctttattattcactctcttgtatccttagatctaacaacaaatcattcgcttgtacttttgatcatgcttggtttagatcatcatacgtctcggaaacatcgacgccaacagccttccaatcacaggtccaggcgatggttgacccgtcgctaccccaaccaacggcggacgcggcgtcgtcctatgcttctgctgagcagattggaacaccacctatattagcagggaccgtcactgatggcgttgccgttgatcgagctacatgattaaaccatcaattgagaaagaaaaagaaagaaaagacaagaaaaaggatttacttcccttttgaaactgataaaccctctgagaacgcacacacgattacggccaaatcggtctcgccttttgctcttggcctcgatggccagtatcgaatttatcataggtttttagatatcttggcttcatcacatcgttcatctttccttgctcttctcacgtgcacctttccatctttttcttttccttattttcttttctcccctctcttttttctctcggtgtctctctcttcttcaatgtagttataaacacgatctgaatgtctgaccgaagcgcaaacgaaagatgacaacatattcgtaaacatatataattcgatcgtcttgcaagaagaaacggacagaggtgaaattttgctatcgttactgatcgccgtccatcttgctagctctctgtactgagaagtagtggaaacacttcaaggcttgacccaacctaggccgttacccaatttcaggacgttcccttccttttccatttgtccctcgtctatgtattcgacccttccgctttcatgaatgccagcatccaaccctctacggccacccatcagccgtctgggatttatcgcgcctaacatcttcttgaacgaacggtatcgatgtctggcgagtttgtgcttcgcacaccggactaggagctcaggcgggataggtgtcctttctcgtttcgcagcgttggcatgaaccttgcgggctctggctagaaggtctttaaactgtggggctagaggggtttcaaaaatttacaaggaatggtagaaaaagtaaagaaatcaaaagatgagtcagactttgtttcaagctgattgaaagggagtgcttttctagacgcaggcagacaaaacagagggagagagagaaaacatactctgaaccattttcttcaggagtttatcgttaggatttgacttgtaatccttgaacaaggacaggacttgactcattttcgtatagactttccaccgcttatgaatgatcattgaaattgcgtgaggttgaggaaccatcctcggcatgggtactattaaagtacagaaagaacgagatgaacaattgatcaagaggataagtacggctgatagggagacatagtgaagtacaaaatgtacggacggttgaacttggtagcttgcataatctctccagttagtgttcctctggttagtgaggcgcccggaataggtcctttcgtctgttcatgattgacaaaccgcacgatcagacatgaacttgtctcttccaaaagaagagaacagcaacaagaagaggcctatgagaagaagactgaatgactagacgaacaggttttttcaactctctgacaaacatcctcatcgacctcgaccgactctgaacccataagcgtctctcgagcgtatctatatacgacaggtcttccctcctgttctgcaggtttttcaagagctgaagagtacacaaggtggatgacagacaaacaaagaacatcaggatgtgctctggaagaacggacaagaacatataagcaacataaagctaaccatccatccttccctaagtctaagctcgactgatggacctgtagccactcttcctctggaaacctctgagcgtatgtaattccttaacgttgtgtgcttctttgtttcttggagcaagcctctgtagagcttccagagaaactctcttctgaaaactgtcttggcgtgttcagcctcttcgagcgcggtctttgaaacgaccggagcagccggtgcttcttgacgtatatgatcaatatacagataatccatagcttccgacaggggacctgggagcacggtcattaaatattttagattcggagtcacgatgggtttcacgagcggctgggccggtggctttgtaactcttggacgtaaattcttgatccatggaggtttacgtgcgcccatgttgaggttctgtctcttgttgaactagaggaaggtgaggtatgagagcatggggaatggagagggtagcagagagtttattgaacggatcatccaagggattcccccgggagggggggtagtaaccggatcatattcattgcttgacgtatgttcttttgataaaaccattcattctgtatcatcaacccatcgtctggcagtcttacccgctgatgacaaccaacacacgtacgcttgagaaggttcaagcagagatcgctggtctgcagactcgactcgaggcgctcaggctagaggctgaggctttatccggaccgagtggcctcacaaaaaaacagaccggacttccgctggaattgattgaatatgcaagtcggcatccgcgttctgtttagccgtggtgatcgttgcttggaaaagactgctaatctttgaattcttcttttcgaggaattcaatagaaacgatatggccgccagatgattctccctggtgttggtttgtcaggtaaagacgataccgcgcgctctcctgtgcgagaccctctggatatgctgactctggatgcttgatcggtttcaacaggacaacttaaactcaagaatgcgtcggtgctgatcatcggagcaggaggtttgggatgtccggctctgcaatatttggctgctgccggtgtaggttggtcccagcatctcctccgatgcgagtggggatgatatgctgaaagtcattcgacatttggttcgctctgacatccgtcaggtcatatcggtttagtcgatcatgattctgtagaatcttctaatctgcatcgtcagatacttcactctacatcgagagttggctggctcaaggtggattctgccaaggctgccgtgttggcgtgagtgatcttgtgaagaaatttctctggactctaatcatcttgtctttgggggtttccccaccaaaaggcatgaaagaactagcctgaccggtttccgttatgaatcatacagaaacaacccaaacatcgagatcaccacttatcccaccactttcaatccatccaatgcgcttgcccttctcgagccttatgctctggtgttggactgcacggatcgaccccagacgaggtacttgatctctgacgcatgtgtgctggcgaagaagcctctgttgtcgggcgctgcgttgggtatgaacggccagatggcagtgtacaacaacggaccggacagtccgtgctatcgatgtgtctggcccagggtggctggtggggaggcaaagtcggcaacttgtgacgagtctggtgtgttgggggcggtgacgggtgtgataggtacgatgatggctctggagggatgtaagttgattcttggactaggaggtgagggtttctttctttttcttttttctttttctttctttctttccgatcgttttttttagcatctgtgtgtactgacgttttgagatcatcccggtgattgcctgctgcttctcctccttgttcttttcctctgttgggctctcttttaatttaaaaaaaaaaagaatcatcatcatcaccctcatcggacccttcgaaacttctcacgttctccgcgctttcatccaccccgttccgatctttcaaacttcgaaaccgacagcctcactgtcggtcctgcggcgatccgtccaagggggatcgaaaggaaggaaagatcggagatttagaaaacgaggactacgaggcattctgtggcggaccggatgtcgatagagatgccgagggcatgcagtatgggtcggttggaaccgggctgaagaggacttctgtcgtcgtaagtttcctccgttcctcagtttcgtcttctcttctccctctccgaaaggagggaagagagagagagaagagaaaagattcactcgggaggttcccttggaaaactcacgttggacccggatgtgggcttgagggtgaacaggaactgaaagcagctctgcaagacaagacccgttcgcttcgtctgatcgacacgcgttcgcctgaagaatactctattgtgtctgttcccggatcgatcagtatgtgctccgtccgtgatttcgttcatcttgttcagcttttgactttgccttttcttgcctttttttttcttgtttccttttgatctcttttgctgacacgtatgatagacatccctctgaaggatttcatggcggcccctctggtccacataaagtcgtcctctctgcctaacggtcaggccggaagcacgccgaggagcacacgctcgatttaccttatctgcaggagaggaaacgacagccagcttgctgcccgggcgctttccgacgcgttaactctgtctgaggcatccaaccctggcggacccgggcacgcggacggtcagctcgaggtgctcgatgtcagaggagggacgaacgcttggggcaggatggtatctcgcaggaatgagggtgaaagcgaagaagaaggcaaagaccgggtcgattggccagagtattaaagataaacagaatacaaagaaagcgatgatcgatgggcgtttatataacggtatgaagacgacgagcgtcggtttgatctcttggatggctgtagttaacaggtctatgtttgatgaggaggagaggcaagcggacgaatacgggaaaggaagaagaagagccacaaaaagtgcaagacagacagacagagaaagaaagaaagagaaaccaggtccctggtttcttagtcgatcggttcgagttccctcttgacgatcgtctccaaccgggtttgaaactgttggatgtactccctgtcgaccacaccatcctcccatccgacggcgatctccactccacccaaatcctcgcacccgacgaccgagagaaccaacgcggcgcttatcgggaggggtgcctgtgtaaagacaagtcttgaaggttcccatcgggcttgctccgtgtttgtgcttgcgctctcggccgggaccgaagttgaggcgagagaacccagcgcgagtcgaacggaaccgaggttcgacagttcgagactgtgttctctcggttcttccgtctttgcctttagaaacgagaccatccctgtaggcggcggggccgacgaggtcggcgccggctgttttggcccagagaccagggagagcagcccccaatcggatatcgcatcatcccaaacggcccggtctttcgaccacttgttgaacttgaccgctctctcccaaaggtccgagctcctctcggccggaccggattgtgacggtgtatcaccgggggagggaacgtcgtacgtgatcccagcgacgtacgcccctccgagtccaggggacgtcggagaaaggatcggtcggagattgacaggcagcatagtcctcagcggtcttctttccgggtcgagcgtctgaatcgcttcggtcaaagcggcgtgtaggaacgcggtgagtgtcacgcctcgttttctcgaccgacagacgatcgaccggacggtgtctggagagagggtgatcgtcctgacgtgtttctttcggggatgaggttggcctgatgatcggtcgcccgtccagatggacggctggtctacagggcggtaaccgagtctagagagaatgcccagaggggaaggaaggagtggcctgaggatctgttggagtacgatccgggcaatcttccctacggacggtttcgtagagatcagtgattccaagctggggggcaagcagggatggttgttgttgttgttgtcgtcgtcgtggccgctggatggatacactgtctggccggatggtcggagggtgagggtggaaagcgattgggagaacgaatgggcgacggtccaagcggatagcccgtcgaacagggaatggtgtcctttgaacccgaccaccactttcgtcccgtcctcggcctttccggtcatcggagtcagtcttgtccaaatgattctccacggagggatgacggtggattcgatctgtaggtcgacagtcatcatccttactagcgcgctgtcaaagctgtcctgctcaggggtatcggaccccgattccgccacctgaacgacgacgtcctcgagggagatctttttcagtcggctcagcccgggggacagggtgtggatgtctgtgaaccgggcgaagagcacagggtgggtctcgacgagggtctgtgtggctgattgaaggttggataggatggattgtgaggagaggacagaaggatgagagaatgtgaatgcgatgataggagccggttcggacgagatgagggatctgctccgggtgttttggggggggagagattgagagaggtgtcctttcggagagagctgaagaagaaagagatcctctcttacctggacaagctgtatctctcacagagccccagctttcgttcctcgatggacgtcattctgatctatctggagagcagcagtatgtcagaacagaggaggagagagagaggaagatggggaaaagatgggatgagagatgaaagaagcaagatgcaagaagcaagtgactattgatgacgaacgactaggccgcggagatgtttatcgagaaagaaagaaagaaagaaagaaagaagaaaagatagagagatcatcctatacaatcccacccaccaacacttggttcggtctttcctcttccttcttgcgtctcccttccttctcgttctcggcctttatctgtgttgtgtatagagagaatagagtgaccagatgaggctacctttcttcctgaacgggttcatcccgtttttactcttggcgacgtctgttctagccgccggcgactattacaatgagcttggaggttcgtccgtcttttcttttggctttctgtctggctcggaagggagcaggaagcagggagactgacggaacggtatgtttggttgatcgggcaacttctagtggataggcaggcaagcgagggaacgatcaaaaaggcctacagaaagctggccaaacggtttcatccggacaagaacaaggatccaaagagccagcaaaggtttgctgacgtgtctcatggtgggtgtctttgggttttatgttctgcctggggcggctttatatatagagagagagggagggaaaagagggctcacttgtattccgaactgtggtctcttgttggtggggatgtcgatctgatcccaatctagcctacgaagtactgatggactctgaggtaaggttatctgagcaagacaatggaggaagagaaaggagggaaagaatgctgaagcacgatgttctttgggaacacgtctacagaaacgagagatctacgatagatacggcgaggaaggactgaaacaacgacagaacggccagggtggtttccggaaccctcgggatatgttctctagctttttcggcggggccggcggtaagtttcggactcttgctcttttcattgctggctgggataggtgtggctgtgggtgtgaaagagagtgcgtgcttatcatgtgcatgttgtccgtcaaactggtttccctatcaggaggacaagaggagagaagagggccgggcaagttgacagagatcgaggttgacctggctgatttctacaacggccgagagattgaggtttgtgttcttttggtctgagagagagagtgtgtgcgtgtgtgtgcgtgcgtgcatacatgtatagtgaatgtttaactgattgccttttacatttagttcgagatggacaggatggtgctctgtgatcactgtcggggaagtggggcggcgacggacggagatatcgtcaagtgcacgggctgtgggggtcaaggagtgaaactccaacgggcccagatctttccagggatgtgagtggtgaacggtcgagagagaatagtcaagcgaggcgcttgacggcgtagtttactcatccgctaactttgtgcgcgtgttgtttatctcttgttctactgccacccccgctctcttaggtactctcagatgcaggtgacctgtaacgattgcggtgggaagggtacccggatcaagcgagcctgcccacactgtcggtctgcccggacggtggcaagtcgggtgcgactgtccgtgtatctgccaccgggcgcgcctgaagggttcgaggtcttgtttgacggggagtctgacgagagtccggactgggagccgggggatgtgttggtgagggtgaaggccaagcagtctgacggtcagggtggttggacgaggaaccaggctggacttgtttggagggaagagatcggtgtggatgaggtgagtgtgtgtgtgtgtgtgtgagagagagagagagagggcgtgtgtgattgtgcgcgctaaccatctagtgtgtgtttaatttattccacacaaaaacaggctctactggggttcaatcgaacggtgttccatctggatggacattcggtggatgtgagtcgatctggggtgactcagcctgggttcgtccgggtgattccttcggagggtatgccggcatatgatgggccggcgggtgatctgtatgtgcattacactgttgttcttccccgggcgctttcgtctggtcttcgtcagggtgagtctcgcgaggatttttctttttcttttctttcatgtgtgtgtgtgtctgtgtgggcgggtggactgtttgattagtgagtagagtgttgctttattgacacgcacacacacgttgtgtatgctttttctcgtgctctctctctctctctctctctctttctgtgtatagatcttgagcgggcgttccagaagaagagccacaccgggcgagacgagttgtgaacc

SEQ ID NO: 690 - DNA, 1343 bp, Xanthophyllomyces dendrorhous
  misc_feature (787)..(796): n is a, c, g, or t
gttggatctcttgtcccctcttggtcgcattcctactactactgctactgctaatactaccaccaccagcaccttaccgatgaacaacatcctctggctcacaaccctggcagccgcctcggccgtcctcccacaggcaagcgctcactccagcccacggaacatcgtcaaccgtcaagcgatcaccaccaccagcaccaccatcgccaccagtgtggcagccgccccgacggtcatgccctcggaggttcccccgttgagctcgttgacggccagcatgtcaaccatcaccgtcgcgtttgccacgccgacggctggtgcccaaccgtctctgagcggtgcacctcctcttcctacctgtcggtctttctctttgtctctcttttgcttttttgcttgttttgctgctttccttctcctttaccttctccttctcctccgtctcttcctcctccttcatctctttcctttcccctgccccaacctctccgcgcttcacgctgccataactgacaacccaaacgatcacatcaaaacagggtcctacaccgccggcgcctatcccgcacagttcgtgaccgtcatcatcatcatcatccgccaagcgcacaaaagtgcctttaccttgtgtgatctcacacgcgctcaccatctttgtctctctctttcctttctgcttttctcttctcttgttctttgaaaaaataatataaaaaaccaccccacagggacaagatccctcctaccaactcgtacgtcgactcgaaacgttctctctctctctctnnnnnnnnnnctctctctctctctctctctttttctttcttcccttctcttcccttctcttcccctacccaaatcctccgtgctcgtcaaacccagtcaataacctcgcgcacttgctttcttctctcccgcacccccttgtccctctctgcccttgcacccccactcacaccagctcccaggtacagggttggatcaacgctatcgactggacaaaggtcagtcgcaacccatcatcactccgcatcacccctctcctcaagctaactccaacttccaactccctgtccctcacaggtccccagctacgccgccaactcgcccgccaccactggctctctctgcgacaccaacaccgctgccgctgcagatgcctctcgatggtaagagcgcgcgcacttctcttctacctctcttccatctctctctcgtttccctcttgactgactcatccggcgatcctcccatttcgtctcgcctctcttctcttagctgggttcgttctttctttttcctcgtcctctcttcttcttcttcctcgactcgactcgttacac

SEQ ID NO: 691 - DNA, 3663 bp, Xanthophyllomyces dendrorhous
ccacagtggagttgcggtcagtgcaccacgagcaccgatatcgtcgactgttcccaagacgacacctggggtctcacctttgatgacggtcagttttccttttacctctcaacactaaccaaagcaagccatgacatgccaaactaaaccaacaccctctcccactcccatccacaggaccttccgacatgagccccggactgatcgattatctcgacggaaagaacctcaaggcaaccttctttgtcatcggatccagggcattgggccgaccggacgtcctccgatacgagcacatgcaaggacacgagtaagtctcgggccctcagaattatgccctcgcttcagctcgctcatcctttgtcctctcttcttcccctacgcaaactctcttttttttctttttctttttcttttttttcccctctccagaatcgctggacacacctggtcccacatgccgttgaccacgttgacgaacgaggagatcgttgccgagctcggttagtcccttttcttgctctccctttctcttcttctccctccttccccagcgcacatgctccgccccacgccacagctatccttccagtccaaacgtactcatcccccctcgtcctcttgcgcaaaccgcaaacccaccaccgccacaaaaggatggaccaagcagctcatcaaggacatcatcggagtcgagaccctcaccttccgacctccccagggagatatggataaccgagtccgagcgatcgccagtcagatgaacctgaccccggtcatgtggaccggcgtcggctccaacggaggcgatctcttcgacacccaggactttgaggtcgccgccggactcatcaactcgacccaggcgttctcccagtggaccaccttccttgacaccaacatccccaagatcgaaaagggcttcctcaccctcgagcacgatctccacgcggtgacggtcaacctggcggtgtactactaccttcccgaggccatgaaccgaacgaacccgacgttgagcctcaaaaccgtcatggaatgcaacggaaggtccatcggcgaggcctacaaggagaccgcccagaacatcaccacctcggccgtcgcctctagctccgcctccgcttcggctgcttctgtctcggcctcgacttctgcctctgccgtctctggatcttccaccagatcgaccgccccgtctgcctctgcctcagcttcgtccggcccggtttccggtgccatctggggaacctccgtgtcggccggcttggtcggcgccgtcgttgccctggtcggaaccaccgctctcgttctttaaacctagtttgatcggttcaaggtgttggtcttaattttccttttctttttttttttcttttctttttttttcttctctttttctcgttatctttatatcatcatcattacctcccttactcttgcttttcccttgctctcatagctcgagtcactcttcacttttttcgccctgactccctatccttccctccttggacgatatcttttcgcaattctcttttcgttgccttcttacatcataccccctctcacactctttttttttcgcttctccttcgttcaatgcgcacaagcaagctcccttcctttagtttggctctcatcccatcaaccgaacgtatcctcgaacccggactattttttttttaatttgatttccatcttattccatatatccaatgtctcgatgctcaacaaagaggacgttcgctcaacaagcaggcaccgtctgtctcttttcttttcttttcttttcttttcttttcttttcttttcttttcttttcttttcttttctttttttctgtcgttcgattttctggcaatccatagggacaggtttccctatatttcttgatcctcgaacgtattcatccaaacccctctctttcctttcctttctttttctttttctttttctttttcttcttcttcgcctcgcacgagacgaaagatacaaagcaacccatccatcggtcgcgacgaacgcgcacagtcacaatcacacgcacagagggacacacagacacaaggcggaaacagagcgcgcgcgcgcgcggggggggacaagagagaaacgctaggggaaatacatcggtcggatcgagtcgtacactctttcgtccttttctgaaaacacgcagaacacgactttcttgatctttggtcgtgcgcgcgtgggtaggtaggttttgtcagtaggcgagagatggttataacgaaaacgaaaacgaaaacgaaaacgaaaatgaaaatgaaaacgagggacaaaccgaaggcgagggtttggattctaggaaatcccgtacggctttgaaagcgacgtgcgtcgctggttcgatcgggtctttttttttcgttttgtttttttttttcgttttcgtttggtttattcagatcagatcagatcaggaccatagacagatagaaagaagagccgtgttagtccccggtggatgggggaaagatctagacggacagcaaggtcaaatcaagagaagagtggacttgcagccgtctgtgatgatcatgatcgtccgtttggtccaggtcaaggttttttttgttttttttttgtttttttgttttaaaaaagaaaaaaacgtaaagatatcagcttctcaaaaagtagctctcactcacaaccacatgctcacacaaaccaatcaaaacatggcgaatgaacaaggaaaagaattccaagacgtacaaacaccagtggagatcgaacaaaacccaatgctgccccatccttcccgttcggcctcggtcagacagttcacatagcagtttctcagcagtctctctgcttccgccggcgagtaggacgtatacaccgggccgggagtatgtgcgatccgtttactcggcaactttttttttttttttgggccccgaggacaaggtcgtgttttcattctgtcagcctctatctattccctggttgtgatcgattggacgaaatgagaaagaagaaagaagaaaccacaaacgttgtacccatcggtcatcttgcattctcccgtctgacagcctcccagagacctgcattccttcaagagctcaggaccggccgcccggtggatcgcaccgtccacgccacctcctcccaagagagatctgtttgctgcgttgaccttgggttttggttatggttttggttggatccccccctccgggaacacgattctcaacacacacacacaagtcagaacaaggtatatatctcttcggtccggaaaaaaaaagacgacactcctcgcagcgaccagaccagagcgtcacataaaaggagacaagagggaaagaatgaagaacgaacgatgacatcgaccgaaagtttggttatatcgcccttgaaaacagagatcaacgcgccagacatctcgttactcgtgtgctttcttttgtttatttctttgctttctttgcttgttcgtttgttcttttggtagacgggcttctgtctgtattttcgatgggaaactttgcgaaacagtggggaacaaaaagagagagagagagagagagatagacgagatgtaaagcgagcttgatggtgaagatggttagttacattagatcaatgacatcatcacgtgtatccactcgcataacccaatct

SEQ ID NO: 692 - DNA, 42843 bp, Xanthophyllomyces dendrorhous
tcgttttgtttcctacaaaatatttcggacaatcagacagcagagagaatgtggaaccctccggacgtcgctctttctgtagaagcgatggcgagaacctataggggtggtttccgtcattaaacatggtcaaaagagatgtcacaaccctttcaccaaaagaaaagaagaagaagaaaaaagcgcaagagacaaaagacagaggcttaagaaaagaaagagactcacgtcgtgtttgggagaccaggcaagagcgttggtgacgccgcccgtaggaatctttgccaacaaggatctttctgtcgttccaaactattctcgcgatccagaggaaaggagatgaacagaacagagtgtagactgcatcagccgaatagaccttgtgtttaggggggaggagggggtttcaatgaatcggaataaggaaagcatgactaacgatatagaccacgctctcctcgccacccgctgctagcatctctccgtcttgggagaacgagagttgtctgacttcgcctctgcagacgacgtacaatgaagaaaagaaagaatcatcaagtcaaagaacgagatcagagatcgagaaaaaagaaggggaaagaaaaaaagaaaaagaaagaaaaaaaaaacatcaggaagacacgtactgaacatcgccgaaactcttgaggccgacataatcatcggcatcccacagatttacaatcgcatccacccccgctgtggctaaatatcggccggtcttttcgatcccgatcgagtcgcaacttcccgtttgtgctttccattcgtacgtcggcgccttggctgattcactctcggaagagagtaacgaggcccacgaacgcacatacaccttacctcctcgggagcaaagaagaaaatcttgacccgatgatgaaaagccaatatcaaagatctgaacattacatggcgtggttttttttttttaagtcttgagcaagcctttcatagtaagaggtaacagaccgaaagacaaagagacccacgatttcgatagcagctccggcgctaggagcagggaacgttctgtccgtactagactcccagctgggtctctggacgaccggctgaggaggaggaggaggagcaacctcgacggaactcgaattcgggttcaacgtcgccaccggtttctgactgcccatcatccttcgttcgaaaaaggaaacgtgttccttgatgtcgctcactgcgagcacgtcgcccgaggggtgatgatctatttgaaacgccggggtgggtagactgatagtagaaagcggcttgatcggcttgagtcgggcgtcaaagaagcacagtttgccatcgcccgtgctgccagaggagacaagctcggtaaggtggtaaggattccattgtactttacttatcggcgcggtcgatgcgtgcggggaagggatcaagtcagagtgcctagggtccagctatgtgtttttggagacaaaagttaggagtgaacagcgtgagaaagcgacggcccagaggaaacgcacataaagacgaacaccagcatagaactcacttacggtagaaccagacgaaccagcgtcccaaattctgagacctcgatcaccacccgtgctactcgacaccaactttcgtccgtccaagctccacgacacacactggaccggctcccggtggccgcccaaaatcggtttcggtttaggccatgaagatggatccggtgtctttagtgacgtgtagagaccatccaacagcttcagtcaaaacgaaacagacgcgtcggagggagagtagaaaggctcgaaacaagactgaccttgagtcctctggattgatacgtatgtgataacgggctcggttgaacaactgaaaggggtataggagcaggcggcgggatctgagctggactggctgatagattgttcatggtctggaaaagacaaggagagtgagggatagaatggaagaagcaatgtctggatggatggatgagctcaagagcttgatatgctgtagttagggttatacgcgcttcaatccgaatctcacaggcttactcctgagctcgttctcaccatgctgtggcatcgctcaaccatgcacataggactcacaagatgatactggagattggcttgagtgcactagatctagagagacgtccgtgtgtcagaaaaaggacggacgttcgtaaagttggctcggtgtgacggtactgaagacctagatacgatgattgatcgcttgctgatctatatcagaaaacaaagacgcaagaacagatagagatgcaagattgagctagatctctttgtagaaatgttcagcatggatgttcttaaactctcaacctactagtgacaggcgtgggttgagcagtatacgaggggatcatgagcgatgtcgctgccgaaggcgatcaaacccggccgggccgaaagtgacatctctctcccactcactcccactcccgcatcatggaagtccagccggaaacccaagctgaatccgatctcgttagcatccaagaagagctcgaacagattccgggtctggtcgagctcctcaaggaccaagcaagagcaaagaacatcttggatccagaaggtctcttcgtctcggttagtgaagctgtttctctttcgttctctccctttccctcttcttaagatctaacatagggttcatggtttcttcatatttgctttctctcatctgttcgatcactgtacatgtagaaactatcgcatgactatctagaacggatctcaaagtgagctagctttgtacaactcctcattcttcctgatgagcctcttccgaacggaaacagacacgtccatcttacccgaactccttttgaattattccttccgtgatttcttcctagtctctcccttgaatccctccattcggaaccatcactaatcaaggaagaatcatcattcgtctctggggagcttacttctctctgttttcgagagtatcgcaccttccttactgttcaccaatgctcgtcagacgtatcgaccgcgttcacctccttcacctcctcacttgactcccttctcgacctcgttccctcactagaggcagaatgccacgcctttgctacctcgaccaaggctactcaagccgaacgtcgcaaggctggcttcgttctcgagcatcacgataagcttcaggatctgctagagattccgccgctgttagacacctgcgtccggaatggatactatcacgaagcctttcaactcggagatcactccaaatcgatggtcgaccggtacggagacatcccgatcgtacttgatgtcggcagagaggtcgaaaaggggctgctcgtcatgacagtacagctgatgggcctgctgagggagcctatcaagctacccgcgttgatcaagtctgttgggtttctcaagcgaatggatgtcctttcagaagatgaacttcagatggcattcctcgccagcagggagagcaactttcgttctcaactcgttggtattgaaagggagagagcggatccggtcagatatgtcagacgatacatcgatttattcagagagaatgtgtacgacatcatttctcatttcactaccatctttctcgaccctcgacctccctcctcttcaaccactactaccgccgccgcttcttcgccatcatctgcctcttcagcacccttctctgaaccaccgagcgttctctttgcgttctctcaacaatcccttgccgatttgttcgccgtactaaacaaatatattccctcggtcgaagattccgctgcgctctcctcgttgctcacccaactcacctactgcgctacgtcgtttgcccgaatcggactcgatttccggtctctcatctgtcaaccgtttgaacgggccgtgttagcgaacgcagagaaaacgctcgcacaggcagaactcggtctagagaacgtcatcagagattcgttgaaagcaagtagatcgcctacaggatggatggtctcgatggagaatcttcccaaagtattggatctctcttcagcctggtcgtcatcatcatccactctatccactagccataacattccaaccacaggctcgatccattctccgccgaactacctcgcttacttcccctcccttgccatactctgtaatgcacacatcaacgctctgaactctctccggttctttgctcccctctctcaattcgaagccttggtcaaaattcaagcaaaatcactcgacagatcggcagaacttataaaagagtactccgagacggcattgtctgatgtcgggatcacttcatcatcctcggctctttcacccacttctcattcgtcaacaccattgccatcatcattatcctcaacgacatcaccaacgataggaacccgtaaccatagaagaaaccccagtgtttcagccgctccgtcagagaaagaacaagtccagataaagaaacttctgagagcgtatggcagagctttcgttgatggtctcggacccttcttacaggtcgggctgatcgaaggtttattcggaggagaaatgggttccaccaaggacgctctcggaagatgggatcttctcaaggggggatcagaagagagagacgggcaggcagggctaagagtttggatagaaagactggagatcgagttgaatccgaaaaagacggaggatgatcgacatcaatcacaggagcaaaagaataaaacggaggagcttgaaaggaagacttcgacggttgatgtaccagctgcgttgacagaggagcctgaagatgtagcagctcaagaggaggaggaagaacccagaataagtgttgagaagagcaaggagagcagggcggatgtaggtgatgaagatatagatcaagaaatccagagattggaaagcaagaatgaagcggtctaggaaggattccttgtttcgtttcgttattgatcattgatgaatttttccctttcgatgttctcctcttctcttctttattcttatcttctcctatgctctcatcttaaggagatatgtgtgggcggatgtgtctccaagcaaaacaggacaaacatgtccacgggaatcaattgagacaaacgacaccactccatacgttcgcggcaaatttagagttgtagacagaatagacatgacggaaatagaacgaagaagagagcacatagatggtcgattaggtagatggaacgtgaggtcaagcagaagggatatttaaacggagatcgtctgttttgcgaggtgaaacaaaaaaaaagcaagacattaaatcagtccttccgatccccctttaccaatgtgttagaggaagagagtgtgacaacgatagaatacttaccttccagcagttgaatccaccacttcctgtgctgactaccgctccggggacctggggcaagaaagcaacctctttgcaatcctcctgatgatgctcaaacaataactgagctggcacgtccaatccatcctccgtcttctggccttcttcatcttcatcttgttcaacagataaatcccacaaagtgacggttccctcggcggcagcggcagcaaaggtggaagtctccgtaggatgccatgcgacagaggttatcggcgaagtgtgccagttgaaagaagctacagggcttggggtgggaccagatgctctgcgacaagatccaccagtaaacaagtcaagaaagaagttagaacaaaagaagacaaacatctgacgagagacgagacaaaccctttgaagtttctgagatcccagactttaagtcctccttcatcaccaccactaaccagaaggtaactggttcccttattccaactaataacgttcacatcactctcgtgagcctcgtccaacccgacgacagatcttctgcccttctgtctgacgtcccaaactcgaatagacctatcagccgagcaactagcaaacacagttcgttctgtaggtgaccattgaagatcttcaacagaagacgtgtgggaagtgaaagcctggttggaagtggtgaaaccggattggttggaggtagtgagataaatcttggaatggatatcacccgtcaacagacgaagtccttcggactctcctccagcccaatcaagtgcgaatccttcagctcgaccgtggttgttgatagtgtaaaccggtttgtcgactacagatcgatccataacatatccaggaacgtccagggattcgattagaggtcgaatatcccagatgtggactttaccggtctcggaccaggaagcggtgtggtaaggaacgttgacgggcgggagcgcagaggtggacgcgataggctgggctcggactcggttgacagttccgacgtgcgggatcgatcggtactcaaggtaggcgtcgtcgtcaacgtccgaatctgcctcagaccctgcatcagagagatctgatatttttgagcagggatgagaacacgttgaaaagaagcttgagtatactttctctcttcttctcacaaaagacacgagatacagaggaagacgaaagaaagaacctaccgtcatcaaactgagttcggtgcatgcctcccatcttcataaccaagagctcattcgagttctccgactcagcctgggttcctatatgtacacgaaaaattgaattgaatgtgttaagcaaatacctctaacgagttcgcgtgtggacttaattgcgaaagcaaacttaccagtaaccacatacgccgtatggggaaactttcttcgctcatctccaagagaatcctaggtaatccgaaaggatgtaaaaacaatatcagatcagcttaaaagtttggtagatgatggtgctagaacggccatccatttttcgagcataaaatacacaaaggacattgaagaacgaaccctcaacacatcaaaacttaagcaaggccactggacgttcattcggtgaagcatctcatacacgctttgatcaggctcaaggacctcatccttctcaagcggtctggatgatcgaagataagtctcaagttcaggctcgacaggatcctcatcctcgaccgcctggtcgacgtgcatggctggatgagagcgcggagagaagtcgatatagggttgagcatgcggatgagaatgaaccaagcagaataaatagaacaaatacacgtactctctccattttcagactcgtcagattcggactcatcgtccctgataatctcttcggcactctcctcaccatcatcaaagttgtcctcgaactctcccatttcatcctcctcgttagttccatcctctccagttgatcgaacaggagcagaaccttcccctaaggctactgatttgttggtttgctcggagattggcccgggggacgaacgcctcttgtttgctttgaccatttgagcgtgatatatcgattgactagagcttgtacagagaacaaaaggcagaggcataagagtcgaacgcgaggggtcaaccaaaatttggacttatgtgagctcagtgaacatcaaaggtgactaacccctcaaattcaaattaaatttcatgaatatttcaaaattatatattttacaaaaaaaaaaaagaatgaaaaaacgaaaaaaaagaaaagaaggatggaaaagggaagctttcttgcctctcgaccatcacctataacacacacgatgtctaccgaacccttacggtgaggcttcgggtttcatcactcgagcttgtcctctgatagggacatattcgctgatttgtttcgacttgaattctacatgcgctttgggcttggttctccgttcaatatcggctctttcgaacttgcttcttttcttcctctgatcccctctcttctccttacagaatactgctcctaggtgctggaggaagagagcacgccctggcttggaagtttgctcagtcagcctctgttgaaaaggtctttgttgcccccggaaacggaggaactgcctcggccgactccaagattgagaacgttcaggtcgcgtacggccagaactttgatggtatcctggcctgggctaaatccaacaacgtaggaacctctttcttgtcatcctttttctccccactgagccagttagactgtcaatagggtgctctgttaacgaatcaatcgcatctgtgatacccatccaatgttatcacccaaaactgatatcatcagatcaacctctgcgtccccggccctgagcaacctcttgtggatggtgtcgaggccgtgttccgaaagggtaaagttccggccacgaatatttatacatgtctgacaaagagctatgcctgactgaccatctcatctgcttgttggttgattcagccggtatccccactttcggtcctactcccgctgccgctcagatggaaggctccaaggcattctctaaaaatttcatggccaaacataacattcctaccgccgcctaccgaaacttcaaggccaaccaattcgaggaggctaaggcctacgccaagtcctgcgagggtcgattggtcctcaaggctgacggacttgccgctggcaagggtgtcctcatcccggagacttgggaggaggtggagcaaggtttgaaggacgtcatggtcaaccaggtcttcggatctgccggtacgttttttttgttgttcttccattcgttctagtcgcaagaattaaacctaaacatacatctcgtccgcttgtagggtctgagatcgtcatcgaggaattccttactggaccagagctttctgtgctcgccttctcggatggatacactattcgagcgctccccggagctcaggaccacaagcgaatcggagatggtgatcagggacccaacactggtggaatgggagcttacactcctgctcccgttgctactcctgctatcctcgctgagattcagacaattttggagcagactgttactggcatgcgaaaggacggtttgtccttctatctcttgctattgtttacggtcaaaaacatctacgtttgtcttatacgttaagctcattcggtgatctctttctatctaattgcgcatcttcaatgttcaggtttccccttcgttggtttgctcttcaccggtttcatgcttactcccaagggtgtcaaggtgcttgagtacaacgtccgattcggtgaccccgagaccgaggctcttatgcttcttttggacgagaagactgacttggccgagatcatgaacgcctgcgtggaacgacggttggactctgtcgagctcagctacaggactggatacgctgtgtctgtgatccttgcctccggaggttaccctggcaagtacacaaccggcattcctatcactgttggcacccttccttccgacgtgtacgctttccacgctggaaccgctatcaaagacggccaagtggttaccgccggtggtcgagtgattgccgtggccgcatttgctaccactctcagagaggccgtcgaccgagcttacgagggagtcaagcaaatctcttttgagggtatggttttcaggaaagatatcgcctaccggttagttcagtctactctccaacagattatgtcatacccagatctgagacttatccttcttatctcttctgtatgcagagcttttgccgacgccgacaagagcgcggataaggagcgacttacttacgcctccgccggtgtggacgttgatgctggaaacgccctggtcgaggctatcaagcctgccgtcaaggccactcgacgggctggaacggacggagtaattggtggattcggaggaaccttcgacctcaagcaggctggattccgagatcctgttttggttagcggaactgacggagttggaactaagctcaaggttgctttggactgtggcaagcatgatactgttggtaagtaatcttattctgaactatagagagtgaagctatactgctcatacagttatacaagtctaacaactctttactctatgggacctcttcttaggaatcgatcttgtcgccatgtcagtgaacgatttgatcgttcagggagctgagccgttgtacttcttggactactttgcgtgcagcaagctcgatgtcgagatcgccgctagcgtcgtcaagggtattgccgctggatgtcttgatgctggctgtgcgttgattggcggagagacggccgaaatgcctggcatgtaccacggaggttcgtttgcattatctactgtttcaaatcaatcgctgcatggtccgattctaaccctttctatccttgacaactcgggcgttctcttctatagaggactacgatttggctggtttcgccgtcggagctgttgagcgaaacttgattctccctacccctgacattcagcctggagatgtcatccttggacttccctcgtccggtatccactccaatggattctctctcgcccgaaaggtcctcgcccactctggcctctcctacacctctccttgcccttggtcgccgtcgcagacgatcggtgacgctttccttgttccaaccaaaatctacatcaagcctctcttgcctgctatccagcagagtctccttaagggaatgtctcacattactggtggaggattcactgagaacatccctcgagtgttgcccaagggaaccggatgtgatatcgatgctgcttcctgggagtggccggcgatcttcagatggatggccgaggttggtcacattgagcccctggagatggccaggacgttcaacaacggaattggaatggccatcatcgtcgccaaagaaaaggtcgacgaggctattaagagcatacagcaggctggtgaggcagaggtcaagatcatcggtgttgtgactgacaaggagggtgttgccatgaagaacctcgaagcttgggcttagtttagaagaaaccaaaaccaattttgttcttcgtctctcttctacataattttttgattcattttggctttttatcttgtacctgggcatcgttcatattcttatcttcttatttgaacttcatatttttcaaggtttattcaacgaacctatacaatcttcttttaccctagattctgatttctcgaggaagaaatatttcatcatggttcttttcttcctgataacagccagagacagatcttatctggcgcacagctttatcacgaggtctgagcgcaagagacctgcgaggatcactgatatcattgacaacgaagacaactctgatcaaacatactttaatgaccatgaaaataaagcaaaagctaccacgacgacttattcctccaccatctcgtcgtcatcatccatttctgagagagcagctgaaggtccaaccttgaacgtttcgctccacttaggatacgttcgtttgtacagagacatgcagactgtatcctgaggattgaggatcgcgtcgaagtgggctttgtagtacccgtgtgtaccaagggattcagtgatatgacccgttctgcccatctttgtgtgcatctggataggtttgaagtaagcgacatcgtctgttcatagcgaggggcaccaaggaaacgaagttgtgtcagtcaatgaatatataatgagcaagaagaggtcaagagaagagagggcgaaccagggttgaagaacatgtatcgaatcgttgctgtcttcttgtggatcttgactgggtgaccggtaagaataattcgcttagcgataattctagtagtgtcagcgttcataaaggatcctgaagcaaccaagataggagctgtaaaattgaagaggaggttagtaaactcaattactgattacgttgtcatagatcgaggctagctgctccttaccttgagagtcgtcagtctctcttaaaagcaaacaaggctgctttccaaacacgataggtccatacgtcgtggcgaccatagctgtaccagctctcaagaaccgttcagacttgtggacattgttcgctccctttcctcctccacgaacatgttgagaatagatcggattaatccggtatcgacggggcccaacacagaggataagaggatcctttgctcgaacaggttcatcgtactctgtgtttcgctgcacgacgaaatgcagaacagactgcttgtgctcatgctccaagagggagaaaagaatgaacggcacagacgaccgatgggcatcgaagactgctttgggaacgtctttgatgtggacttcgacgtggcttccgacctttaagaaggaagcgaagaaaaaaacatcaatatctgtaaacccttcggatctgtaggacggctctgaaagaaaagctgaatgcagacgaacctcaactccaacctcttttccttctttgatgactctcttgcctgtgcgctcgtaatccttgaatccgaagatcttagcgtaatcgaccggcaggttctcatacgggtcccaagggctcgttcggaaacttctcagacctctgtaccgttggaaccgagtcgaagccggaatatgcattggggtatcgatctcgtccgggaaggcttggtcatttcgatcctcgacagctcgagaggcccggtaggatttgagtctgagtgacaatcacgaagatatcagaattaggagtttggtagggaaggttaaggtaaccagggtgtcgaaagagaagagaaggagacgagagaacatactgggcttcctcctcatcctcatccaattccctgaatgcaacgctcgttccacccattctgctttcaacctccacatcgacaccttcttctccatccaatccatccagtcctcctccttggatatcctctccctcgctccctccgtcaatctccatatcatcatcatcatcatcgtcatcatcactgtcatcgccctcttgctcgtcaccctcctcgatccaagcagcttggtaggcgctcgttcccttcggaactctcttgactgtcttgggtgtcgtacccggcagagccggaggcaacatcaaccctcgctcaccattctcgccagagacaggagcaggcatatcatcctctgtaggccaagtttgttcattggccataaaatcaggatcattgagttctgtgagatcatcagccgtctcaggatcaggcttggagagaacagaaggagcttccggatctgtcgacatggaagaggaggaggcgcgagcatgagtcgaaggcagaggtgcggagataatcttgatttttcaagaaggcaaagacattagttcggacacttcagtcgaagtaggcagtggaactagtagcgaaactcaccttttctaccatgaagtctccaaaattgggtatgtggaccagtcgatcagcactccatttcccacccctcaaataacccctgacaaccaatgtaccctgttccgccccctctccttcaccatttgtacttggggtccaccctagctctgtagactcgttgactagccatccccttccgtttcgccaactgacatctttggggataccctcgcagagcgctcgaagtgtgacagaggcatctgaaggggtcgtggtgtggtagactttctgaagcgaagggaagaagtatgtactgaacgaaagaagggattttaaagtagctgacggaggcgccgtaggtggagtcgtagggttcggagactagagagatagtgtgataaatctagatataatcagaaatctcaagtatgcccgacttgaacggcgaagagtaatagagccttacctggcagacagccacaatctcagggactccctgagactggaacgatctcagaagagtttctccccattcactgacatcttcttcatccgagagcaagagaacgacgtaatcagccgctttggcgctgtctagagtagcatagaagtctcctgcaaggggaaagaggaactggagggacgtcttgaatcggggagctctgtttgatcggcggacgcgtcaattgagagcagaatgaaaccaaacatcagagtttactctatgctgtagaacagatgaaccgaagagacacgaagaaaggggactaacttgatattgacaaccccggcttcatcctctttgaaatcttcttccaacacctcgcataaatccttcgcgaatctttttccgttagtgtcctctcccaattcaaccacacacacgattctcggaacacctgctctgccggcaaaaattctaccgtcttgaacgatggcagctcgctttttgagttgaagttgtttggtagtatttcttcgatcctgcttagtctgtgtagtggaaaggtgagaggtcgacgattgtttggtcgactttcccggaagccgaccttttgaggcctctttcagggaagatttcgaggcatggcctgatttgaatggcttgttttgctgcttgagcgtcggtctgtgtgagtgacccatcacagaagaaggaagaggggatgaaagaagggaagggttgaagcttgctaggtgactgtacaaccgatatagttcctaagaaagttgtgagaagcccaaaaaaatcattattgtggcgttgatattcacgtgtggaagcacagccatatcattgctcatacagtcaacatacccgcctgttactcaaaccaccttcgagatcatcatcatcatcatcaccatcagtgcgatcatcatcagtatcagcgttgctatcttcttagaagagttttagaatgcacttaggtagacattcggtatcctctgttcccattggcatattcaatcagatcaccgtcaatcagcaatcagacaccttcgcccttgccactaatcaagggtttcaaatctggaatcttcatcctcttcaacttctggccgatcgtcgtttgtcctactctgtctattcacgtttcatcagacaggtcttattcttattgttctgcttatggttactcagaactaccgggctcaattggccatgcttcgctccttcatcgaacatcgctcgtatttctcttgggtggaggtgtcaatcccttgtatcctctcaacaagttaatcatttgggacgacagatttcaaacacccgttctcgaacttgagtttcggttcgtacatcttagacatcttgactagatctagctttggtacttacgccatcacgcattaataaatgcgacagagaaaaaatccttggtgttacttcccgtcgagggctcctcgcactgtcctttcgcaaacgcgttgttctattgacaatagacggctttggcgaagaagactatacggattccaagaggccaaaacgcagagggaaggaaagggaatctatcactgagtctcaaatacccagggtaggggcgacggacgatcaaggaaagactgtgggtggattaaaatggttcgcagagtgggagacatgtgataaccctcgtggtatgtttcttcgtgttttaactacgtctcttcattgatgaatcatcttgaatacaccatcatgtatgactgcaactgaaaactcctattatgtcatgtgtttctcaaacaatcatcaaaacacaggtcttctggcactatctacgtcccctttgtccacgttactcactattcctggccgtcaacctggacacgttcacctcctacatctgcctccctgtcctttccctctatcctcctccgagtctcccttatcttcaactcctccttattccctccctccaccctcaaaatcagctctacttatcgctcatactcaccctttgagcacgctctcttgccctccctcgggtcggttcttctcaacatcctcagacagagggacactaatccgtgtttgggacggtcgttcaggcgggctggtcaaagagctgagaaggggagccgatcaggccgtcgtttggggagttggttggcttcctcctccacgctccgcagaggatggggatggggatggaaaagaaggtgttatcgtttggagcgataagggcacgattcacgttttcactctggaagaaggaggaaaagtctctgataagggaaagctcaggtttgtctgtatgctacttcgctctgcattttcttcccagtgttgaatacgattcttgttttctactgaaaacagaaatcccaaatcaccctttcaaacgctccaaccgtaccttcctatttcgcttcccaaatactttctctccgaatggtctcatgctcaattccgtcttcccactcgaactccacacgccgagacgctcactcacttgagcccttcatcaccttctgacctaccttctacatctacatcttcaacgtctacatctactgctcagtctgcttcatcagtcaggtccggatcgagcagtacagctatggaggacaaatgtctcgtgagctgggtacaagtacactcttcttctgcttcaggtactgccgctggcatctctaccactccataccaatatgcatccaatccatctctatcattcaagtcacgtccatctacatctgaaatcacaccatcactccagatggaataccaactcatcgcattgacatatacaggaggatactaccgaatcgctctaccttcctcttcttcgtcgtcgtcttctgtctcatcacctctatcctcgtctcatgaaggctctgcctcatcacttggtagtccttcgttacgggaaactgatcgaatcgacatcgagccaacagaatctgggatcaggtctgggtcgaaaggaggaagtagaggttgtaagctggtggagttcagaagattcggacaggattcaaataaaggtttcctaggcggatctggaagaggtagttggaatgagggtgaaaagtggtagtttagatgcttttatcttcatttttcgtccgtctggttgtgtccattctgttcataagttttctgtatttttttcctccatctctcgccttttcgttacgaccacgaccaatttgatgcccttgaacgaaaagaataagaggagagaccatatcatagcttggcatgatcagattcaagatcctttcatcgaacacgctcctctgtcctctctctgactccctccttaacttgttccaagctcttctccagggccctttggacttgacggagacatcgatactgacatagttgttgaatggagggcagggaacgagatgatgggtacggagacaggcctttgctattgaggaagaagagcgcaatcacatatcacctgggctcattcgcgcagaaaaaatatatgtccacattaacatttttctttgatacgatgatagataccaaaaatgcctacgtgagctcgccggacgacaacatgaatatctcgtcctctggaatcgcgtcccattttgatcagacctggaaaaagacaagcgcccaaaacttctttttcttgattttcggaccgatggcatctctttaaaagttccatctatataaattcaaagaagtaggggcggaacggtcagcatcgttatgttgtgtctacaggatagaggcatagagagaaagagtgaacccgagtcgcatccaatgcacttcccagttccggaacgaatgccctgtataaacctataccagaagatgaaaagctctgcttcgattcatgaagtaatctggaaaattcccacgccgactggagaatctcaaccaaggcctccggaatgagacaatctgtcgattctgttttgactgaggcatcggccagggtcttgatagatggtccatcatatttcaggagaatgagaaatagggatggcatctgcgcacgatacagttggttcatgtgaagagcgccacgcgtgggattaaaaggtaaaagatctgaaccgataaactcatacatcagcacaagagagcgcagagaatgctcacatattcttgaagagtctgaatcatgagggcccgatcaaagtcgttcatagaggcagagcacgtttgacgacctgtttcgagagaacccatcatacacggtgcgaacattagagactcttccacaacgtccgtataacggctaccgagactaacgccatacgctagcaacaaccgggtcacctggggattgacaagtttcaaagcatcagagccaagcatcacatcattacttcatgtctactgtacatacgactgaagatgcattcatgaatcctccacagccgttcattctgcaagatttcatatacgtatttcatgaaccagatccgacgtatgaatcagtctcattgaagctctcataataggaaagtatggcttacttaccgcctcacttgaattagttagcaacaaacggttgacgaccccattacagataaccttcgagattgcatgtctcaacaaactctgtaccctcagacttgctacatcttggtgttgtccctcattctccgtacaattcttcgttactgctgcccagaaatcaggaaggagatgcggatgacggatgacgagggtcgaagcgtatcgattaatgagcgccgctaaagaggaggcggcattattgatggtcgagtcatcggtggaagaaacacctttgaaggagtttcgatttgaatgatccgccccataagtagagtctccctaagaaacggctctcagctatatcagtacataaggagagtatgaagcgaagcacaacgagctcatattgacctcaagctgggccactttctttttcagtagtttaagttgtttttcttgctcctccatctgatctctctgaagttctacttgggcatgagctgctcgaaagttcctgatcaagtgtatgtcatatagtgtgagcctcattcttgctgtgcgcgagagatttacgaagggacttacttgaggacgtttcttaatttttcattgggagttcaaagatgagagaaaggggagttaaggacgttctatgctcctgaaatactcaaagagaaggggcttattactgaaattgctcctgtgaaacccattcaaaagaaggcgggcggacctagaacggaggaagaagaagccaatacttttgtctcaattcgtctctatatcatctttcgccggttttaaaaatgaagggagcttatggaaagatagggaccttaccgtccaacccaattgttgcgacgttgcattcgaattcgattcttcctgttcctcaagcggcaaacgatgaggaagctgtctttctagactcatctttctgatcgtcaacggttgatgtgatccgcctgagggatgttcgtgggtggtcaccatagctgtggttgtctctgcttctgtttctgtccttgccggtcaactagacgacataaaagatctcctgaatgaggaaaacatcaacagaacaaagtccaaaacgcaaaaactaaacttgagtgaacaggcaagcagtggactatagagcttcaagaggaaaggaaaagatgatctttgtgagctggtacatgggtaagcggaatgcaatgtgatatttatagtgagaatcagctatcggatgtaagtacatgtatccaaatgtgagtctgcctcgaaagaacatatgtacatgcaaggccaagcgaagaggcggcataggaggcgtgcaagggttcggattgatatgcggagcaacttttggactgcgtgcatgctcggctgtacgacacaattcaactctttcactaaacatattcaactctggtctgtttgccacatgaaagacgggctgattggactgaagcaggcggcatggtttatcagcttataacaaatcgaaggattaaaacggaatcaaccagcaaaagatacaaaaatgcctcgatagcagtaaattaaagtactgagtacaaatagccgcatggaaacgaattacacggcctgctgagcgtctgtcgattctaactctcttccatccccttgatccccttcgacgcctggcgttttagatccaactgaaccagatccttccttctctttctccctctctctacctttatcagagatgacggaagccgacctcgatttcgatccacctgaactggtcttcctcctttcccctccgttgtttcctgcgccagagccgcctccaacagcaccttgaccacccagtccaaccatcaatgatgaagacgacatcgacgagtccttcaacgcggccgtggcggtgacgccgaatcgttgctcgaatgcaattaaatctcggatcaattcttcaatctcctcggatcgtgtctttacacgtaccggctctggctcaacttcagactcggttgaaccgttagtggttgtacttaaggtaggtatcgatggatcaatatttcccaaaagagccagaggcgaggtggtctccgaggtgatgggaagagtagaggggtcagtggctatgtcaaaggtgactgtcggttcggaaactagcaatgtggtagcaacagtgatagaaggtgaagatgtagatgaagaagacgacgagcctccattcgacgatgacgaaagaacagcggctgcagctgccgccgccgtcgtatccaccggccacctacccacataatccaaaacgcctctcgctcgttttctcatctcgcccagtgtcattcgtcttcctggccatctaattttcgaaggtgcttcttccctctcgccatctgcacctctcagtccagccgcgccagatgttcgtttccctctcgcgccggacgtatttcctgctgaagagggtacggcagtagcagtccctgaaccagatggattgagactcgatcggatgacgagtggctgaggagctggtgatgggagaagatgtgttaaatgagatagatgatctggaactccccacgcaaggatagtactattccggagagcggcggcagcagcagcagctacagacgcaggtgaaggtggagcgggaggagctagctgctgggccggtggtgggagtggatcgttgggaccggaggatggacccgggattgatggatcccactcagctgcaacactagagaccgagttcaatcctctcacatcacctccagcagcccaatcctcgttccaatgcgcggaagaccctatcggaggagaccgacggagatgatcgtcatatcccggttctccgggtgtcgagttggaggataatcctttgaagcgaaggctgcccacaggattatttgatgagcttgtcggttttggtcgataggtgtattgattagggtgtttagtggtgactgttcggccggaaggaccgatcgagtgattattctctgatgcagagtttgctgaatgagggtaggatgatgagagcatggcatccagactcgctgattctagtcctgttgatatagcattcggtacaacaagatcagtatgatgcaggaaaaaattatcaagctattgtgcaaacacactcggaaggacaaggaaaatatagatatacgaaccttgttcattctctttcttgactttctttccctttctgacacctgcaccattccctccactacttgtcagatcatcacttccctgcctcggccttttgattcctattccaactccgggaactaaacctccttcgtccgcccctccgctcagatcatcctcaccaggaaatgatctgcgatgtctggttgaagacgtcggcgaaggtgatcgtctgtaaatattcataagtggcaaaacgcgctgcgatgagtcttccttgatttagaaatagagaaagagaaattgttaaacaaagagacgaggaagggatttgaacgaacacagagtcttcttcctcagggatcaacccactttcgatcaagctcgccctgatagccttctcgtactctgcatcaggcctggaattcatcgttgagcgccttttggggctgctgcgcctgcctttctctcctttggccgagggtccatgtggtggactctgcgagtttgctgagggtgatctccgagggacagctgatggatttgagggtgtccgcttatgatgggatggatgcgaggatgaagaggaagatatcggggcttgcccttttgaggccgaatgaggagttggaggatcgacttgggaaccaggtggcataggtgatggtgttggcggaatgccactagcggactgagacggatgagcagtcatatttgaggagcttggctttccagaggagtgttttgacagaggcttgttgtgcgatgaagtcgtgagatctaccgatgtctcagccggggtcgagtgagccaagacagtggccgtcgttgacgttgcagcggccacggctgtaggtgtagataccgtggtgacggacgactttctcctatgggaaacagtcggcttctccgttccgttggacgtcgaagtgctactcgaagattctttccctatcaatgcggccaccttgcccttagctccttccttggccgctcgggatcgtcgaccacctgaacgagcaccgtgggctggagtttgttcgtcctcgtcttcttcgagcggggaaaggccagcgatatcatgagtccatcgtttggactggttcggtggtaaggtactctccggtggtttcaatcggagcaagtcagatgctgacggaggcaaaaagatgctgataaagttgattgacgagaaaattgtcagaggacgcgtgtcttgaaggagtttattgcacggctgaattaaaaagacgtgacaccaaacataccctcctcgtcctcttgatttcatccacttcttgagcgtgacgtgaagatctggtctacatttttcacagaaatactctgttgtgtttggttcggcgtgagcaaattcaagatgagaacactttcgcagttaacgatatgaatggagtccgacagataacgcaccatctggcgtttcttcctctgtaggaattccaacacacgctccatgctgccagacgttacacgtatcgcacgagatcatcatgtcgtccgattctaacattcgtccaaatcccaaaagcggtaagattgtgaaggatacggaaagaaggaaaagaaatcctgaagtgagaagaggatgaacagactcacctgtgattccacaaacacatctcgtcacctcggcctcttcataatcctcctcatcttcctcggcgccctcgtcttcttcctcaacctctggagtgagcttattgcctttgaccttcgaatccgacttggaaagaggcgattttggatagtcagcttctctcttcatcggcttgatgtctcctccttcttttgggaaaagacttgattctttgtccattttgatagcagtcgactcgctcatgctcttttttcgcctgtctcgtttgccgaggccgtcaagagattgggtgtagtacatgtgagcgagagcattagcggaaggcgaggctgagggcgaatctgggtctctggaaccgttggactggtggtcgtctaatatcgttggcggcagtgacggtctggatcgtgtcgatctaggttgaggaggcggggaagcagctatataaaggagaaagccatccaaggaaaggaatagtgacacatttgatggatcaaaacgaaataaatgatgacctgcaagcgaaaaaggaaaatagagtgatcggaagactcacccatgatggtcaggggaatgactccttttgcagaccaagagcaagatgaagaaaggcgggagaaggaagaatgaagggaaaagatttaatttatacggatggatgtagatctgaatggatccacgcgatgaaccggctgatcttccgagacgaaaatcaaagagtgagagtaagagtgggcagaaagacaaccgagaaggaggataaccctggtttgatggtgatggtctgatagtgttctcacttgtctcattcgactttctttccggtcgggcggagtgtttgtgtgtggaccatctgaaggtgtactagcacagccctatagtgacgctcaacaatcacgtgagtatcaagaacctctaggacccgcatacgctgctaaaattgcataaatctgtctacattttttttggactttccatcagcgcctaggacagcatacatccccttggatagcatacagccatcccaacaggtcgtcaaacggaagcctgctccttcttcattcatcctctcttcctatttaagaaaagggggttatcaaaatggtagtcccactatcttcccctcttcagccgggctcaaagtcccacaagtcccactcgttccacacgctcaccagagaagccgcgttcaagtatccgtctaagactggggcagatatcccggcgcttgaggagctcgtcgcacctcatattgagtccttcaacgctcttctcgaggacccttcagctgaaggcggaaaagggcttcttgcccttgccgttcaggatattggggagaaagttgtgtatgatggcaaaggacgagctgagggcaagcgattgagtagtgagtatctgaacaaatgctccagcctctcacatcatggtcattcgcgaggtcagtactatatgctaacatatatacatttattatcactatcagtccgcattgcggacgtcaccgtaggaaggccgttagtgcccgacaaggacaagtctgctaaggagcgacgaatctatccgtctgaggtcagttttcgcttggtgtacctgcttaccgacatgctcaacctcgcggaaaaatccctgatcttcttttctcttcatcgaacaggctcgagagcgattgactacatacaaatctaaaatgactgcccgaatctgttggtccgttgatagagggccagagacagaagaactacgagagctcggtttccttcctatcatggtcaaggtgcgtaacctcctcttgctcgcgcgtcacttattcatatgcctctgaccggtcctctcgctatcaatcaccacaccagtccaaccgatgtaatctcaaagctgcctcggcctcgactctcgtgaacgcacatgaagaatctacctcattcggtggccacttcatcatcaacggaaacgaaaaactcatccgattccttattcttccccgacgaaatcacgtaatttccattttccgaaactcattcaccaagcgaggacctggttattcggcttatggtacccagatcagatgtgtccgaaaagatcaaacgtcttgcacgaacaccatgcactatctctcttctggaggtgccaccctcaggttctcgtggaggaaaaacgagtacatgatcccgcttatgcttatcctcaaagcgctcgtctcggcgagtgatcttgaaatcttccagggattggttcaaggcgaagaagagaacacgttcttgactgaccgagtcgagctcttgctcagaggtttcaaaaactacggtctcaagaccggcaagcagtgcttagaatacttgggaagcaagttcagggttgtgcttggcttgccggaagattgggaggacgaggtcgtcggaagctggttgatcgacagagttgtgctcgttcatctagacgacccgagggataaattccgaatgctcttgtgagttcttgttttatatcaatccaaccagtatattgcctcatgactttgggcttaccccttgttttcttttcacctactacaggttcatgcttcgaaaactgtactcactcgtatccaacgcttcttgcgctgataacccagattctcctcaacaccaggaagttctccttcctggattcttgtatggaatgatcatcaaagagaagctcgacgaagccatcacggccgtccgagctcagatctcgcaagacgtcagaagggatgtcgccggcgttgatttctctgatagtcagttttcccatttttctctccaaagattttcccgaaatctagatgtacaaatatttatttctttgttttctctctcttctaatctttttgtggcactgtagatcgatatatctccaaggtcctccacaagatcaattttgacgttggtcaaaagctttcttacttccttgctaccggtaatctcgtcactccttctggtttggatctccaacagacatccggttacaccatcgttgccgaaaaactcaacttttaccgatacttgagtcatttccgatgtattcatcgaggagccttcttcgctgagctcaaaacgacgactgttcgaaagttgctgcccgaagcatggggtttcctttgtcccgtacacacgcccgatggatctccctgtggattgctcaatcacctgtctcacacctgcaagatcatcacctctgcccttcctgtttctcacattccatctctccttacctcgttgggaatgacccaaccatttgccacgtcatccatcgacggcacaaagttcctcgtcgttcaacttgacggaaagattattggttgggctcctcctgcgctctgcctcaagctatcatcgacacttcgaaaatggaagaccgagggaagaaacaatgtgccgttggacctcgagatcggttgggttccgatctctaagggaggtcaataccctggtctctacttgttctcgtcaagagctcgaatgatgagaccagtgacatacaccgagaacggaaagctcgaccatgtcggtacgtttgagcaggtctacatggagatcgcttgtaccgatcaggagcttgagaaagtcacgaggaagaacattgagtctggagcaaaggaggttgcttttaggcagagccacgtagagctagatccgactagtgtgttgagtgtgattgcaaacttaacgcccttttcggacttcaaccaatccccaagaaatatgtatcagtgccagatgggaaaacaaacgatgggaacaccctcaaccgcactcagcagacgaacagacaacaaaatgtatcgacttcagtccggtcaaacacctattgttcgacctgagctatggaataagtatgggttcgatcttttccccaacggaaccaacgctgtcgtcgccgttatttcttacactggatacgatatggaagacgctatgatcttgaataagtctgctcacgagcgaggcttcggttacggaacagtctacaagtctcagatcatcgatctcaagactggtatgcgatcggcctccggtccggcgacgaaccatttcggaattggaggggacatcaaacagacccatccgttgagagagactgtcgacgaggatgggtatccaatgatcggtgccaagctaacgagtggaaccccgattgctgctcattacagtgatacagttggtcgaactcatgttcacaagtataaaggagacgaggtcgcctacgtggatgaagttcgagttctcggtggcgatgctggtgactccgagtgccagaagattcacatcaagcttcgaattcctcgttcacccacgatcggagacaagttctcttcccgacacggtcaaaagggagtgtgctctcagaaatggccagccgtcgatatgccattctcagagagtggaatgcaaccggatgtcatcatcaaccctcacgctttcccgtcgcgaatgacgatcggcatgtttgtcgagagtttggcaggaaaggctggagcgatgcacggtttggctcaggacggaacgccttggaagttttccgatggagatactcctgttgagtactttggacagcaattgctcgcttccgggtacaactatcacggaaacgagccaatgtattccggtatcaccggtgaagagttccatgcggatatctatattggtttggtttactaccagcgactccgacatatggttaatgataagtaccaggtccgaacaactggcccagtcgaccaattgactcgacagcctgtcaaggtgattgctttcatctgtactcaataaattcacttctgttgagagatcttgtattttcgcatatactgacattgcccgttccctctttctctgatgttaatcaactcatcaagggtcgaaaacgaaacggaggtattcgattcggagagatggaacgagatgctcttctcgctcacggaacatccttccttttgcaagaccgactgatgaactgttccgattacactaccgcctgggtctgccgatcttgcggttctatgatctctcttggttacgacctcgatgccacaatggatgtttctggcggaggagagtactgtagggtgtgcaaggaagagggcgagaacgcggggttgcacgacgtttcactcgctgtaccaaagtcgaatctcttacagggagcaatcggaccggggaacgatatggacgttgtcgctgtaccctacgtcttcagatatcttgccgcagagatggcatgcatgggtatcaaggtaagctaaatccacagtacaatcagatcttctagggaaggtgatgaaactgactggtcatctctcccttaaatcacagatttcggttgctgtcaactagatgttttctcttctcgccagtcattgcatatcatccctttctaccctttttccattcactcggatgagcttgctctctttcctttctgttttttctcttctcttcttcgattgcatatttttgcttcgcatatatatcatgggtcaataagatttccatcattgactgccatccattcattgccaaactggaagaaatcattttcgctacatgcaacgaaataaaggaaactaatcctctggctaggaagacaacgatgcctacaaagcagacaagacataacaagagcaagacaaaagacaagacgaatggaaaaagaatagaggtcatggacaacagggtaacgtaaaatatgagtaagggcatgaatatgaaataagaccgaaaaaaatcatggtcgggcaagatagatgttgagatcgtcaaagaaggttgataaaaagcaaacaagaacgagaaacgaattaaaaagaaaaaaagagtacaaagcatagaaaaacacgtggtgaatggtcaggtcaaagcaaatgatctcaaatttcatccgaagttccatccgagacatctctcatgggtggtggcgacgccgccaccgacgaagcagtagcctctgtgaatgcttgaattcgtttggtcagcccagcaaacattcctgctccagatggtctgtagaaagacgacgaaatcatcgattgctggtttgagttgaaatttgaatcaatcttcctgttatgaccagcggaggtggtgtcaggtggagatgcccgaccgatgaacgtagaccgaatactctcgtctgagcgagtcggccgaagtgtcttctcaatgataggtgtgtcgaatgaagggtccaaaacggcatccaagactgcagagattggttgagcatacgctccatttgccgaacctggcgcaaaggaagctgaggaattagaatccatctgcctacctccaaaagagtttggcgatctctgcgtggtcgtaggtcggaacacctgtgaacttgctgatcggagttttgggccaagtcgactcgaaggagcggctgagccaatcccaccagaggttgtcgaccagccaccttgagggacagctggcgccgctcctgcgaaaattcctcgaagatgctctcggttggcggatatccttgtagggcttggggttcgtaccgcacggccctcgcctggaatagagagggatgaatgggaagatatgacagatggcgcatgaagcgcctcgaggttcgactgagaagccctcgagatggttccgtgaggagtagatggaagctgaggggctgtagtagttgatgtggctcgacgtacaacacccgtacttccgaactcgacatttacggtagtcgtcgttgaagccgtagcggccgctaatttgggagccgctttagagggatatagcttgtttcggtccggcccggccggtcctgttcgagcattcgaaaggctagtgttcatagacgattcgtcctcggaggcatccactggaggagtaataaagaatttctgaatagggtttgcgatccatcctaatccggaagtctgtctagaaagtttggttttgagtcttcccctagcgtcttcctcttcgtcgaaaagaacaatttcccgcaatttgatggcactcgagggatcaagaataacatcgttgactgttcccctaagcatggagagttcagcaaaaatgtctttgaacaacttgacaagtaagaggaaatcctttctagtaaccaaactctctggatcgtcgttccctctaggcactttttctgatctacgttccagatccaacactgctcggaaatgattcctaagctcattgacttctgtcaagatagcattgatagttgatttagacaggtgcccgacgtcgcctggaaggtgttgacgtttgagacgcttggtcagcgtctgcacgtctgcttggctgaccttagtcaacagacgggacatgtgatctatgagcgatacaagagcggttgttcgatagtcgtgtatagaggctgtatctgaagaagctgtctgggaggtatatactggtaaggtcggagatgacacagccgagtcttgagggttgggtgagaaggagatggatggatccagactgttatttgttgacactgagggtgatatcgagacatgagatacatgtcgtctgcaagttggagttacaggttcaaggtttgagggtccggttgaagtccccatgtcgaccatgtccgtttgaacggcttttgatctgctgagcagcatcatcggtcgttgccggactttgactttttcaggactcgccgttgcaaacccgagatcatctactccgagaacgtctcttgttctcttagaaatactcgaggcagagccatcgatgtagatgtcgatgtcatcataatgagtagattgacttgagttaggtacagatgcacgtcgacttggtgaagcagggaagaaaccttgatcgcgctcggggtcagttccattctgctcgtcatctgtcattggtcgttcggcgatagagtctacgccctgagaatggaggcaatcaaatgtcaagaaaccatgagtatcattcttgatcctgaaaacgcgcagaggaaatagagcgtactgaccgagaacaccctatgaatgtttctggggccatccaaactgaaacttcttttaacgtgtcctctgacccaagttccacttccggatccacttcctcccccacggactcttctcccagctgagccgttggaactcttcaacgcgtacaccccacttcggagtcctgaatttccttgaaaacttccaaacgaggactcccttccgtctccttctcgtccttccgtagacagaggcgatactagagttgcactgccaccgccggttccaccaaagctggaagaggagacaaaagatggtgcgatacttggtgtccaagaatcgtttcggccgtgttgtcttctattcccatcccaaggtagcggtaccttagtatttatcgatttaagcgacggcgcccaactactcttccgaacatgttgaacaccatctgagaagactctatcaagtacaggacgcgaatttgttgatgcggcgagttcatcggagaaaaaagctgtggaagagcggctgatgttgcctgcatcaatatcatgtcgattgtcaaaataattggtagaatcatgaggggaaaacgacggcgcctggggactgagagtataagatccccggtaatcagaaagaagctcttgaagctctgcgttgtctctcttcaagtgaatgttttccgccataaggccatctacgaagtacgatacgaataccgttgaatatatcagtctggacctgccctaatttgtgtaaatgcaagcaacagaattgacatacctagtaccgcttgaacttctgggttcgtagatccacttgcgtcaagctaaagtaacaacagacgcataagtttcaaggcttgacgtttcctcgcgtcgtgacgttgaaaggacctacctcgcttctgatcatctgaatccgggatgcagcatcctcgacgatattcttcgtagcgtcttctcttgattggtttgcgtagtcaacagctctcttagccgctttgattttgctctccaaatcagctgaaatgaatcaaatgttcaaagagagcacgcgcgtgaccggagtctttcataagcttgtcgaagcagaaacgtgaaatctagtttagcaaacgtaaggtttaagatacgaacctattctgtcctctgcttttctcaatcttctatctgactccgatcttaatttccgctcgcccaacagttcctccctagtgtcatctctctccttctgagcgtctctcaccttgtcctcccagcccgtacttctcgcttgtgcgccagcctgcttggataatgaacctctgacggatgaaagttctgctcgaagcgtcgcaattgatgaatcagataaagtgagagaagtcaatgattggagaagacgtcgctcgagttgagcgttctcccgagttgatttggcaagcttggatagaatattttgattcgtctgctgtaatgattctatctttgcatttgccttcgcaagtagattttcaccatcgacccgctaagccgcgaagatttgttgaagtccaaacaaggcgtccaagaagaagagctgcacgtaagtactgaacaaggaaattctggatcatagttgagcttaccctgatttttagagcttccatctcctgttcggctttttgaacgtacgcttcatgccgatttaataaagcttgacctatctctgcgcagagaagcaactctgactcctactcgctcaaaacgcggtgaccgaaacgttctttaactttggatcaccctcccttacagacttaataaaacttactagttcatccttcttcccgttccattcgtttgacggatcagtattcggggttctgtccgagactcgtctttggatcgaactcagcgatgccgttatatcttccactgtcgtatcctcacgaaggaggtcagaagtcaataggcggattgaagatgtgttgtctgaaaacgtagatgcggactgtagactgtcgtcggttcgggagtcattcatcgttcgtttgggcgtgaggagggaagtacgtctatgaatttgtgttttgttgcgaactgaacgtttaagtgatatatgtgtatcggacgggagacagtcgactgaactagcccctcaaggagctggtaaggaacagaacgctattcagtgataccttgaatgtaattgttggctaccttgaagaagctgaaggaatataagccaggccaagcgggcttggtaaagtcacagctgatgggaaggagaatggatgttgtgggtacgacgggttttaatctcaacgcgtaaacaatctttctctaccttgctctcttccaatctcgctttctccctgtcttcattcaatcattcgttccatcaacctttctttcaatattcagggtatagttatgttgaaagtataccgagcctaatatggctattattttgaatataaataacatttcatagagcacaacaacttgttcttcgatatttgaatgttcttagcagtatttatcgctgcagtcatccaagaagatccagatcaggatagaaggcaagtcagtgccagagcataaagcgaccaagaacacacaacacttatcaaaggaatgatgagaattattgaccttttcagcttggatcgcctgtccagtagggtctctgagagattgccttctttgagtgccttcttgagctgaggtcgacggtagcagatgaaacacgaacgaatcagtgctgcgatcagaagttgaagatttaccttcggaacggaggtaaagcacattacacatacttctttcttgcttcctgtactcgtcacatgtttgtctccaaaccagagcatgcgttcttttgtcaatttcgcctcgtcgatatccttataatgcatatccttctgcctggcagaccctttggcatcatctagctccattcgagctttctgcctgaagcccgcctgaactttgcatcggaatgattcggtgaacccgatggatgtgctatctccccgaagcgtaaacccaccagtggcggtctcggacaaggacagataggtgccgtgactgagagaagaaaaggatatagtcagatacacaagtgcttctttgttgaaaccaatttcaaaattatgtccttcaaaactcacgtggtttctaaagctaagaatgaagaatccacgatatgaggagtgaagttctccaaaggccctctactttctgaagtcgccgagatctatcatcgcaatttagaaaatcaattgagcgtataagcatatcgaaatagaattaaaagaaaggaatgagacgaacaactccaaacttgtcgcaacccaggaaatggccgtccgctgtgcgcagattgatggatgcagctccggataattttgatacgacccagacagaatgtatatcttcaggctcataagacagcgcaggtggattttctgagctagatgaggctgctactgtaggagaaggaaggggcgctgttgtcactcgaaggcgttgaggatcatactgtgttgatggacacccgattgaatcaacctgtctgcaagaaaatagccgagaagtcaagaatctcaacacgtacaccgatacatgcaggagggtcgcttgggtgccagataaaagtagggcctgtgacttcatttggagcctcgggaaagacccaagctataatgaaaggtaaatgatgtccaaagataaatcttctggcctcatgaacatcagcagtggaaagattggacaaacctcctggctcaagaacttcctcttgtttcttactcttccgcctagagccttcacccaaatttctttcggactcatcatccgagtctctcgatctcttatgagacttcttcttcttctcacctttgaaagagagtttcatcgactttggctacaaagaggaaagagcgggttggtttgatggcgaaacaaagcaggaagatggtcagaaacaaattcgatatggataaaacatatggagcactcatgggtattgaataacagaaacacaccttgccggacatcgttactttgtatctgcacaaggcgatggtgatggtgggatacgtgatagtcaacggcgaatgatgtgtagagtcaatactgataatgggatgtgaggtgtcatcaagcgtggcgattccacgtgacttgacaaagctatgaacgttgaatgaatcacccctctccaaatacttcaaccgtagagaagagacgaccatcctgactctcgagcttatctctcttgttctgtcgctacctgtctttatatctacttctagtgaagcctttatgaatgaacggatggccagatacctacagacctcctccgttcgtgtatcagaaaaggcgtccgttaccgacagagtctcatttacagagcacgaacgaccaaggaggcgttagacttcaatatggttccctcggttccgtccgattggatgtcaagggatatggcaagaaaaaaggcttgaagatcagagcactggggcagaatttagaaggtgtgtgtctcacttatcaacctccttattgcacccaaatgaagacgggagagcgtgatgatgtacatgtattgaaaccacgatctatcaactgccaacgcagaatcaaaattagatcaacttgtccctccggttctcgcgtacccaccgacgaaatcgcccgacatcgctccctcctcatcttcatcactatcccttcgtaaaagaacagaggccaccaaacgattcctcgagaatcagcgggagccactacatatcccctattctgtactgcaccagcacttggctgaagttcaatcagaagaggaagacttgacttcttcttgggatgctttcgagggtaacaaattagcttgctcatgggtgaaaccattacgatggaagaaacaagtaggattggtcctaatccctaccgggccggtgggtcgggaactgagtaggctcttacattctgcttatagtatcaagtcatcatctctgacctgctgatttccattggttctttatgagagtttagatatctctccaatatattgggattcgagaaagaaagaagacgtctatataccctgctcatcacccagcgtatctttctcaacaccgatctgccagatcttagcctcaccctaccattttatctcctcagatattaatgccacttgtatgtttgattgccctgttctatccgagtcttccttcgcctgtaattgacctcccgatcatctgcttaatttagctccaacaatcgccatcagaatccattcctcttcttattttgtgtctttgatcatgaatgaagaccacaatcctgatgatactggtctcgctgtgtccacacaattgttgttcgaagtaacaatagcaatgactggcggcaatagacatatggatattgcgttatcaccttgggaaggtaatcgagctatcatcgtagactcgacgggcgctgtatgggaatggacgggtcaacataagttgtgagctcttctttgcccctataaagcacaagcgttctcgcagatgatctgatcttgctcacattttgtaaagaatattacgacgcgagccgctacaaaaaataaccggaacagaccctttcttcagagtcacttatggcccagatgataacatagtgtatctcatgtcggatcaacagatctacgtgctaaaccttgctgcaagttatttcttttttcatccatttgagtctactcaacttcttatcacttccatatttcttcttccacagcacccttcgaaggacatggtcttgtacgatgttatcggttcgaccagttatctcacctcgttttctcatcgaacatcccgcgagcagtttgaatcggatatcatctgtttctcgacaacagagagtatcagctggatcaaccggagggtcccaaagagagctctacttgcctgggagcatttcagagctttcgatcggacgctactagtatgggaagtagatagcggtttaggtatgtctattttctgtagtctgatgcagtctttgctcaagatcaaaaccatacttattctgttcgagctttatattttgacctgtgaaaagcccctacgacaatcatctcctctcaatcaacgaatctgatgacagcatataccgtttcccctaacacgactccgattgaatcccttaccgatccctacatactccctcatatttcatctcacgattttttgtcccctcgacaggggctcgcatttttccatcattcaagcctccctgtagagagacaggcagaagtgacaatgtttgaattaggatccgacttgtcggtttggatccgacgccttgcgagtagagaggctggcatagaagtcctaaataatcgatcgccgcataagatccccggtctgaggtggttgtccatattccaggaatgggccgaaaacataaaatcggaagagaagaagattagctgtttagatgaaagggagaagaaggtggttgacatgagaggcttgttcgaaggtttgagtttcttttccatacattttgagagctgttctgtgagaatgggccgaaataacctcagtgtgcgtttgagttagaccttttcaaagtcccttcttcagaatcaagcgcagatatgagaggacaacaggcagtggagggcattgcccgcatggaacagtttttcatcaatctcataacgcctcttccaggaatagtcactaggtgatatcctttttcgcctacttgcctttgttaagtgctcctcgcctgatcgaccgttcatcatcttgtcttgattgattctgttcagccgagatatcgcaatgatgactcacgactcgagacccactagccagacactcaataatccagccttcagagcaatacacccttcgccggatctcttgaaatctacgatccgacagcttcgttcctcaacattgagcaaatcatctccttttcaggcgtcaatgaataccagagtgaatgagctgataggcagaggccatggtgagccgaggatggcgtttgagaatttggagaagattgcggacggattgagagacagttatgctatccggtctatctcgagtgcatctcgttcttcttcccccagctcatcgacggacgacaacgatgagaccaaagagcacctcgttacctcatcaagcgcgtcccgtcaatcttttgagaagaagatatttgcatcatacgcatgtgatgttctggcatacgacctaacgctctcttcgtccgtatacgcctcagtaccgatcaaccctcctgtggacgtcgatcctgaagatgatcttgaacgagctacccaagcgatgagcttaggtcacgatcatccaattggtgcagacatcaatgttatggaggatgagattccgagattacaatttacatttctccgacctaaacctcaatatcctatatcgtccagatctgagcctaatcgaacatcatcaacgacctcatcatcgaaagtcaagttgaattcaaccccaatcccgaatacggatcaattaaatagccagactgctcttccagcgggctctaaaacagccagaatgttgatgagctcatggatcattggcgaagatccctctgaatatgttcataccgacttaaagcggcaaaacaacctcgaccttggtctatcatccaacttagaccgaagggcacccgcgtcttcccaggctgctatagctgcgaggttgtacggagaaggtacacagaagatgtacaccggatcttctcacccataccaaattcaaactcaaccgtaccaaactcaaaaccaaagtcaaagtcaattcttaactcagacgcctgtatttgggtcaacgcagagcgtaaaaccgaacgtattggcaaagatggcgcctcctctactatcgaccgttcccactttcgctgtcactcctgcatccaccactagtactgggtccgggttcacgcaaagcccgatatttattccgaagtcaacatcgtcaatcgcgaaaaacaatttgacaagcttgccatcttctcagccgttccctcagtctcagtctaactctcttccttattcccagcctcaaacccacatccagacccaaaagcagcaatcacaattcgaatcacaattacaatctcaacctcaagattcaaatgagaccacccttgccaacactcagattgtcagaggcccccatgcttctgggggtcgaccttatcctgggcttgggaaaacaaagacgggcgggacaggaacgggcggttcgaaaacgaagaagaaacggatgggtgggttctgaaaagatggcgtgatgctcttcgaacattttaatatctgtcattgaaaggacgtagagagacgacggatgaagtatagagcaatgacttgaagggctgatgtacgagataaccaatagaggcatgtgaggagaggaaaagttttgattcttgaatgagtagccagatatatgaatttctttgatcatcagataagcgaaaagaaaggggaaagcgaggtgtagtggacagaagaggaaagtgtgaatctatgatgtgatgatgcgtatagaacagcaggagctatcttgtgacactgaaagaagagagaaaggaagaggcgtatgcaaacacgacaggcgaagcgacatctacgccgtcagacctgaggtgagaagggaggcagaaagagaacaaagacgagagcgatagtgcaagggggagggacggtatcggatgcatgggattggtatagatatgttttttaaataaatgcttgatgtgtgtaaagtcaatgactaaagtacaaggatggaataatttttgttgagtgaaaaagcaagatgaagcatgcggtactgatggaagaggggaggaatcaagtttcccccttgatcactaccaaagagacgactcaacgactttgtcgtctctcatcctttcacccatcactgatcgtttcgtgttggccaaggcgacacaatcagcgaccgaatctaacgatccgactgacgtcgccgacttgattctcactaaatccgaactgacgaccggtggagctgtctcgtcggtcttggccggggtcatcatcgaggaagatgaagaacgaaaggtaggcgtgtcgggcataatgtccgagtcggacgagtaaaacccaagggcgtgtttggaagaagtagagctggacggagtgaaagactcgaaagcggaagcaggagctgatacgctattgtaagaagaagaggaggaaacggaagatgcgattgagttggatcctccggatggacaacgagcgtgcgaaccggttggactctgttttggagcagagaacgcaggacctttctccggtgtcgcaatagttgattgttgaacagacatgacgggaggaggcaaaagttcgaatcggcgtcctttgaggtactgcgctcggacaaagagcgaggcattgccgtagtaagctggtgcgtacttcgcgatgagaacctcggataactgttcgaggtgtcgcccgagctgggagtcgatcaggaacgcggcggctacggccggatcgtcttcatcaataggcttggtaggtccgaaacatgacaagctcagcattgtgcggcggtcacaaaaggggataagctgtatatagacttaccatgcggggtttgtcgagtaagaatctggcaagaagaagtgcgcctctagctatactcgatgggagaagtgggatgaattctttgtgaaagagtgaaatctccatcagaaaccgggccacatgctgggtttcggcgtcttcaagcgtggtctgattggaattgatgtcacgcatttgctgtgagcgaagctacgggagaaagatcgacatagaaggaaattgcttacacccatgcactgatatcgcaaccagctttccgcactagggtgaccaatggtccagccgatagtgttgaggacatgacgttccatttgaaggaaggcagactcatcataggcactgttgacggatagatggcgcgtttgttaggtagagtggtgaatatgtgcaatgtgaaatgtgaaatgtgatatataaaacacaaatttatgcgcttactcgcaacacattgaccgaagagtctctagagatggaatcttatctttggagtcctatggagggtagcaagagaagaaagattgtcaagagagcagtctacaatcatcagcttaattcttgtcactgacctcgtactttgcggcgatcctgtaatgttgttaaggtgtaggtgatatcagcttctgttggcggcgttggcgacagtctgaaataagacaacataccatagactagagcacccaactagttgatagtgctttttgaagacaatccgcttggagacgtatcgatcaattatgttgatggtaaggtagaggacttctggacggagccggaattgttggtggatctctaccaggaactctacgagaaaggggcgcatgtacctgtgacgagagatgtagtgtgagtgataaaatagagacgtggacgtaatggtagcaacggatttaccaggcaagttctggttgctggttcatgatctctatttttggtagagtaactttctactcaaggggaaagtgacacaggacccagaaatcctgttcagtctgacacgctccagagacagaagagaaaggtggaatttgaaagatatcgaaaagtgatatcaacatacctctaactcggccatgtatgctactgcctctgctgcgtattcgtcctcaaatagaatcctattcgctttagagaaactggcagactcaacaacctgagttgataccttacgaacagctgatagaatagacgatacagtcgagggctttgctagactcattctcttgtttccaccgatcttccgccgaacgtcgatcagaacagccgaggcaccggcctgggcctttgaggggagggttcgagcgggcctggagacttctgggccaacattgcaggcattgatattctctactgagagagtcgatgggcaaggcgtaacagaggaaagagaagaggagggggatgatgaattgtgcgagcaggacattgaaccttgtcgtactgctgacgaagaaggagagagcacaacagaggatcgtttccttgaagggtttgagtaagctcgatggcatggctgtccagacagcgaatcaggtatcgcaaccgagaaagacatttctgtttcttagtgggtatttgggtgtgagtgtttatgagaacgaacgggtggtgggttagagagcgagtatattattggaaagagagggatttgtccagagaatgaggagtgaacgcagggaaagaaagagagaaaagaaagagcgaggttgaccaggaaggaggaaggaggaaggagaaaggagaggaaaacaatggagcgaacaaggcaaggtgatcaaggtgtcgccgacaagaacaagcaagggaagacgaacgaagagacgggtggagagacaaggtgaacacacgaagtagagagagagagagagagacacacacacacacacacacacacacacagggcagaaagagagacaaacactcactcagacacgaacacgcactcgctcccacagtcactcgctcactcaggtcaacaaagacgattgtccggaacctcgctcaggaacaaaagaaggagcaagagcaggggcaggggcaagggcaggggatcgtgcgtcagatggggaagaaagaaaaggaatgatgccggaagggttcaaaaatcttctctaactctttctgtccagacgcgacggagcagaaggaaaggatagtggattgtgagcaggacaacgcaagagccgaacagcagagagaattaaaagaaaagaaaaagaaaggaagaaaagagagagagaaaaaggggctcgagcaatgaacacactcaggaacacaaccaggcacacagtccgggggaacgaacatccgggtaaattagttggttagccagcacactcatcacttattcactctttccatcacaattgcacacacacactgtattagt

SEQ ID NO: 693 - DNA, 66888 bp, Xanthophyllomyces dendrorhous
cacacacactgtattagtagagatatagtgtccggtctagctgacctgtcgctcagtcggctggatatcccgcacgggcctcttccgatcggatccgcacggaccatcctgtattcattttcacacagttgcccacactcacacagaagaaatacagacgtgatattccgggggaaatgagagatgtgatgtgaccgattgcgagcagtttgattatcatttaaacaagcggcgatagcacatcccgcacgcgcagcccgccgggcatacagtgtaacttggtttatttaacttgagcaaattgtgtttgtaaggggccgaattacagggttacgaagggttactgaagttgattagggatgctcaaggcgcggaggtttaggcttccaggctcagggaagagaggatgaatcgtgattgaatagcactggtagctactaggttatttaacaaggatcctaacttgaagaaccaccttttgaaggagcgcgcaagcgatccttctgtgtgttctagatacgatgaagtggcaacctggttgccactcgattaataactaaaggatcatcaaccagagataatcaagcaacagatcactaatcctgtcacaaatcaagagaacatagctgagaaggattatcaagcgcataaggtgaagagaaggagcataacgaaatggaaggcatgatgaataatggaatgtgagcatggttacactgccgtgtatatgttacctaaccctggttcctgacagtgttgtaaggttacaattcgcacatgggcgtttacaatcacgtgagtagataaccctaacttagtgtcatagtctctcactgtctcctcttgcacaaacacttgccttgatacccatctttctaggaacggccatccaacgcagctgacatcctgatccctgtctttctagtccccatctgctcacgtcttatccgttcgactctctcttttccctttcatcatggaggaagagtccactgccgatcaggataatctcatcctcaacgctctcgaatctcttcccggaattatcgaacgacttgccgtacccggagcagagttcaacattgacttacatcgacaacacattgaagcggccactctcgctgagctcgatgatcagctcgaccaagcaagactactgatggtccagagcgtagcctgtggagatggtgagcttagaaaccttttctgttcaaacgattctcataatgcgattgtatcctcaaacgcttttatgcacattctgtcatcttgtactctagatgtttggctccctttactcaaggactttgaagccaagtccgacctgtctacagcaaaaggaattcgcaccatgctcgaccttcacgaacaatcaatcgctgactatctctctattccgcttctggtcgctcgagctgaatttgttacacggacctggtaccgcgtacgagaacaggccatcgatcctgatgtcgtcctcgacgatgccatcatcgccctcttaaccgaagaaaccgtccgagaaattcttctagaaaccaccgccgctgccagagcccatatcgctcaggtaagccttgtttccttgttctcgtcaaaaacaacacgttcatacatgcttatcattcagctggccctgcacgtcccatcccgcagagtcacctcgtctggaacattttgaaagactggcagctgtctctgctcgaagatcttgaggtgagaatttgaatcaataatctagatgctcgcttaagaggcaaacatggctgaaaagatttgtctggcctaaatcgatcagtcccaagaaaggtcagtactattcttccccgttaacaccagatatttgagcttattatccgcctttttcttgtcgctcttgtatcatcagagaggcccgtctccctaccatccacaggatgtttttggaccgtctcaagtttcctcatgccagtgagtgttatttttctcttctgtgcttgtggtgcaacaagtaacagcttggtctatcttcagccatcgacgatacgttctccgcctacaattcgtttgtgtctgcttacgataatgagaactacgagtccagactggtcgctgcaacgaaatcaaagaccgaaggggccggtaagtgggctaagagagagagttgggaggatcagctggtgagcgcatttatctccttccttctctaccctttcacaagattattgcactaacaaagctgtgggcattcgactccctcaaaattctcttcagatcgcacctggcgcccacgcaccatcactcttcccggcttatattgcctgggaactcaagcccaagaagccggatacgttcctcgtccaaagtctttacgctcgggcaattacagacgccgccgctcgaaccgatgccctctaccaggccgaaccgttctggatcagtttaatggcctttttggtgcatacctagcttggctttttatttcagtgaacatatatacaatatcacggaactaatcgttttctttggtaaatttggaatcgaaacgatcaaaccgcgcgcgggagaaacaggcctctaatctgaagatcgaacaagtccttctttccactatcttcaaagctgtcagaagtgttccagtgtctggagaactctgggctctttacatgagaatactggtaggaatctatcgttccaattctttgaaggaaacactctaatcggttggctttccggattggttatatctaggaggattatcagaaacctgtcgaagagattgatggtacgtccgcaacagatgcaattcgtaactagcttcatatttactcattattctttggtcttcctttataattaatgcatacacagggatctaccgaactgctcttaactcagatcttttattgactcgtggtccagaagatgccgtgaagatgatgaccgctcgagtgagctacgagcgtcgacggttggaactgtctgaaggtaaggctgacctttcactaccaacagagtgggacgtcctcaatggcttgttgatcaggctcaatttatctgatttgttgtttcgatcgtgtcgtacacagtgacgaatgacgagtttgtcgagttgttgttggaggccatctcgatcgtcaatgcaggtttgtccctactattcctttcagtttcgacagtcttatgatctatgcttacgcttaacggatgttgatatccaataaggcgtcaaaaggggcgatccggccttcaagctggaaaaatacctcatcagctgggtgagcctgtttctcggcagattctcctcatcttagatcttatctcatctattaggagacttctcatgttgaatttgactgggaacaagtttgaacggacacaacaattggacgaggcttctacaatctggcaaggtcttgctaaatctcactcaagatcttatctagtctggaccggctgggcagctttcgaaacgcaagtccttcaactccccttcctctttaagagtaccccttagccaaacatgctaacaactcaagattcttgactgatatgattgggaatttggacgccacttcagtcgtcgaggcgcgctccctaaagctcgagatgtcttcaaagcatctctcggaaaagccaacaatctggactggccagaagcggtatttgaggcttactccgagtttgaacagttctacggcgcgctagaagatcttgatgaagcacttaaagggatttcaaaagcaacccaagtagtagccactaagcgacacaaggttcgtcttatagaaaacttccctatattttaatgcttctgtgtttcatatatgatataccgactcgatatctgataatgatgcatacctatctatcatcaggaggcaatcgccgccgccaagaacgctcctgcagatccttatgtttcatattccactcttccagcagaaggtgcagagtctgtcgctgcggcgcctatagcaggagcgatggatgtcgatcccaattctacttccatttctgcttctatacctacttctgtagatgagattgtcgaagctgggggcgcgccgatggattcctcaggaatggagggagatgcgtcaagaaagcgaaaggccgaggatttggtagataatcagattgagaatgggagtgaaggcgtcaagaaagcaagggctgaagagcagacggaagctgtgccgcccgttcggtatgttacatattcttctcctccaacatcgtgagggatctcttcaggcgagataatctgacaaacaggtcatgaatttaccgtgggcccatctcgggaagtagagatcgagaaaactctacggtttttgtttcgaagctcacacccgaagcgacgcaagacgatctaaaatcgttgttcaaagaggttggtctttgtttctcctcttttgactagatgtcaacttttgtctttggtgggagcaactgatcaagattttctgtcgtgccgttccgattgtgtatatttttcgggatgagtacagtgtggagagatccgggagatcaagcttttggcaggagccacatttggaacagtggagtttatgaccaaagtacgtccttttcgttcctgttcgaggacaaatattcattgaacttataattctttattggaacctcttttgttgattgaaactgccaggaaagcgtcccagccgctctgacgcgagacaagaaaaagataaatgacattgaggtggatgtcagtgtagctgagggatcgacattgtatatcaccaacttcccagaagccatggatgatacctcgatgagagccttatttgagcctgtacgtcccgtgtttcagtatccatctcaggaagttaccatcgagatgtactgatgtgagctgaggcacccctcattcaaatactgattagtacgggacgatcattgagactcgatggcccggaaagaagtttaaagagagccgtcgatttgtttaccttcagttttcgtcctctgtaagtctggtttttgcttgtcaaatctcaattcgataatggcaacactactggtttggtttgataacatattcgtttgtttgattaaccattcaaggtatctgcaaagaatgcgttggagctcaacaaaaaagaaatcgagccgggcagagtattgctagtggcaatttcaaatccaagcgtaaaacgagttcgaacggacgcgaaggctaacgatagacagatcgtgatatctcatctctcaaaatttgtcaagaaggaggatttggaaaagctgttcaacaaggtacattttctgaataccttcttgggttgtcaagcaaagaggtgttggtcttcgataactcacttccggccgtggtcctgttgggtgaaatctagttcggacccatcaaagatattcaatctacttcagaggaggatggttacgtgagagggtactgtttcatccattttgaacaagaagtatgtctatttctcaattctttttttgccactcatgacaaaatttgctcagagaaattcgttttgttctgtgttgggggatgaaacagaactcggcccaacaggcgctttcgatgaacaactatgaattcaagaaacgtaggatggcagtgactattcctgattctcgacgaaaccaaaaacagtctgtcgcattgctgctctttttcactcacatgacctcactctgacgcttggtttgatactttctgaaagaatcgtgatcgagcattgtgctaggataggaaatctacctagtggagttcaagaaggacttctccaacaagcgcttgagaaagttgtcaaactacagaaagtctctgtaaatgctaaaaacggtgaagcaatggtcgaactatcgagtgcagatgtccgtaccacttcttgcgtgtttctcctccttcctccctgtttcaacttttcatatgtctcgagctgaatagtaaatcttggcacttttgtaaactcacgaatacaggaagttgaatcgttcatcagctctcaaaacggatttttcacatacgacggtacacccctcccgattgttcccggaactcagaaattcacaactgctccttctgccggatcagccagagaggagtctggtattcctgatgaagctacaccggttgccccaagtgaaccgatgttcagacctcctccaagacccagaccttctcgagcgagacccagacctggattcggaccggccggtagaacgggaaggaaaccaccgacaccggctttcataccagctgccgccacagctaccaaacagtcgactgagaatgtctcgggaaaagacgttccgatgtcagaagaacaggtgaaaccaaaagggcagaatgattttagggcgatgctgctcaaaaagcagggttgattatgaaggagaaggaaaatgacgaatctatgagcttttgtactttcttaaattgcgggccattgatttcttcttcttcttgattaaatctgcatctgttatcatgaaaggacaaggggaagaagtacagcctgctacaattgtatcacttcccctgaatcaataaaggatattcacacgttatacatacctctatgttgatttggtcaacgaagaaagagagcaaggctgggagagtttatctcttccctttcatgaattgatagatgcgatcacgacagaattgtttgtttggttcccctcgttctgttcatacgaatagtttcatccagagctcttactttcagccaaatgaacaacagcagtgacaatatatgaggaatgttgacaacacgaccacaagagaaagtttcatgaaatgacaaaagcacgtggtgcgttacgccggacgttgtatcaagaaacgacacttcatccaaaggatatagaggaaaagacgatggacagatgaacgtatgctgattggaatcgaattgagattggaatggaatatacgtgattgattgaagttcgatggacagaagaaaagtgtcctgaacgaaaaggaacgacatgagacgaaaagcgatatgaattgggaagagaaaatatagaagaatacaaaggaagatatagaagcacctggcatgtgttgttgagtcgatatttgatgttgtatgtctagcaataatgtaagaggtacgaggagtgataggggaaactaaagtacactgaacgatgtcttttttttcccaaaggatttaaaaaagattttttttttgaaatttgaaggcaagtgattgataactgatgtacgatagatggaggagaacagagaagaaatcggagagaaggagagggaaaggagcaaaaatgaaataagataaggacgactgaaagagaaatagaagagagtggaagaattcaaacagaaaaggcaagctcaagctgttttcaagatgacttccaagcgttccacaacctcggccatggtaggtcgttgcttgggatcttgaacccacatgtgttccatcagctcaacgatgtcgattccccaatgaccagagactttgtgagtcgaaggtctgtataatatattcagcgagtgagtcattcaagttttatctcaactttgaaaccaatgtcaacattgatttgagagaagaacaatgtacctctgttttttggagcctacggtatcgtagatagcatgctcgttcataccctgtgtgtgattgttcaaaataaaaaagaagacaaattcagttccctatactaattctctcacaaagtgcaaattgaggccgcttacctcccagggatactttttctcaggcttatgccattgcagcatctcccaaaataccatggcgcaactgtaaacatcaacttttgagtcgtacttcggatgggccgtccacatctccggaggttgataacagactgttcccactgtgatcgtcatgaatgagaaattcgtcatcagcttcaaaaattactcagattaaaagaaaccaacggcggtgtcggatcgatcaagaaggcagcgtaggacagatcaacgaagctcgatgttgagtgagagattcgagacacggcgattcacaacctcgactttgcgtggttgtttttatgaaggttttgctggtaaaaaaagctgtaattgaaatcgtacctaaggatctaatcaatgatctggtcgagtgtttaactcttgccagaccaaagtctccaactttcgcgacaactttggatgtgataagaatgttggaggatttacactttaagatgatgcagaccagagcgatgattattagcataagattgaaccgaatcaggagataacatttggcacttacatcgcgatgaatcacggctggttttcgggtatgcaggtagttcagacctcgagaaatatcaagcatgagtttgatctgtaaaattggatgcaaaaaaggatcatcagacaagaacagagagaaatagactgagaacagctgacttaccacaacttttttactcggcgccgggacattcctaatgtagtcaaacagatccccattctcgcaaagttcgctgatcatcatgatcggaattttacgatcctcagggatcgagactccaagctaaattatcatgtcatagaaaatggacggttcaggtttttatacgtgttcggagattgagatgcgtgttcagtacttcgactcacgaatttgacgacgtttgggtggttgaagtcggctagaagtttaagctccttgatatccactataaaagagcgatattgatgtaagttactgagcgacgtgttcaaataaaaaagattaactttacgaactttcactgagttggcctcgaaactcggctatagcgaccttcatccgattccgaagcttcccaacatagacgctgtcgatgatcatcaacatgagagctcgaatttagctgagcatcctcgaatttgttataatgaaataaattgagacttactctttgaatcctccacttccaaccttttccatcttaaccaactgctcgcatggtatttctttatcctctaatcccaaactttctagatccaaattcaactcctctgttccaataccaccttgatgagcatgtccagaaggcggcggtgtgaccgaagggtgtttctgctcgtgatggacatggccgggctggtataatgtcggtgttatcttggcattcgttcggaagactggatccttgtcatgaagtcgtcgtggccgacgtgtcttgggaggactcgtggaattaggtcgagcggtagaagcggaggagatggaggatgaatcatcgattccgtcttcgccttcgttatcacgccaatcaagtaaggcctgggcgagttgcggctttgtccctaccacttcgatgtctctcgaagaacacagtctgacgagagcatcacgacggagccgtaaaagggttgcatgcgtgaagttactgaggtcgatgtctgtagaatcagaaaagttaaggatgtatgattagcggcacgttcaaagcatctattttcaaggctggaaaatgaacaaaccatcgtcatcatccatgttaacttctgtctcgccatcaccgatatcaccgacctgggagtccttcccttcaggaatatattctccatcatcgccttcgactccctcttcatcatcctcgtcttcattgtccttgagttcctctgcgctctgcatatcctcatcgtcgtcctcatcctgctcgtcctcttcatcctctgtcaactcgataatcgttgggacagaaatttttcggagcccacttcgccgagttacgcgtttccaagccttatcctccacgaaatctccatcgtcatcgacttcctttttcgcagtctctttttcgcctgctttcgcttcttcctcctcctcggtcacatccagatcgtcttcctcatctgattgaacggcgctgccgttaatttccagggctccttcatcaacatcgctcacttccctttccacatcatcctcgtcctcttcttccgccacttcaagatcttctccctcggcatctccctccgagaacgactcgacatccgcatcactaggtggcgtcggaatctgccctcctctcctctgtccatccttgtgtttccctccccttgattttgtgcctttttgtatcgccgtcgatgacgatacattcaaatccgttggtttagtcaaaactgatgttaaattcgatcgagtctgccgtctcaaaggtcttgttcggtctgagtgatccttatccgacagagcggcagaagcagaagatgaagatgagggtggtttggacgactgtacagagtgtgcggatgatgcggacgaagaggagcgagatgatagaggcgaggttgagcgtagaacccgagctgcgtcctccctttctttgccttttctgcttcttccagattcggtttcaggatggtgcataccgtttatcacagtcttaggaggagagggttgaccagaacggactgacggaagagaggaggttgttgttttccgagtacgtcgggttgtagcgtgtttgggcgtcgtgcttgaagaaactactcctcttgctctcgtttgaacaggggacgcgccgatcatctgtgacgggtttttctcagaatttcttctcctgctggatttctgactcacagcagacccttggctccctatatccaaacccaagcttacgcttcggtttcttacgttcctcgatctgtcacctctctttttatgattgaatcctccttcctcctggtttgagcttccttcggcttcgttctgtgaaccatcttggtcatgttgactgtcggacgagaccgaacctgcggagctcctggttcgtccattgacccccaaaagcttcattttcgatggccttctgggggttggatctgcgtctgacgaatactcatcatcactcaatagcgaagacctcgctgatgagctagatgatgccgaagataaaggtactgaggctgaggatgaagtgcgacttcgacttcgagtcctagggccaaccggttcgcgcgcatctacaagaagatcaaccaggctggtcttcgttctttcggcttcattggagagttcgtcccatagtccggcaacttttagaagtcgaatgagaacatccttgcgagttcgttgaagttgggctcgagacgcttgatagattaggtggtcatcggctgaaagatcccgttgataaaagcgttgtcatacagagttcgttgtcaaagagtgttggtcaggatcctaaagataggatgtggagaaaaaacttacaaggatcgatcaggtcgtattctgttctagtggtcgactcggcatccgtaccgccagcctcacttgaaatgttctccgatccgatagacatatcacttcctcctgatcttgtactcatattcgtattcgcacttgcactccttttattcttccccgttgattcagttgtgccaaacacatccagctcaacgccctgcaacctaggtttcgccttaccggttgagccgatgagaccgtttgcgccggtaccagactttctacttcctcgtccgttgaccggacgagacacaagttctagaccgcttttcccaaatgcgactttcgtgaactctccttctgacccagctcgttttcgtttcctgcctaccatcctagatgataccgaattagacgtcagccctgggtaagtttggctagcggctctccggagcggtctgttcggaacatccactgaggcagatgacgagatggaaactgagctaggccgagcgagttctatatcagaagcatgtagagtagcatccggatcttcttccagttctgaggttgactcctggtcggagtctgtctgttgatctccagagaggcccggatcagacgcgtgtaaggatgatgacggtgatgacgacgacggacggacggtccgcttcggacgtttgagaggccgtctgggaagtaaggttcctgttgtagtattggaagacgtagaacgggaacgagtcgaacgactgacggacttagacgatgatagagagactgaacgagacgttgttcgtcttgacatccagaaagaaggggtatcagaaggagtaattgaagaatgaaggggggcacaagagggtatctctactcgatttttttgtcagagtatgtattattctgtctcatatgaatggccgatgacaaacagtacacttggtcagaacagacctgataaaaccgactagaggttgcttataaaaaagacgacgacaaacggttgttgtttgggtagcgaacgcgagcgagcggtcagaaagaagaagaaggttaagaagccgcaggtggaggcttggtgggagaacgggtcgttcttgcttagtcagctggcgccctttgcgtccacatccaactgtacacatgtataaacaccctcacacgctctttgaattcgctggttgcatggcttgcgtggcgatgaagcgtttgatatatggaggataggggatgattcatctcagatctctgctcatgaggtattcagtgaagatgatgattggcactctgtgccagagttagatctataaggcttcctcagatggcttgatcatctaaagcttgaacgtatccagacctggtctatttgcgctgcgacgacacctatgctatcttttctactcgaagtgtagtcaaaagaatgcttcaatcctgccagacccgttctgttcaaacccttgttctacatcttgtagattatatctcggcaagtggagaggatgatgttgtttattgagggatcctacacatctaacccagcgatgcgcggtcaaactcttaccgcgtattccactacaacgctctcggtcggcaccttcagacagcatctcccatcacccatcaccttcccatcaaccacactcttgaatcccctccataacccccgttccaaccaccccgttcatcacgtttacagattaatgagccagaaaacatcggtcatgaaggtctccaatgtcaaacatgaaccagatccgtctcatgtggtgagtgtttgtgactgtgactgtgactatgactgcaacatcctgaggtacaactctgcttatcgacatcgtatttctgtctcatttccttgccatttgtacggctcctctgcacgatcagaaacgaatcgttctggagtatctctctcatcatacgtacttggctactgcaagagcactttcccagcctcgctcatcaacttccaaaggaaagtcttcgcaaacctcccaattgggccacagctcagatcaggatgtacacccggccgacacaacgtctgtatctgatccgaatggagagtcagtccaatacatggtggacccagcctctgaagtagcagctcaagctttgataggagaagttaacccggatccagatggagatgaggctatgatggccgccgaggaagattcttcagtagcatcatcacagccgataggaaagccgtcagatccagggcacgaagtccgaccggatgatctagaggaggatcagatgaagtcaggaggattctcagaaactgagtttaagcagatagggtaccggaaaggcaagtagtcttcgcaagagatgttgtatcttataggagacacgcattaagcctgtctgcgctttcatcacctttcattgtccctaatatgcagacatcaagatcgccattcttaagggggagacttctttggcgctcgatctgatcaacaaacacttccctctgtttttcggttcaacctctcaaatcaatcaacctaccccttctcttggtccgacacattctcagcccgatacaaccccgtcgacgccttcccgtaaaaagtcaaaaccctcagcccctagtccgagcgctactatcgtctcaaatccgacgtccacattcaaaccagtgttggcatcttcaatacatccaccacatgtatacctgaaccttcagattcaaatctttattgaactgatccgaacgattcctctgccttatcctcctaactcgaagacccctgtcacgcctgtagattcacccaatccttcccccacgagctcggctcaatcaaactcgtcagcgttatcgacctcgcttaacttggcacttaacaaagcaagggatttatacaaccatgtggaatcgcttcaggaagaacgtgacagggactggtacagaaaagagcttcacggagtcactagcttgttcgcatacgtccccccagagacggcaccgacgaagaagtatttagaacgggaacggagagaggccttggccgaccagatcaactcagccatcttgagtgagtctttccatcacctaaccaactgagtgcgagatgtagtttagatgtcttcaacgactgaccttcttcttcttcaatcctctgagttcagttcataccggccaagcagctccgtcggtattggagagcctcgttcgacaaacatcagtcgtttgggaccaactttctgaacagaacgttgatccagttcctccgtggacgaaggaagacggtgcagagtgggaaacattggccagcgtgagtccgatgtctcgcctttatatgatgaagattgcactggtgtcccctctatgtatttgctcacttctctgaatcttgaacattctttgaaccttgaatcttctttgatgaatgattctctgggaataacgtatcggcagtacttcaaagaacatcgaacatttgctctctccgagttcctcgacgtataagctcttgtatcgtggaggccccatcacgtcattctatgctgctgttcatcagaagagaatccgttctcttctgatctcgcttggcgattagaaagagttgccgaacataggccgttgatgttcattcgatcattcttactcttgttttctctcttcaaatatgctttgtctcgatctgtcctccttcactctatctttgtctgtccatcacattttgcgctatccgttatttgtgatttcatatttttattcctcggtcgcttgtcatcagccggtcatcatacgtctgtccatcacgtcctttctcttcagcttcacggaaacttctgatcatacttcatgatcgttcccctttatccatgtcattttgtcttcaatgtaaattatacgatggattctgtcttgaacggaggatgaaagaccgaaaccaactcaagatcattcattgaagagaccactcaacccctatgagaaaaaaaaatggtcgtcaaacggtgggtctttgttttctggctcgatctgcggaaacagggggagaaaagcctaccgattcatggtgtttcccgcaccctttgcgttctcttcggtgtaaactgcccagttctcatccttcaaccgtttcttctcatccgcttcgatggcagagagaagaccgtcttgttcggaagctaactggaggatttcattggtcgttggagcttcttccgatgctttcctattatgtcgtcaagattattaatgatcaatcaggacactgacagatcaagattcgtgacgattgaaaaagattgaaaagaaagtagaacgaacccgcctccggtgatgactcttcctgtatcaaactcgttctttagatactcgtcgatcgacatcgtaggtaacctatgacttgctctgaagacttctgattggagtctcgtcctttcatctgttgatgtagccgatggtaggactgtgaaaggtctcagaggctatttgtttgttgtatgcagaaaaagaaaacaggaggagaaatgagatggtcaggacagacatcgatcacgatggagtcaactcgcggtccaacaagcagaacaaccgacctttccagacttatccataagctcgcctctcccatcaggaccacctctatcgaccctatccaatctccacgctgccgtctcgttgtcgtcgccatccctcattcttgacctgtcgtctgctctctctccttcacctggtctgaccggcgaaatctctgcaggcgcgtttgagaggagttcttcctcctgctcaatcgattcgagcgagtttaacgtttgagcataaagtagtgagagtagagcaagagtgtatgtcctggaagcttcaagatgagagtaggctgacgaagacgaggaggatggtgtcgaagggggtggagggagaagagagttgatcagcatgaaatcgttcgaagaagtatcggaagtcgttcggtttgataatgtctagtagtacttaatcgtcagccttttggtcgatctttcaccagagtcagaatggagagacaggcaagcccaaacatacctcgagactagatcgaacttgcttctcccatcggaactgattgatcttttcttcccgtcgtattgtaggatctctcgtgcctgttcttcgaagtttctctctttcagaaggaggaacgatagagtatgcgtccagaagattgatgaacccctggaagtcgatctgaaattgttcatcaagatttaggttattgagatatattactgatgtccgatcaaggaaagttgcctagtgtcaagaaaaataaaatgaacgaacctttgcctgtttcaatcttctcaccctttcatctctcccttcggttctgagccgacctccgacttcgccagctacataaccgacaaacatgaaggctaacccatgagtgctgacgtcttcgacttgctcgtttgtggagaacactcctcgggcgtcaagtagattcttggctagttgagtcgctcgatatgatgtttccagtgcggtctattttgtaaagcgtttccgaagatttctgactgtcaaacttaagggagacacaacagagacagacccgaaagctgagaacgagagagtgtacaaacctgggtagattcagcattcgtaggttcatcatataccccacctgccaggatcaacgctttcgagaaaagttctgcgagcgataattcttccagatcttctgcgaaggacatgtttggttttctttttcggtttcgagtttttggtttccggggtttactcttgctcttgctattgttgtgatggtcaaagaaacgttgtgaatgaagatcaaagcgttcgttggcgaatatactaaacaaccgaggatacatttcgtcagaccggttagtcactctgactccctttcctcaactatgaattcatttgttgagatgtcttgatatacacatcatgcaccagataacagaccatgatattcagaaggaagaggccagaaacccagtaagaaagtactgtagagtgagaatgtggtagacgaattaggaaaccaaaattgctcgcttaggatattttatcgtaggattatactgttcgcatatgcgaaaggtaagccctacatgaatcggttcagatacgtgccgttcgcaagatgttagttatgaaaccaaagcagatacaacatgaatgtaggaagaagacggaccaaagaccttgagaggcgacttctcccttggctttctcgaacgtctgtccagcggccttcccgtgtgcccaaatctatgagacataggtgatcaataatacatcgttacaagtcgattcttatgattataaagagacacgagagagagagaaagaagcatacctgtctgtagaagagaagcgagccgaacagctgaataacccacccaaccgaggcaagcacgcataatctgagatttacgacaaatatcgaagagagtcggaaggaagtttgcgttaagtagaaaggaaagaagaaggcagaaacacgaataaagagcttacacggcagcagcccagtgctgaccagcaaacatggcgatcatgttgatcaaacctgcagatccagttgatggaattctgtatgaaagagaggcgatgagcgagtgtagatgttggttatatcgaatactcttctggaatgactcacccaacaaccatgtataccgagaataagatatggaacccagcaaagatgtagtatctagatcgtcggtgaagttataatggttgagccgagagcagagttaatgcaatgaaggtggtgggaagggcagatctcacagatagaagaagaacgcgtgttctttggcgtatccatagtagataggtctaagaagtgaaaaggatcagtatacaattatgcggatctttgctaatatgatgaggaattagatcttacctgtaccaaagatacaacgaggggatgccgatgaacggaatatagactgcagcgccgatcatgtcctttgctccgtccgacgcgccagagatgagaagaagaacacaggcgacgatattgacaatcaatgtcacgaccaacgcgagccagaggctgtagaggcgatgtttgcggaacaggtgagttttcgtgtctgctactgctaaaggtattagtttcaaaggagcagggaaagttgaagacgaaactgatagagacgtgtcatgagcgcccgagactgttctggtataacggcatggatgtcgtggtgcataatcggataccctatgagatattgttgtatagacgacgacgacgacattaggcggaagtaaggtgaggattcaggctagatggaacacagaacgataacatacacttaggccaattattgggctggatgccacttgcagcgatctcttgttcccttcttgcgagctcggcctcgcgggcgttcaatgcggcttccctttcggcaaagcttggctgaacttgaggcagttctgttgaagaggcgaacggattctcgttgacagaccgactgtctaccgatggatcagcaaacgggttatctgaagctgtttgaataagagtatatatgagtgcattggacctgatggaaagagcaaggaggaaggggtgtgctgaccagaataggctgtgtatttagtaggtcaaacaaagaaagagaaggtgtttgattgccaaacggtaagcatatcgaccgaattgaaggtatactgcgctactgtgtacacgccttgatacagatggaatgcactcacccatgatgggatgctgttgctgcttgatggctgctgctgcttgagggtgatggctgcagttgcggttgcactcaatggaactcaaacgggtggaatggaggccgtcccgagattacgtaagcccagccatataccctcaaagtctcgccatcacttttctcctactactcatcgtttggagggtttatgagttggtgtattcagtatgagagtgcgcttctatcatctgcatatcgatgaatcgacatgagcatctattctctctagatgtatggtcatagaggcccaggtgatttgagtacatattcagcaccgccctgtatgtggtcaaaatcccacgtgatcactgttcctttgccccagcatcctccttaaccttcaccgttcaacttcttctcctttgttctccatccatcactaacaatcctcttctttttttcgttctttaggtctcccacactcccttcctttcccagccaacccagccctctcacccaactctacaccaccttcaccgtcttatacagacttacccacagcttctacagcaaaaccacattcaacaggtcagtttatctttgtcattcagctgatgttgcttcttctgttgacgttcttctttctctcttctgtctcttgcgctctcttcatcgcaactgcacacgttttcgcattgtttgcttgccggttgacctttaagacttcaaattctcaaactcaacaacctttcagcctaaaaatacaatgttcgcccttgcttctattgctaccatccttctcgccgccgttggtcaggccgcccctatccctataaggcgagccgaggtcgcccctcgagcaaccgctcctgccggttgggccactggatacttggagtcttacgatgtctaccacgctcgggtatgttgccgcttagaaacacgcatgtggcgttcgctttgttgacttgcctcctcctcgatctgtcttgtttacctttttttctcttcccccttgggaatgttgtctgatttttctaccgcagtacgactcgttctccgtaagtccagcgatcgatccttattcaaaccaaacgtcaattgactcatctgtcgcttccctctttcgtgaaaacacacatctagtgcaagacccagcacgggactactttctttgacgagtgctgccatcctcttttggctaccgagtccgtgtccagcttgtcctccatctgtgtcgccgcttccagctcgtctacctctgccgtcgccgctacctcctctgccgccgtcgaggatgacgatgagtgtgatgccgtcgccaccaccgccaccgctacctccactgtcgccgctaccaccaccgctatcgtccaggccgccgccgtgactactactgcctcgaccaccagcaacgttgtatcgtcgaccgtctccagtgccgctgcttctgccacgacctctgctgccgcttctacctactctggtcagtccaaagccgctatcggtagttacttcagtaccatgactgattcctttcattttcttcttttctggttaaataggtcacgctacctacttctaccaggaggggaacgccggtgcctgtggtaactacaactctgacgactcccatgtggtcgcgcttccttacgccctttacggaaatgatggaggctctccttccgacgtgagtctgactttcctaaatcagttgttgtttgcactccgctgatgtgttcacatgtgtcatgttgttgttttgaagtactgcggcaagaccatcaccattactcgaaagtccaacggtgctcagacgactgccaccgtcgccgacttgtgccctacctgcactacgacctactccattgatctctctgttggcgcattcacctcaattgcctctgaggaggagggtcaggttgatgtgacttactcattcaactgaatgtttgaacagtacaggctgcattttgtgcatagttttggtttttcttctctttctctttttcaagtgtcaaggctggaaccttcactgtcacatgccggtcatggccccctcatttccctcttttcttcctacctctctctcgtcgtcaccataacgggcgcgaatgactggggaccatcatctgaggacgggaaaccccctcctagcgaggctctttgctctaccttgatatgttggttccctctcgtttcgctgccttgtcaaccttggtcacgacgttataccgattacaaacttggcggtttgcccatctcttgacgagaatccgctcggggcgaacactggttgtttttcattgattccccacgccgctcttccttgttactccgtcacctccagactttatatctatactcggacggttgatccgtcgatctattagacagtcatctatctctccctattttcgtagagtgccaggttgcactctttgatcaatctttttttacaccacaaaacactgttattcactcaacgattcaatcatagtcgaatcacatgttcgtcaaaagtaattttgacaagacaaacaatctggaaaaacaaagttgtatatgcacgaaacactacactgatagctacggctgctattggtctacttcaactagatgagatccgttcatatcctaacccttgagcctgctgacgtctacgacttctaaaccaagcgaacatcgtcgagcgttcgcccgcctctacctcctcaacaccatttccatccccattctgaacttcctttgctttgccatcaggcaagacgacgtacgttcgacctctccattcaaccgtattacccatcatcgcaacaacccacactgggaacgccaaacactctctgatcatccatgctcccaaaagttgaaatcgctctccggattcttcagatggagtgggagacaaggaggtcatcactttccaatccaacgtggcccacgaggtccagtgaatgatccagaaagccaagaacgctttccaccaaacaaggttcccaaagaacgattcagacagatacgttcggagggcccagaaggtcaggaaacccagaaccacgctctcggtcagcggctcgaccaatgtagcagctttcgtcatttccttacggaccctgatccaccggacgcgtctccagaagtaatctcggaaagtcatcggtccaatcaaattgattgccacatccggtgtttcaattgaatgacgaatggatagttgatgcatcagggaaagagccaacatgttgtcttctgccaaatatggtgaaaacgaagctagacccagaatcggtggtggattagaggccgggtctgtgggaaggaagaaagcaagtgcgagaaagatcaaaacgggtggtgcacgaaaagagaaaagcaaagaacaatgaaacaggcatggggaaaatgacacggacttggaggttttctaccaggaatgatcttttgcacatcggatttcagataaaagttagatttacccatgacgcatgaatctaattctgttctgtaagatggtttcaatttggaatcccaaaatgttgcatctgttagctcatcaggattcgtacgtctgttgcacataaggctacttgaggaagaagaagaagtgctcaacttgttgattgcgagatacatcttcgcgtggttcccgttcaagaacacacgttcgagccaactgcccaatggtctattccctctaggagggatcaccgcaaaaggtacatgatggactagccccactctttgcttctcagttttgtgtccagaagacggcaaatatgaggtcgaagatactgaggaagaaggccctgggttaagaagaaattgatctatcgctcgggacaaggtctgacgagaggggagaaggattccagaatcgagcacccagagatggtcgtattttgccagcgcaaatggtttagctaaattgttgatttttgggtttggtcctaaaggagtttcacctgtgacagtcatcgagagaagaacgttccagtcatctgtttaggaggacaagatcaaagactcaaaatgaaacagacgaaccgaccaccactcttacatctaccccgtcctcccttccttctcttgcgccgaacctgtcaatcaactctcttactacgcctaacgcgcggtcattctcgtctgccaaagaaaaaattatctcaagaggcccaggataatcctgggtgaaagaggaaagcaggttttcgtatagatttggatcaagtcctttcagcggtcgaagaatggaaactcctggcttcggggtcggtgtgtctaaaggaggtgctaccgggcgaggacgatagcgacgaatactgtatttaacacacgtgaacaaacatacaagtagtccagatatattcccatcagcatcatgctatcttccacctgtttaattttcccaactaaacggctggaaaagagatgagagaacttgaaaatacttacgcgacggagagccctagaccagaaatcgcccacatgacgacataccagacgagcaccagcccggcaagtccagatgtcaaagaagaagtccattgatcatccaacagatcggaacctgcggaaggagtagccgttgccactgcagacggcgatgacgccattgaacgaagagagggttgacccattggaaagggcggcatggttggttgatggatggagaatgacgggagaagcggggaagttaaaaacggaacctttccgctaccaacgtcgacaccgatctgtccatactatcttctacacgctctcatcaatggactgccctatactctctatcgcgggctctgacccggtaagtctgtctgtacttggttgtatatgtgcctatgtgtgtgtttgtgtgtgcatgtgtgtattttcaactcgctcatctatttcgtctacgtagtccggaggcgctggcattcaagccgatctcaaaacgtttacggccttgagcacatacggcatgaccgtccttaccgctctgacctcacaaaacacccaaggtgttcggggagttcattctgtaccggccgaatttgtcgtcgatcaggtagatttccatcacatctattggtgtctgttatatggtgttgacaagaagctgatgctcatgatgtgtcatcttctcatcccttcttactctcggtaaaaaaaaaaaaaaaagttgaacgccgtgatgtccgacattcctcccaaagcaattaaaacgggcatgctcgctgatgcttccatcattcgatcgctctccgaagctctcaaatcaactgcctcgccccgcgtgccgctcgttatcgacccagtcactatatcgacctctggtcatacccttcttcctactgatgcaatctccgcgctcgtcaattcgctgatccccttgggtacattgctgacacccaatgtccctgaggcaagcatgcttctcgccgctgcggatccttctcggtctcaaaaagaaatcgatagccttgaaggcatgtttcaagcagcggaggatttggtgaaattaggctgcgcgaacgttctcctcaaaggaggccaccttagtttgtccttggcggctgtgaccgaacttttggatgaagaaggagcaaagaagacgctggaagagaaaactaagtgcgagatccaggtaatctggcctcaggaaatgtcaatcaagattcttgatgccttagcccccggtaaagaggagcaagataaaaaggttgtgatcgatgtattgtacgagccggctgagacccgaaatcaatcaaccgggcgtttcacagcaatcgtcagtccactagtcgagacaaaagatacccatggtacgggatgcacactctcagctgctttagctgtctttttgggaaagggcgagacgggtacgtatgctgtcaaggttgatcttgaaacagagagtatattggaataccccacagcgctgatgttcgactaattcaaatctatttgacagttcaatcgtcgacgatactcgcggtccagtatgtaaagcgagcgatcattgcagcaaccttgcatcaagtaggatcaggcagcggaccactcgatcatctccattgcatcacatacaagccgcttcctgcgttagttcatcctgtcatcactgatataacccggcagattttgatactaacttgatttgatttggcaaatcaattccagtccgactgcgttaaacccttatccattcacaactcacttgatcagttcgataaagcccctctggaatcagtacgtaaaccatccgtttgtggtccaattgggcaaggggacgctcgatcgaaggcgatttgaaaattacatcaagcaagattatcattatcttcgggtcggttctttctcttcttcttcttcttccttcaatcaattcgatacgcgtttcatgcccaatttccttcacaaacattggtctcacgtttgtcttgagacattcaaatagcactacgctcgagcgcacgccttgctttctttcaagaccacagacttcaaggatatcaaagcgttctctgaaattgctctgcatgtagctcgagagtcggagatgcatgtcaaagttcgttcttgctcttaaaaatttcattgaagtttcccaagccatcatgttctctgacattctgagtaattctttttctattcaaatgtttttgcatacgtagttctgtgaaaccttttcagttgatcttccccagctactggcgactcctgaaacgccggcgacctccgcctacgcgctctatattctcgatgtcgggcaaagagggtccgtgatggatcttttgctcgcggtggccagttgctgtttaggatatggtgaggtcggattgatgctcagagaaaagatcgataaggcagaagatggattttttgaggagggaaacccatatcagcagtacgtacctgctctctcttctccaatcttgctagcttcgagatatcaagaatatattgacaagtttggtgaaatcaatcggttccccatttttttttcctttctgatttattctgtaaccaacagatggataaaggattactctggacaagaataccaagatgctgttacttcctccatcagtttgtccttttctctatagtcttgagaaatgagacgaacacttctcgcgctgctcgaccttctgactgacttctgtctctttcaacggtaaacccatctgaacaacagagacgctcgagaccagaattgctgagataaaccccacagccagtcgacttgctgaactcacaaaaatctgggagagatgtaccaggctggagatcggattctgggacggcgccatggaccttcaagtggatgatctatagatgagcttttcttcctacaaaactttcatcactatcttcccctatctttcacttctctttttttttcctcttgtcattgctttgtgttatagagtaaattattcatcacttgttagattctcaggatgatgaatgtgctttcttctttctcagcctcattgacttttgcactctcaaatctttacctttccagtctcgctaagatctgaggaaagaaaacacaaccccatatgacttggcaaaccaaaacaaacacgctatagcttctacagaaaaggttaccccgcttacgctctcaggtcgttttattacaaatcaggtagagaaatcatgtactggggacgatatgaaaggagactgctccaataggtccagcatgtttccatcaagattgtcttcatctacttcctcttctgatggaaacctacggttctatatgtgaagatggcaaagaaagagaagatcagtagtagaatggcgaaataccagcaacagatattcgtgaatagtgtcggatatagatagaccgcacataggtgtgtagaacaagcgttttgcccaaactatctgactttagtggatcaaagaatccatcttatgccattggtatgctgatagtccgcgaaagaaggatgattgactaacctcagatgattccgaattatagctcctcgatgcatatctggagtttacatcatctcgttcgattgtgatggtttggtccatatcttctctccacatcaccgatgattgatcacgttgcttccgtttggatttttcgactttcgggtccttagctgtggggtacggtccatatttgagttcacttgttgagagatctcgaggtggttcatgaagtttacggctagaagattcagaaaagggcttaggcgaggaggaagaagaagagagggcaggcaggctggagatatatttccgagaagccgaaaggatcgagggaagctttgtgatttataatcacgaagagtgatcagagacatgaccctagggatgtcaaatgaagaggggccgctcacctgataaccactctcaagcaaagacctcatccccctgaagctcttttctgaagaagctatacgtaagaatgtctcacacctctgatggtgtgcagattcaacgtatgagacatgattatgcttcaatctttcagccattctgaggaacaactgacctttttcaagtgatttccgctcctactccccaattcctcaacagctcctcttatgtcagtcacagcttgcccgcttaatacatcagactttacacatagacctaacaaagagatcaagagagcttctttgacaggttctggagatataatgaccaaattaagctcataggtcagtcgagatgacaattgacttaacttcatgaaaacggctcaccatccgaagtttctttcaggcaagccatcagcacatcactcggaagagatgcgctcaactcttttgagaaaccctgggtatattcacacgccagcactgctaagatcatctgagttgtcaaggactttggagtcgtctcagatgactttgcgaagaaagcgcccaaaaacgcattttgtgcttcagtgccggctacatgacagaaagagagagagggtattatcaagtttcagcctgggttgaaaaatatacaacgtaaaccgttccgatagttaccattagatataatgtttagtacccgaccaacgatcgattccaagactctgtctctatctttgtcgtctttattcattggtttatgggcatcactcttcccttccagaatactccacaagaggcgtgcggtacgagtgccatcatctgagcgagtcaagggaacgcccaccagtatttccaaaacctcgagggatcgagttttcagtatttcgagattagagtaggactttgatgttgggaaagaagctataattctgtcaaggtgaagttcaggaagtgaaggtgacagtcggctcaaaatcttcaacgtctattgatcagaagggtcgatgaaacagtaagcaagatgctgtagataatatcagagtatactgtatagatttgacgaaccagctttctagcaagctcgtcagtactattaagtccattcatgatttgttccattcctccttcattgagtgagccctcccagacgctgatatgcccactcagagcttcgagacatctcaaggcgaaaatgtattcgttaggttgactagagtgaagggcgctttgaatggactgaaagaatgaagattgggatgttgctgggagctgcatcagagaagaagagaatgattctggaagctggagcagaaggagacagatctggagaataagtgctagaattgttcccgtttgatgtcatcagataaagccttttcacttgaccagagggttgacagaatgtagagcctactttgtcggtgtgcctgagagcttgatgcctcgattgaagtactcagtaatttgactagatcatctccctgacttcaggaaagaacaagaatagatatcagtgtgtgaaggtatattcaatggtaacgactatcgcacgaacgttccaaaattttcgaatgagaggagagcaagtgtttgaatgacctccagttgaacagatggcgataatccagtactacatctatcaacattggccgcaaggcatttcatcaaggcaccaatagcaacgtattcagaaaccagcgaaaactggcccattgaagatagaaaatcagttccacgcgtgagactgtgttttgatacttgcttgaacactcacttctatcattcgtctcaaagctcgaacagcatgaagtgctactccagtatctttgtcctctaagcgcttccatatcttgcgctctttcaatcccataaggacgtctggtgaatctttcgacaggcttgtaagagcacaaagagacaaacgcctgatatccgatctatagtgtgttcaggagattcgctacgaataagaaagactgaagaaccacacaattggagaaacaaagttttcatatgactaacgacttgtgggagacgagatgaaccagctgagtttgaatggcagggacgatatctttggacggattttgaatgattgagtttaaggcgagagcgatcgtgggtacatgagatgaccgaagatcctgtagttggacacatggatcataatcagaagacaattaagctttctattgaaacgagatgaccaactttgaatatagtattaaaaagaagtagtgagaagtcatctgttggcctgagggtgaggttcaggtacagataacctgcagtcaaccaatattcaggaggtcagttaatagcatcatgctcacaactccagaaaactatgagtcagatgtacctgctcttctaaccgaagctggtttccctccttctgccaggttgagagcaagaatgctggcaaaatcgaggttttttctggtagaatctgtagcgagaggttgtacagttgcgatgtatagcatgaagatgagacattccctagccgaagtctgcgttgttgcagacataccatgagatcgatgactctatgtggatgttatatgcgaaggaaacttagtcttacctccctcagcggcttctttctctgagtgaccttattccggatggtgtcaatctcgtttctgcatataaggtcgagctgatggatggaagacgcctgctcgattttgtgaacaaacgcatagtgggccggcgaaagagcggaagagagcaggtaggatgtattcattttatattccgtcctggcctttctatttgttatgtcgctgttatcgatgaagtctgattgagaaaagagaaggtgatgaatgctatgaaagggtttgttcaccatgttcatcttgatttccatctttccatctgtttcggcgtagagcgagattcctatgtacttaaataaattcatatatcagaaaaagtcacagtaaataattagagacttgaataccctgctggtttgtctagcaacatcaccgtcattgtcagatggacaatctaagcgatagtggtagcggcaggagtgagggcgcacctttcccaaaaccgaaatcttcggacggcacatatcagcttcgtcgtgagtgtgcgcttcgttcttatcagtagccttcgttccgtcacttaaatccgatcaaatttcgttgtctgagctgatgtttccatttgaactcaaccgaaatactctggtagaacaacttcagcagctcggtctctctactcaaggcaaaaaagaaaccctcctgaagtctgttcaatacgacttcgtgtattggatgcagaacttagggattgaccaacgtttttgtcatcgctgcctctctctttacagacgtacgcgcaaagcttggaatgaacttcatggcagtcaagaggtcacgtcagatggactcgatgaggaatctttgactcaagatcagaccgatttcttctcaacaatcaaaggcgtaggctctatcatctactgatcaggataacgattgatcgtagacgtagctgacacttgcactctatggccggggtcgaagcgataccactcgttcctcgttcttgtaagacacccgagtattgtcgactgctttgcctcatgtcacttgctaatctcaatcagtctggaatcaatcatcattttgctggacaggatatcgaggctacttgcgagagcggtgatcataaatttggctatcccaacgaagtgattgttcgttcgttcaatattcaaacagcatgttcatcaacgtctattgtgcggcttacagggaatactcatccattacaggaacttccagtagtgctactgaaatggcgcgctcgtcaaaagacagacttaagttcagagtcctgtaaagaatccactagtgtcacagttatggagctatacatagaggatgagtttcaatcttatgtccgtccgactttccagccgaaactatcaacgtattgcacaaccttaacaggaatcaaccaggtaagcgccttgatctctcctccttttccactctcccttgtatcgtttgttcactctgtttctcactcggcctgtctatcacgtcaccgctaccatggattttgaaggagacagtcgatgcagcgcctacatttcctgaagccatagtgaatctcgagacatggatggcaaaacacggtcttgtgtcgaattctaccttgaaaaattccgagtcaaatgacagaaagaccgaatcgtttctctggatcactgacggagtgagtctcagctttatttatttcattcttctcctagtttttaacagaggaacaaatggaaaaatgtagagaagactcatgtctatatcttgttcttggggacctacttgcagccattcgacattcgagactttgtttgtcctggactaccttttctcacagtactgattcctgtgcctttaacacccgtactgactgatcaatgaaccgatacatgacgtaatgtggattcaaaacagatagctaaacaatgctttatatccaatatcgctatacctgagtacttcacaggtgacgtccttgacatcaagacttttctctccaaatacttgaccagactctggctagaggaacaggcggaaccgtcactttcttccccttcatcaccaccatcgcctctcacttcagcatcatacactgtagaagaggaaataaattcgaccacagacaacataaaggagagttacaccacgaacacatccagttcctctacccttcttccttcgacgtcgccggctgcaaatcgagcgtctatcaaccccaacatcgacccttctttcctcccttcccacttgattttgtctcagtctcaaccctcttcttcacccaaagcccctatgacaaaaagggaacggcatctgacaaagatgcgtgcgctagaagagaaaaagaaagatatgacttcgagaagaagaaagagtggtaaagggaaaggaagagaaccgcctaatttttttgggacgataaaaaagaatttggagaagctaggattgggtgagtttgaaggcagacaacattctggaatcgatgtacgtttctatctccttgttttgtctcgttttgaagatccaagtcaaggaggttgaggctgaagatgaatcttgtggcaaaatatgtcaaaatacgataggattcaagaaatatcgctcgtttattgattgagctcgctcgtcgaggcgaaaccttatgtccgaacttatttatcaaatctggttcgaaaacatggccttggatgggtgttgaacgaggagaaatcatctggaatgtatcccgaagatcatgaatatatgtgtgtccctgcccctgtgcctgtaggcgtatctacttcgtcttctctttctctcaacatttgacccgtcgctgtttcccagtatgtacattgaaactacgatcagaaaggggggccattgatacatttcttatgcacttggttatgatacaagcaaaatgagcagtttcttttcttcttcaaacaaacagttcctctttttttcacgagctgtcaaacctgatcgataaggagagaaacggaagaatataagcaagagacaaagacacatgggtgaaagaatcagcgctacgtacaaattttaagagctaaccgactcttgttttcttttgagagcccagatgtggtccgagatgtatgcttgggcttctagcgatgatcgtggaagcttagatgctccgtcaattgtccctaggcagttctgtaagatgacaaagcaagaggaaacgaaatgagacaaaatttgcaagcgatacgtagttcaccagaaaggacatgaacaagatccctgactttttctctacacaaacatttgaacggcctgtccatctcccattccgtcgaggggtagaagaagctaagggcatcaccctcagagaggtctctcaaggcttcaaggtaccagtcgtcaggattggatgtgatattgaatgcgacatttgggttacatgagtgattgatatacaatagagaagtgttgagttcgatattgtctgtcggtaacactccgacttgaacggtagaataggccttctggggttctctgaataaatcgaacggacatctgatcagtatttactgtgaaggaaaacgagatcaaggcacgagaccaaaacttgcctagtccatccttgaatctttgtgatggagtctccttttttgaagtctttattaacaactaggtaagagtctgccgtacccggcctcaaggtgacggtgaggaggcccggatgtgattgaaggagttccgcgctaggatctggagaagcttccgcctccgaggtatatcccgagtcgatgtatgccatgttggctttttgtatggagatagtcatttttgtgtgtgttttaaaggaaaagatatggacggcaaatggatgagacgagtcaaaagcgagcagagtggatagagtggatagaatgagtaagatgatagatgcaacattcccgtcggttcggtcttaagaagtctgaacggaggggagccggttctggctaaccttcggttaaactcgggccggatgatgccggcgagagtgtcgtcgaatttcctgctcgttctctcttctcaagatatctcacgtttgtctcagagttctctgagatcatatatttgccatccaagacaatgctcactcaggttgcttaaacgttgtaaacagatgtatgtgtgcgtgtatgtctctacttcagcctaaaaaaagggcgatcctcacaatgagtcatcatggtactcagtcaaagtatctaggcatatataatgaagtatctcggccattattgagttgcgttgtgcttcggggtcaactcatgtcacgtatcttcatcgttctcgtgatctgcttgtaacacatccacagaagaacatgaccaattctatccaaagtgttcgcaatacaatgtaaacatcaaagcagattgtatactgaggctctctggatgcaatggccgagtacgtttacgctgggaatagataggagatccgaatccttgtgtcgagaaagccggatgttatgcgatccaatatgttggttgatcagatttatatgccaactatcttaatatctcggttagagcgagatgcagatgagaagtatatgggaagatttgaacgacaaactgatagaggaactagtttgaaaggaaacgcatcttctcctccagaggcttagaggcaaaacgatccatctcggcgttgttttctacattttctctcatgatataagaaaagagcttcgaggaccgacaaaacacagagcgatggaagtatgcaagcaaatggacatgcgtagtttgagttcttcggattcaaccaaatttataaccctagcaaaagagtcatcatctggatcaatcatcttttgttagctttgcctaaccttcatctcaaacatcaacaccagctactgtcttgactaaatattcacaacaatcaagaagagaaggatagaatcatacatctagtcagacaaacatcatacgtccgcgatgtcatccagaacttcatcagcttcgttcctcgtgattggcatgctcaccaccggagctgcaaattccctcttgaccaaatggcaggttcgtgcatttcagctgaccatcacacgactgattcttcatcgaatctttctttcccaagcaatagaccagctgtatactgttgcttcactatacatattgttaattctgtttttcgatcttcttttactcgatgcggctcattggacttacaggatatggaatggttcgtacctggatagccggtcacagaaaggattaatcacaaggggtttggatgatctattgactggttgtatctcgttttctctaccctcatatctctatggatgattagtgtcgaaaactgtcagagtcctaatccagcagaccgattagcgttcgaacagcccgtatttcagtctctgagtatgtttctcccagtcattcttcaacttgaactataatgatgctgacgacaacgtttatgtttcatcacctatagacatgttcgctggagagagtgagcccagatcatgctcatctaaccattctgatttatgatatatcatgtgaagctgactaagatctgtttgcattaaaaagtgctctgtctactgcccatcctatacaactaccttgccagcccaacaagccccttctcaggcaccactagagccgtgcgcctcttccaaaaattcggccggaagttgactcccggtgatcgtaatgtagaaaactatcaggcgctctcgcaagatgaacgagaccgtcaggaagctaccaccgctgcaggcatcgacgatgacgacggcgatcagccgagtccgttctcagagtcagaagaggtcgaaaaggccttctttggaacttggaagatgctcctgtttttctttcctgccttttgtgatatgactgctaccactgtaagttagatatctccacatccaataattttcgatgacccagctgatcctaccaagttgtcatctacaaacagttgatgaacgccggactaatcttaacaccggtgtcaatctaccaaatgacgagaggctccctcattttattcgttggggctctcagtgtggtttttctccatcgtcagtctgtcctttggcttgcttgtattatttgtttggtcattagagaaggctcacattatatcctgttgaccaggccggctgcatctctatcaatggctttccttggtcggagtcatgatcggagtgacgctcgtcggcttgagtggctctctcaaaccctcgaacgaccatggagaagggatcgtcttacaagatgaagagaatagtgctgcagtgtttggaggtattctcttgattctctttgctcaggtcagtctcagcttgcccatcaacgagagctgctttcttcgaatactaaaaaaaactacatcatatgaacctcgttctcagctgttcaccgccactcagttcgttgtggaagagaagatcatggcaactcattcggttcctcctttggtgagtcgatatttgttttaaggggtcttcgtcatccttcattgtatgtgctcatagccttcgattgcacacagctcgcggtcggactggaaggtttctttggctttatcgcaactgctatcgccatgcctatcctacatattcttgtaatactttgatcaattatcttcgtaccttggttggttcaatggcctgtcgctgcagtctgactgaaagtcatctttcttacgcctcatctagttctcagaaaagagtgattactttgatgtctacaaactctaccaccaagttaccgagcatcgacttgtttgggcgctgtcgctttgcatgtgtgtatatctcaacaggtcaaatagctatggacgtgattgagaatatgtccttcttcattcttctttcttttagtatgttgtccattagctccttcaacttttttggactttcggttaccaagctgctgtcagccaacgctcggtctactgtacgttgtttctgctcatttgaactcgtatcatgcctgatctttctgacctgatatccatttgctatctgtcttcttcagattgacacgtgtcgaactcttctcatctgggctgtctccattggaataggctgggaacatcttatctttccttccacaattcttcaactctcgggattcgcatttctcgtttacttcactcttatcttcaacgggatcgttcagcctcctctcaagagcctccgagtcactcctcaaggagagatcgcccttccaggaggcgacgatgagcttagagaggaagtattgggtgttacggcagagttgccagcagaggggctggctggaagagtcgggttggatgtggtcgacgtcgagcaaccgtctcatgaaagcgcgactaggtcttgagatgttgtctccgttaaacactttggtacactgaattcatgtagtttttggcaacgtcttatatagggtcgtatcggtaatgtctctttctcggccgtgattttgctttagcacagccacacctgttatcgcagcgcgtctagcttaattttcggggcgagttgatagccgaacaaacatttttttctcttcctcttctaccttcctttctgatcatcaccaccattgatatcgttcgtcctagatcctatatgcttagtgtatagatttggttggcgctaggtcagcttatcctgcgagttcgtttgataaatagatgtctgctccttccgagatcgcgaaccctcctgctaccaccgaggtgcccacgagtgatgtcgctcacttgaagtccaagatgggtcttcaccgtgcgttcttttctaccgcaaatcctccttcataccttccttatcatttaacttatatctcctcaaacttctgtgtttgtgtacgggcttgatactgctattgtaattgtgtcatcagccaactttcctatcaagggcgtcacattcatcgactttttgcctatccttagggatccccaggatttcgagatgctcctcactcacttcttgaaccacatctacacggtcaccatgcctaaggctggtatcaagaagatcgatgccatcgtcggtttggatgcccgtggattcctccttgggtgagttctgtcttggtttttctcctcttatttccgcagaagaatatcatagtgagggaagataagagggcctgactttggcgacgcgttttctcttgctatcatgatacaaaaagacctccgcttgctcttcgattgggatgctcctttgttcctgtccgaaaggccaagaagcttcctggcgcatgccacaaggtgacctactccctcgagtacggagaggacgctttcgagattcaggagggttcccttccggagggagccaatgtgttggtggttgatgatttgattgctactggtggaagtgcttctgcggccggacagttggtcaagaaggccggtggaaagactattgagtacttgtttgttgttggacgtaagtttgtttcgatcatttgaaccatcctctcttgcagcctgttaacagctttcattgtgttccatgtctttgttccttgttcctctggaacagtccccttcctcaacgtaagttctcgttcaggatcaaacttttattgatcctcttgactgacttttcttttcaccgtgcctttgaattttgacagggagataagaagctcgatgctccttcctactggattgtcgagggagaggattaaacgatctattttgctccgccttcctcccgttctcttgccctacccttctttataaactttgaacgattcgatagatacaaaacactgcttattcttgctcttatctttgagagttttgaacgatagatatatgaatccttttactgttggacctctgagttcttgtcaaccgggtcaaagacttgcgcatatagtttaacttgagaaaagggtttaaaaacatgagagacagtggaaagaaatcaagatgatcatatcatatcgttttactaagaatctcataatcgacagattcatggtcaggaaactgggatggcgagatcggatctatcataaacctgtcctcatttcaagtcatcaaaggaggcacgagagagtgttaaatggaattgttggtgaatatcgaaatgagtcacaagcgtaccctattgattcgtagaaggtcgatgctttcgcgttggctacttggtgaccccatgagaaggaataacaaaccgttaaaaacatcgtcatcttgagttgtccaagagcgaggaaaaggacaaaaagagagagagagcaagacgaatagagaggacaaggagaacggacctttcaaaagggtcaaaaccatcttccgcatatttgtcttcttgccaatctctcctgcagcattcacgaggtatctccctaatcctgatcgttggaactttggattgacggaaagctcatatctacaatacgtgttcagtgtcggtgtaagcatgattcatataggcttagagacaatggcgaatgagggaacaaacatgtagacaacagggtccaattcatcgtctaatctctcctcctgatcgaagcgaaacatgatgtatcccgccatcatatttgatttgacttctctcacgatcgcgtatcttgacgacttgtggaacaattcttttttctttgaggttggattccagccgaaagcagaatttacgtatctgtatgtgtacgcgttcgagatgttcattgatatctatatcgactagcacgatgagaacgaagacaaagacatacagctgacgcatattcgtagaaaatatactgaaaatttcgtcttgctctgtctgtaagaaaggagctttccgaacaatcgtcttgaattcgtgctgaccctgactcgagctgggcaaggaaacctcggatatgtattgtaatatctccactgtcgagagctaaagggtgcgcggatatgtatctacagctttgtacatatactcgaatatatgaggtgagcggaatcatttactcaccttctgagctgaagcaaccaaactagcagaggatgatgccgataattcttctgaggacatctttcttggctgatagttggggtctcttttgggtttggatgaagagttagatcagatgtattgtgggtcatggctgactaccgatagtcacccaggcatttcttcatacccttcttgagcgccgcgatgtatgcacggtgtatatgcgtcgagtttcaatatgtcggaattgccatgagaaggcgagtctgaatgagaacagattggtcgtcttatcgtctggtcgtggagatgcttgatagctcgataacgagtatggaacgaccttgcaaggagaaggatctttccatctcctttttttcgtgatcgcttttcagtaggcttcctaatcttttcgaaaacatttcagttagcgcaagacgagtctcgcatgtctacaacatactcgcgcgtacattaacaacctccttacattcgacagatcaaagagcaagaaaatcgaaagccttgaactgatgagcataacaaccaagggcctgttcttgttatatttcatgctggcatcaacagtagttggtatgttgtatcctgagaaggtcgtagttagggttattcacagcccaggccgatgacaatcactcttctgcccaatctcagcatacatcagcgtcattaccatcatcagcgtcattaccatcatcagcgtcattaccatcatcatcgtcatcagcatcagcatcagcatagccagatgatgtttctttctgcagctaggacgaatgtcccagctcggttcatctctcatcaatgcctcattcgatctccagccagtttactttcttccagatgcctctctctctccttccctcggtccgctaaagagcaaaaggaatcagaagagcgattgcctgagtcgacactgacgactgagcaaagcacaaaaccacacacgacgaccgattcaaagaagtacgcaagcacactgatcctaccaaagacgacattccctcaaagaccgaatgtcaagactcttagagaaacttttggagaaaagacgatgggtggattgtatagatggcaggtcagttcattcgccgatatcggacgcaacatcagtggaattatcactcgtcttcgtcatcaaaaagtattgattgtacttggggttcctcttgatgatgtagagagaacataacaagggaggcaaagaatttgtttttcttgacggacccccttatgctaacgggaatttacatatgggtatgtaaagccatcttaaatcctgttactcttgttgtttgcatccattgacctgaaagtctacgcattcttggccgatcttttaggtcactccctcaatagaatattgaaagatattactaatcggcatgaagtgcttgaaggatcgagagttaattatgttcctggctgggactgtcatggacttcctatcgagaataaagctctcaaaaaactagacgtccgttcttccctttctgtcttgactttctttgtctcgtggatttgatcacatacacacacgtaatacaatctccgtggttctcattttctcgacaatagaaagactttcatgacttagctccgagcgagatccgatcagctgccaaaagtctggccgaagaatgcgttcagttacaacgaggagaaatggagatgctaggtgtgatggccgattggagcaaagagggaacgtatcggactttagatcatgagtatgagatcagacagctcaagattttcaagatgatggtggaaaatggtcaatcttgtctttcttctgggtctcaatacttggtcaaatgcgcaccgatcaactaaccgaagccaaccctgatgattgaattcttacgaacaggtttgatcaagacacatcatcgaccatcttactattctccctcatctcgaacggcgttagccgaggcagagttaaaatacgtagaagatcacgtctcgttgagcgcgtacatcaaattgaacctggcacaggctggatctaagttggagaaagtgctcgaagacaaccagatcgagaatcagaatgatatttcattactcatttggacaacaacgccttggagtatggctagtaacatggttcgtcttctaggtcctgattctttttccagtatagctcttttgctcgttcaaagtttatttcgttggtcgatgatcaatgcctctgaatctgtgtcttcttatttacttctttattgaaatttaattattacttccgacaggctgtcatggtgaacacaaatatggactacgcacttgttcgatataagtcgacaggacagcttctgattgctgctcaggatcgacttggggatcttaccaaggatttgggagatagcaacagctcaacggtagagggggtttttgagaagttagcaactttcaatggtgaatacgaatcaagatacttaagtcatacgaggctcatttccatcctcatatgaaagcagaggccgatcagatattgttcagcccattaattgtgattactctccttttcgatcacaggtgccgatctgttggacaccacctatcagcccgtctttgtcaatacgccctcatcggacaacgcctcttcaaatccttctcttctacgcatcatagcctcttctcacgtaacttccactgtcggaaccggtcttgttcattgtgcgcccgcgcacggactcgaagactttgttacgttcaaggaacatgctgctactggcggattgtctcatccgaaagatttggtttgcccgatagacgcggatggaaagttcacagatgatgttttagaagacaggttggtcggcaaggcggtcttggaagaaggaaatgaaattatggtagacgttttgaaggacaggggactgctattgaaggcgaagaagtatacccataaatatccgtacgactggaagacaaaaaagccagtcttgatcaggtttgttttcttttgtccttatgttgctgatgctacggccatcttgttcaagatatcccatcgatatctaactctacttcatttggcttcgggttacaggtccagctcgcagtggttcgcaaaccttgaaaaagtcaaagactttgctttgaaatctctctcagacgtcgagttcgttcctgcaagctgtcagtgtctaccaaaccgcatctagctccgcacttgtcggtgtaagaaaatgctcattacagttcttcttctacgctatacagcccgaaaccgactacaagcgttcatcaagtctcgatctgaatggtgcatctcccgacaacgtacatggggggtacccatccccgctctctacgatgagtctaccgacgaggctattttgaattccgaatcagtatctcacatcatcgacgtcctgagcgaaaaaggtctatcccactggtgggatgcccctgttgatgtgttcctcacgcctgcccttcgagagtccgggaagacctaccgtaaaggaacagatacaatggatgtatggttcgatagtggatctgcctggacgaatgtcgccgatcgttcgtccagtggccatgtggcggatgtcgtgttggaaggaagcgatcaacatcgaggttggttccagagtcttctcctaacgtacctctcggcagatgcaaaggtcatgaatggcgaaagtaaacccgttgctccatacaagacgatcattacacacggaatggtgttagatgactcgatggaaaagatgagtaagagtgacgggaatgtgattagtccggtttctatcctggacggaacggctttcgctacaaacggaaacaaatccaaggtatagttgaattttgacgtgtgctgctttttatccacacgcaaggttgcagtcctgtcgcttactttcttgtttacaatcaaagcttggtcctcaaggtgcagatgttcttcgtctctgtgcggcggcaactgactacaccacggacctctcgataggaaaatcatctattgagaaggcttcatctcagcttcagcgatttcgagtactgctcaagttttgtgtaggaaatcttcgagcggacacccagccaatcagttccttccatcgagatgatctctctgtggtatgtttttctgttttcttcttgaaacagtacatcgtctgttctaaactgatttaaggacacttcatctgtagatcgatcgatatgttcttcatagtctatggaaatactgtcattcgactcgttcatcttacactgctttcagctatcatcaaggtcagtacttcatacattgtctttcctgacgccagtgtggatttgttgaggtctgattggaagataaaatcactatctcttgttcacaaatcaagtggtcgaaaaaacaatattactcctcaacgatttgtctagtgtttacttcgacgcggtcaaggatactgtttatgccgatcttccggaggaaatgaacaggcaaattcacctgtcggtccttaaagaggtctgtcttgtccagccgctttgacagtgcttctttgagagaaaactaatgtccttattttacattttctacatgtgacaatcgctgaaaccttcaaacaggtcgtcaatgttgtctctcaagagcttggtcctattctcccatatctgattgaagaacttcattcgcatcggcctgatataaagaacacagatcgttctttctttgagcaaagacgacaaagacctgttagcccaaaattattcgcctttttccttcctttcttctatctgatcatgttgctgattgatttgatgatcttcgcctgatgaacacccatgtgaaggaggaatcttggaaagacgaagaagcagaatctgaaattgaagctttgatagagattcgaaaagctgttcgaacattaatcgacactggaaaaaaagaagagtacgtagcaaaacatcttcttctccttttcatatcatccttggtcggtttgtgtgctcttttcgggatgtttgtctcacattgatgatcgtcctcatagaaaattgagctcttctctcgaggctcatttggaattcacatctgctcccaacgggtccttccaaaagattctacagaaaaaccgtacgtcatttcagactttctctgttctcccagttctgcttgcatcaatgcgataccaatgggattaaaactcgatctatgtcaacaggtgatatactggctagattgtttgcagtctcacacgtgacgcttatggctcaacctatagatgaaccccaaagttgggaatacagcaagacaatcacatcaggtaaatcttgtagattctcttttcaatcattttacgaacactgattcacgcgcttggctttttgaacattgaacagattcagaagaaagaacttcaacgaccgaactatacgttcgaatctttccctcatccatgcacaaatgccctagatgttgggtctactccgcccctagggaaaacatgctgtgtgtgagatgcgagaccgtcgtcagggcggttacagaataaattagcggcaagaaagtgatgaagaatgatgtttgttgactttcatgattgtgcattcaaagattggaaacgtagagcaaggaggatatatctcttattgtgattacaaaactaaatatagcgtataagaactgatgtgaatcaaacagagacatgaacagacagataaagataagatcgacaggaagcgatataacataacaatcatggaaaccaagacaaactgggatatctcaaaaaaaccgttactgcccagacttgttggcctgttggttgacacgacaagatgacgaaagcggtcagagtcgacaacatttgtagtataaacatgagcaaatcaagcgaatcgattcaaaagggtcagtgaaaaaaacagatacttactagcaaagccaaaagttgcgagacatcgcccgccggggctgctgccgaggctgaggcagcagcagagggtggtggtcctcctatttgtccgggtttacctcccacaggtggcagaggactgtaaccacctcctgcagccgacggcgggatcggtgatgccgatgatgggcccgaacctaaagtcgggggttgcagtcgagtttgagtctgttgaaggagtgcaaggattccagggttgacactcattcctccaccagctaacggtatcgcggaagaagaggctgaagaagagggaggggggagaccagcgcttggtggggggtttcgaggatccgaagcggtcgttcgaggatcgatagcaggagcaggagggtaggacgatggtggaggtgcttgctgatgagggggggtgggttgatatccagtagtaggatgattgtaaccgtaaggcgtagatccaagcgcctggttagggttggcgtaatactgagttggtagagcaacagaggcattgtagggagcagtggccggttgaccagcataagctacataaggactgccagctggacccgaggcggatgcagcggatggaggagcctgagctggagaagcacctccacctccataagagctgaggagctgctggactttcttggctgcttccaatcgctcgtctacaggctatgaacgtaaaaaggagatcagaaacaagaagagtcagatgtggtattttgtcatgagggaagggtcaagatcgtacaggagggggaccgggtcgaccgtacgatgcggtggtaggagagggaccgctagcaggaggaggtcctgcgtaggagggtcctgcttgataagctccctcctggtatcctccgtagtctatggaaaagtcatggttttagcttcttcgttgacactgagaaagaatgcgatcgaaagtgactgaccccttccttcgtaccggccccggtctgctcggtacccttcctcgtatccccccccgtgactacctccacgtcctccacggtaagcagtggctccgcctcttcctcgcccgtatgaatatccgtcgcctcccctgggataatcgtcataacctcctcgtctggacggacttcgactcctctccctgctgtagccttctcgactgtctcgaccgtaatagccatttccagcaccggcaccacctgatcgactatcgtaggctccctcatagccgtctcggctatcatcataaccgccgccgtagccgcctcttcctcgaccacggccacgacctcgatagccgtcagtatatccaccacgggagtaactatcataactttggtcgtcttgatagtcggaacggtagtcgtcctcataccgaccgtaaccaccccgacctcgcgtccctcggacgcctcgacctcgacctcggtttcggctcaggtctcgagaacttaacgttgggtgttgactatgattcgataaggaggtgtaacagaaaaacgaagaagtcatcaggcggttagccatacatcatatggagcaagacattcctcagaaggagaacccaaggattccacatacagatcgtcgggtaaaggaacggcggggacatcccaaacatatttgatctccagtgtcccatcttggaaaacggatcgatcaagcctttctttggcagctcggaccgactgtgaagaaacaaaaaaaaagacataggtagatgaacacacgagagatatgaaaacaatttgaacccaccctgctatcatagaattctaccagtcgatccctgtcaaacaccaagcagaaaacggacagagtaaagagtaagcgcagattcaaaaccgcatcatctcgcaagtgagaagaaaacaagagggaaaacgatggcgtactcctgaatggtatcatgaggtttgatattttttacttctccgacttccccaaaaacttttcttagctcgacgtcatcgatggcccggttgcctggggaagcaatcaaggcaacatgtagggaaccctatataatttcgtcggatgagagcccacgtaagagacacagtcacatacagaaccaaaaatacgcatgctacgtacctgattcttgtcagcgtcgcaagcaccgctcgattcgtccggcctagggagcgagtagtggacatcgatctgcgatcaagaccaccaacaaatcatgttaagcattacgaaaaggtgatataatgacttcgagataggatatataatcgacttcaacgaaccgagcgacctgcgatctcagtgccttgcatagcctcctttgcttgctcagaggctcgaacatcgtactttggaaaaggcgctcataatcaacaagcattctctcatgaaacggaacatcgaagaagagaggacacacaaatgtgacaaagatcatccctcggttggtgatcaagtcgaagaatgttttgacttctccaaatgcttcgaaagatcttctgatctcatcggccaaagcatcgtactatcacaagtgtgaagattacgagaagttgaaggatcattgatcagattggacgggtttgttgacgtgggtagtggatgatgtattggaggactaggctcacggaaatgtttcgaatgaacaacgttctacaaggtctttccctattgactcgttcagctattaaagaatcgtgttcggcatcatcttgctctagtgaatgggtagaaacgatccgtcgaccacctcgacctcggtctatgggaaatcaagacgcatagacttaaatcagcttggctttcctcagaatgatttcactcttgtctggtcttcttctcctcttcgagtaatgtcttcatcttcccaaagctgaacctctctctctgacgtatagtctgcttgcctggtaacggattctcgcatgggcagtcgaatgaatcttcacgtggctcactgatctatcgtttcccttccactcgttctttgcaaagcgatcaaggccggagaccttcctttgcctcaacatgattacggtgtcgtctggttcgcctgttgaattgaatatctcgagatatatgtatgcgcgcacgtgtgtacgcgtgtgcgtaaattttgttcttcttcttttatttttcccttctagccgagtcgaagggtatagtaaaagagtcatacgagcagtggagggcggacatccaaaggcgtaattcgaaatagaccaaagagagaggccagaaaagagtagaaaaagacacagaggagaccgcaacgacgacttgaatgggaccgtagaatagctcaccagaaaatcctcctctatctccacctctgcctctgtaaccgcctctgcctctgaagccttctgactgaaaacctccttcacgagcattgtatcctgattggtaaccaccttctccgccctgagatgctgactgatcatgatatgtatcttgtggtggcgggccggaagcgtgttgagtcgaagccgcaggctggtagtactggccggcaggcacaggaggtggataagctccctgagcataagaccccgcagtttgatacgattgatacgggtcggctgtatagccagatccacttgtgggaggaggagcactgtagggatcggtttggtaggatgattgttgttgctgttggccttgcatggctaaatttcttccttctctcttgtttttcttcttgtaaagatcaaaactaaatccttttttcttctgtcggaactcggaacaaactctttcttgttctttctgtctgtgtgcgtgtgtgcttctggatgagggtacaaaaggagaaggcaagagagatggtcgtcgttgtcgtcgtgaagaagaaaggagatggtgttggcagcaagaagaaaaaaacgtgactgtgcctaaaatttgaaactccgttcgtgccttggatggatctgtgcctgttggctgggtgggcggtccgtgcgctgctagttgaaatgtgatccttatagacttcaatcggccacacctccatcccagctgccgacgaccttcgcacctttgcacctcggtgtctttgcaacaacacagaccccaacagaatgtctcgtctacaggcatcactccgagcggcaaccagacgttcatctccttcgcccttcgtggctactgccgcttgtcgtctttttttctcgccttccttcaatgcctattccactagctctgggtcatccccttcagatccctcgtctcgggagcccacctcgaaacgcatcactgaggaggagacttcaaagccagctgaagatgagacatactcgtttccttaccatcttccattcaaggtatagccgatcattcgtctttggctgccatctgatgattcaactgcaaccgcgttggctgattttttttgtgttttttctctgcttcgttgctcttcccgttgttgcactgacccgaaagggctcccgagttgatcctcctacggtgatccctggaaaagagactaggcctacttgggatcccaagatgcctgagcacggaaaattcaccgctgaaaatgcctgggtatcaaccattcctctcaaagttcgatatcgaaccgcccgaaagattgatcgacttcagcctggagaagatcttccggtcttaaatgaccctcagcttaagcaatggtgggaagatcggatgaaaggaaagctaccgaccaaccctaccacaccggaacaagtcagagagagtcagctagcttggaggcaggctaaggtcgtgaaaagacaacggattcgtggtcaggtcaaggtcaaagataagaaaactggagattgggtaggtcgactctactcgttatttcgtaaaagccttgaagttcttctccaagtattatacacactttcaatttctcaagtgataccatttattgaatatcaaacgacgatcattttgcgtatttctgtagaccaacaaggtggttggacagcgcatataccttccaaatattgttttccgtttgatccctaaccacacgccgttcatccgacccaaaggccgaaaaactgccccgatcgcgatggaaccctacaatccttacatcgccaccttccgagtacccaaagcaatcacgaagcaggatatcgcatcttacctcaaggcagtttataacttggataccacttttgtccgcacagccgtttcaaactcgcctcgagttcggagccgaaccggtcgatggctttctggtcagagtaggtacaactacaagcgggctgtcgttggactaaccaaaccattccactacccgaacgatccggacaacatgactccaacggccaaagccgacttcgacaaggatttgaacgagcggttctacaagaacttgattgatgaaaacgaagcacgattcaggctcagaggaatgcacaacaagcaatggggtggaggtaaccctaagagtcttccgtgcgtttttttatgtctctctgtttcttctttccatatcttagaaagttgcggatatagtcgtttactgactcgtgtctctacctgtcatcgacttttcttctttgtagtaaactgtttggtcgaattgcggagcgcagaacggctagagagaatcttctgcgagaagaggttgctcaagccaagagggaggaggctgaggatagtgtatgagattgagatatggctaagtaagacggaaacaaataaaaaaagatggcatgtgttgttttgtatcctatgaaatcaatcaattcttcgcctgaggagcaatctgttgttgaaaagaaaatgaaccgagacgagctggtctttgttcgaacagatcagaaagatagggcaagcggactgtagtctaaacgtatcaacaaagtaatacggattatcagaaaatcatcaaatctaaatccaatgaagcttccgcgaaatagatcatcttcaaccacaccgccaacatcgatatttaccaccccttcactcctttacttctttacctaatctttcttcataatgcctgctcgcaaagcgaccgatgcagctaaaaaatctaccgcttccactcgaagcagtcgatccagaaaatcatctccccctccagatgtggaagccggaacagagaccactggaattcttgacactgtttccaatgccgttcataccgtgacggacttggtatccgacgtggttgaaaccgtttctgataactttcatgctgcccagagagctttgagtgatttcgagtcggcagagatcccgtctgttgaggccatgactgatgcggtggaggatgtggtcgagagagtacaggatttaacgggaacgattgggaatgatgttgcccgaggaactgagccgactccggtggagaaggatgagaagaagacaacagcaaagggcaatggaaaaggaaaggaggtggaaacggagattgaatcaaccgaggtacccaagaaagctgctttgaccatggaggagagacagcagaagatgagggagctacgaaaaaagatggtttgtcttgtttcttatcctggtttcttcatgggtgggtctatcctgggtagtcattggtccatctgatcaattaattcttgctcctttccatcactgtatgctttatcatcgtgtttttgttgttttacgttcttcgtatccccttccttccacatgtcggctctgtttgcagaacgcgtcaaccgctgccaatcgaaaggatctgatcactgagcatcagcgaaacaagacaaccgcccgcgagctcgccagtctagagaaaaaaaggcgactcgcagagactctccgagaacaagctgatgcagaagagcttggagaggataccgaacgaaacaaaaactggtcgtacagtatcgaggacaacgatcgatgggagaaaaagttggaagagaaaagagctcaaacgaatgatggtttcgttggtaggtcctcgattcaacataccatatcctatccatatatgcaccctagcagcatgactgaatgaatctctctccctgttacctctctttatctcgccaaactggtagataacgcccattctgctcatcgagtgtacgaaaaagcgaccgccagcctcaagcctgatctccagacatacaattatcaaagagagcaggctcttggtcttccggctggaacactcacacatccaaacacgtcgtcctcaaaagtcctagcgagaatgaagccgatgacaagcgatgatttgtacagggatgcaaacgggttaaactatgcagataacaagccgagtgaggacgcggtcgatcgagtcgttcagaacttaaacaagacgtacatacttcttttcttcttctttgacgagcccatactttcttttgacttttcggaactcacaacactattcccttcttgttgtccaacagaatggagcttcgaaagaacaactcacgtaagcgagccaacgacgaagatggggatgttacttacatcaatgacgccaacaaggtcttcaacaaaaaggtccgtgattctcgagtctcaatgaagtcaggcattcacgtcgattggtagcttgcttctgtactaatcttcccatatgtcatattctcagatcaaccgatactacgacaaatacaccaaagagatgtacgttttactccgttacttctgtgaattttccgctgagctaattcagtgatcctctttcctctataaattttagtcgtgcaaactttgagcgtggaactgctctctaatgtgtctcgagggtgcttcgccttcatgtctgatcttgcgtcctctatcttccacggtgtaccatctttcacatcacttcttggtcttttgacatatcattctctctatgtatcatcatctaccgttctccttttcttcatacaatttttcttctctgttttacgatgatatatcttgaaagttttgtcgcaagaagaacgagcgttgtcgaatgaaacgatatgtgaaggaaatcaatctgacgcgtgttttgaacgtgtcgcctgaacgaccttcttctgccccattacatcaacacatatactcgattgcctcattctctgatacctctcggaagctcaacttcttcctgttctctcgttctccctatctcttctgtcggccatagtccttcagagctctcatggagtatccatctctttttccgagaacctccgagccagcagccgccgatgttgatgtcgtcgtcgaccgacttgcttgcctggttgtctctcacatggccctctctccggcctcgcccacgtcccttctcctctcctctatcttacattccatattggcattccaatctaggtatatccttcattccactccagctaatcacctaggacgatacttgtacgctgaatgcttactggcatcaggggcgccccattcagcttggaaccttgttcgagaagaagccgagcttggagaggtggagttggcagaagtcggtgcaaaagcctgtgaacaaattggtcggtttcgagatggatcttggctcttggaagttgcgtctgagaggcgtcaagctagggaagctgagggaactcgtccgacacgtaagcctatccgaaatatctgatcttcacttgtctagcgtgtgcttataacaatattactcttctcaaaaaatggctgatggcgttccgaaatgaattttgaaaagctctcaaaccacctgttattaccccatcggacgctctgacaaaagcggcaagactttgtttgaaagcttcgctatcatcaaaaggcaacgagccggatcaagctggacatgcttacctgacagctctcaaactggatcctttctgctgggaagcctttcacggtctttgtcgacttggtgagttcctttcgatgcacctttagcatgcgtttagttgaagagtgagtctaaatgactgatataacttcattctggctgagtcacagggtatgtattccctgaggtcgatgtgtttcctcctctacaccagctcccgacttctcgatctcaatcctccgtgcccgcctcagccaatgttcctgctcctctccagcctggaagcccacttgcgggtacatctcgagcaataccgacgacaacatcacttccgttatatccaccaaatgccgtcaaccaattgtcggcacaatcttcgaactcagattcaaatttagcggcaacacctgactggggttaccaaaccgtaaacggtaatgggtataccggagggttattcaaaaagcaactctttccgagtcaagctggagaaggaaacagagtcggcatagggttctttacacctgaggctgccggtccagcagttagagcttctcgtcctctcgttgcctcttggttgattggaggatctcaaggggttcaaagccctgactcgtcaatatcttcctttcatcaacatactcatcgagctcatcatcaactcaatcctttaggccagactcacggttatcattcatccagcttagcgcagacgccagtaatggctgttccttcttcacacccttcgcttcttccaacggctggtccttccataccgtcgtggttgtcaacagcttcttcggctgtaacaccccctttgaatggagatgggtttccccaaattggaacgaccggttgtgagtcggaaaacgtagtaggaactggcaaactacctatgaaacggccgcgtggaggtcgaggtatgatattggaaccaacagcagaagattcacctacggaacaagcgggcatcaaggttagtttcgttggccgtatcgcgacgggttgaatatatttagtaaacatattctgatatcagcgtttgcttaattctctttgtctcgctatcgaatcctttatacctgactgcacagtcccgaagtcggacgaattctattgagagcatcaaccaagctggactcgcgaggagaagtagccggctgagccaggtacctggttcagcacttgttgcagatcggaaaccgaaagtaggctaattctggggatctttgcaatgtccgaacaaagaactgcaaagctgatgtacctgatcttcattcctgcagaaccttcccaaacgccgtcaaagatctaatcctatgtctccaacagcatctgattcttcgatgaccgaccagcctcactctcctcaaccacattcatccagatcaccgttaccaccttctctacccgacgtgctgtctgaaccttcttcagtcgaactcctcaaagccgacaactacatcctccagatcatgcgtctgtttggtttggctgacatgtacatgagcgcttacaaatgcaaagacgcgctagagatgttggatgctttgccggatgaggtctcatatcttaattctgatgtacgtgcaatggtggggagatgctacttcgagcaggttgaatatgtcaaggtaagtcaatgttttggatcgggaggtaaaaataccatcgaaggttcctcacatgtctcggcttgctcatttctcgtggatttcaatcataccaggcgaaaagagcttttgttgaatgccgaaaactcgatccttatcgtctacgcgatatggatctcttttcaactctcctttggcatctcaacgacgaaacgatgctttctttcctctcccaagaattgacttcgatcaatccgactgctcccgaagcttggattgtgacgggaaacgcattttctcttcagaaggaacatgacgaagctatgcgatgttttcgacgagcaagtaaccttgatccgagatgcgcgtatgcatactcattgagcggacatgaggcaatcagtatggaagaatttgacagaggcatcgcattctttcagatgtctctcaggatcgatagacgacattttcaagcctggtaagttgaaccatactgaactccttcctcctctgtgtgattctcgatgtgacctcgaagatggaattgacattgattctgatgctgctgaccgtaggtatggattgggaactgcttacacgtgtaagaacaaacttcgccaggcagaataccattttcgtcgggcggtcgagatcagtccgtccaacgcggttctgctcgtatgtgttggtcaagtaagcgctgtttttctttatgagtttatgcacttattgcgaaatttaagtccggtctactaatcgtaatagttttcttaggttttggagaagaggggcgaaaaagaggaggctctcaaagtattcgagcgagcctttgagattgcgcccgacagtcctatggttggttttagacgtgcaaaagcaatggttggacttggacatatcatggtgcgtttcgtgttttttcttttccttcaattcgttctctttattcgcatagagatcgactgacctgattgggtcgttttgacatccagcctgctctggcggctctcaagacattagttatcaaaacgcccaacgagttcaacatccatttccttcttggaaagcttttcaaacaaatcaacgaccatgcaaactcaatgaagagtttcgcgtacgctttggatcttgatcccaagatgagtagcgccatcaaggcggctcaagcttcggggagggatgaagaagaggaggaggggggtgacgacgtaggaagagatgtttaatgacgtgaactactttagcctatatttgcactcagatcaatatatacatacctccactaaatagacatgaaaattagcgaatgcaagtaaccaacacattcggagggacgttttgaataaaaggagattgttttgcggtcgcgtctgcacgtcgaaggttatcaaggatttcagcctcttcttctcctcgtcccatcaacccacttctcgtcaaccaacaccgcaatctttcctcttctgttctggtcagcatccgggatcttggggtctatattgatagatcaacatccgacagatatttgcaaaccttgggcttcatcagttgccggccgacctgtttacaagatgtctcttttagacttaagccatcaatcacacgatgaggatgaagacgacgacgacagatccaacgaatattatgaggaaggggatgaagaaggttattcagatgaagtccatgtgagttttggttccttctattcgaagcacaatatatgtcatgcctgaggtttgagtcgagagtgagaattcatattcacaacgtatatctcgccattcatcagagctcagtgtctattgactcaaacatcgacttttcgataaattatgctttgtgagtctactcaagacgaatcgctttgactgtttagagctgctgatctgatttccatcatcttgcagaaacaatttcgttgctacggttgaaggtcaagcaaatgtcacgagaaacgacgcattgcatcttagggacgactcaaatgcctactggtggctggttcaagtcttaaaggacaaccagattggctatatcccagcagagttgatcgaaaccccatttgaacggctggctaggctaaaccagcacaaaaatatatatgtgagttctctgtcgattgtctctttggtgttttcaaggtgtcacaagaactgaaaatagctctataaattgttttcttagctcgctgcgtcgacggctaacgaacaagcccaaggttcaagacttcaactacgaaaccactcaccttccgctgtctcgcgctcatcatccgaagcgtcaagaacttctaaatctcctgaaggaattaaatttgctgaacctacctatgttgatcaccctggatttcagaaggaatgggacgatgacgatgatgacgacgaagaagacaatgaggaacaggaggaagaagacgaagaatttatggaaggtgaagagggagaggcaaacgagtgctctgatgaggaagaagctactcaggaatctgaaaccacagaagatttgatgggcgaaggatacggcctcagctatcaggatcgaacgttaatggacgacgaagtctcatccagcgatcatcgacatgaagcgatccaaaagatgatgatggagccagatgacggaatgagctgggacgaccattcggtcgctaatgctagctctggcctcgctccctccgctcccatctatgcggctgacaaccccaatcaatctccctcatcagtcaacactcatgagtcacccagttcatccaattctgggtcttctatcattgggaccagtcttcaaacatcactctcccgacaaacttctgctgccagcatacgatctgaacagtctcctacaactaaacgcgtccttcttccgtcagaacagatcgccgcatccaacacggctcatcaagcgaagatcgcagaatccaataatccctaccatcaaaacctctcttcttcacctcaacagccttcctctctgcgtcccacctcaacggatgacttcttggaacaagttctcgagaacggagaaactcgcaaaatccatgctactcctcgagtggctcgtgtagaaggccctcctcgattttatcctagcgggtcagataccaatcttctggatgctttatccagtccaggtaggaagcgtgtcgccatcgaaaatacgagccggttcgaagatgaatcccctgaggaggaggaggacggaaaagaatctgctgaccatggctctttaagcgaaggtgaaagtggaagaaacgcgaccagaaagataaagcgttcggacagtgaagagggaataaaaaagaaggctggaggtgttttcgtcaattttttcaaaaagaaggataagaaggaccgaggtatcagttcttctactgttgtctctccagggtccgatgagacaagcccaatagacgcacgctcttcatcggatgaaatcagcactaagtcttcgactggaacaccccagtttgagaatgctttctcaccagcagagagcccagcctcggccgatccggaaaaacccagacgagatgttaggacgcccccatctgtctctggtagtccgagtgcagcagtttctcccctcgcacttcgtctacagcaaaaagatcaagagcaacaagccatgtatcaaaagtatctgacgtctagctcaaagacatcgatcgatcaaggtcttgcttcaagctcatacggaacacaagcagctgcaacgattgctcagtctttttcaacccaccgcaacacccgagcatctatcaatcctcatcctcgcccgggaagcttgttgatatctcccacggtcgggtcgaccagttctctcatgaaaaatgacagatcgagtggttcgcagatgctctcggtccttcgagtctttgccggccacgagattaactctgactcgacatttaagactgttttgctcaacgacaccaccactacctccgaacttcttcgtcaggcaattcagaggttccgtctcgattcgctgggagcgactgagcaatatatacttaccatcaaagggattgatggcgaagagactatccttggatctgaaggtcatccgcttatagtttttaatcgtcttcaggaggaagacgagtccctagtcgtccctagaattcgacgcggatctgttggatccatctcttctgtaacctccaatttatcgcttcatccagcaatcgctcgtttaggagactacagtgatgactctcaagtcaagctctatcttaacaagaggactgcaaacgactctgtgtctgtgaacagttttatttctgccatcgattccctttctcaagagcctctatcgacatttcctggatctgtgccaagtggtcgattcacccttcagattgccatacatatctcggatcttcctgagaatatggtgtttgacccaaactctgaagcaatcctctcacaatcagagatgagaaagcaaacgcctctatctccttcatcgcctccctcttcttcattcaatgcgcttccgggagataggaagcgatacatcttacttcctaccaataccacaatcgctgaagcgattgaggttgctctagagcgatttgggattactgacggtgtggtggacggaggcgatgacgtagaagacaaaccaagcaaaagaaaaagtcaaacgagggctagatataaattagcactcaaggcgcctggacaggatgacggtcagttgatgtgttgcactcctctcatgggacaattgcttgtttgtgctgatcatatgcttgtttgcttggtccgtcgctagaggctgttctgagtccctctgcaaaagtcatcgattattatagtgtcccaccgaatttgaagtcgcctccaacaatggatccccgtgagcggcgccgctcaagagaagtttccctggcgactccggaagatctcttatcaacggaccctgtattcattcttcgtcgtgctcaaaagccaaatagtccctctaaatctcagagacgctcccgaggttctaccgtcatggacttcagttctgacggacatattggaaaatcaagtcttgacagtcggaatggtgatcatagccagtttagctcagtctcaactgcatcggcgtatgagccatcacctcaggtgtcacctgtggccgctcaatttctggctccgccactctcgattcaagagaccatcgccgcccaacgtgctgcatcgaaggctagtcaatttgctgtcctgtctgcttcaaccaacgcatcccttggagtggacgtagtcatttccaataaaggaacaatccggtcatctcgttcgttggatggtacggaacggtctgacaaaatccggtactcttacatagagcctgatggtgctactgaatacgacatcagcgagttggtcgaacaggaatggacgcctgcggaatccaaaatatcctctgacaaacttcaaccaaagacctcgcatagggcgatatcacccttcgttgaagacgtgctcgaagttgcgctagaccgaccccaaaacgcaattgacgcagactccaaagcagacgccgagttggatgagaagatagatcgagtgctacagaaggtcagggatggatctgtgagacccgttacatcgagccgcccaccattgtcctcggtaccgtcttacttagcactgggaccggtggccgaccagaagacagtcttctccaaggccgaagcacctcatgaggccattgtttcctcctcgtcttctgttcgagatcagtcatcaattgagactaatttaatcccagcccaatcacctcttattttcggctcagaaaccgttactccgacgacaacttccagaaatttgccaatctcgaatggcgcgcctttggctggtgatgttttccggtcaaattcaagtgcattcagtcagatggttgtcacccgggatgattttgggataaagaatatgctggctctgatcaacgttcgggcgagggaacctacgctcaagaacctaagaaagagtatgattcagaatccgaccgggtcgctccttggaggagctaaagggacggatgaaattgagaaccttctattcggaaagaagatctgggataacgggcctgtgtttgagggaaagctagagctgatggaatttcaaggtagattggacgactttgataaggagctggacgtccttatggacggtgtgatgaggctcgcagcgggtgcaagcagtctctgagcacttcttgttgatcccctcctccaagtttgttctgtacgctctccttttgcattgtgttctatatacctataccaccatcatgtacatccattggatcatttttgggtcacgtgataaaggttattaaggacttatgtaaacaaatctaaattcaaaatcgtgtcgtccctgtgggccgagcaacagaccgcccctcttccctcccgcctaacatcccttccttatccccctcgtctcctcttcttcctcgcttgttaaattgtaagtatggtttattctggatcgtgcatgtcaggtcttgagaagaaggaagcatcaacacgttctagaaaatgagatcattaggaatgtggatttggaactggagaaggccaggggcgtttcctttgtctaagcgatgaactccctcctggccatgctcaatctcaattgatttaaaagttcacgacatgatatgtgtccttcatcaaggacgcggaacagaaggaatggtggatggatttgttggacataattgttcatgtcgtcggtgcaagaagcaactggtgaacatcaggactgactgctctttttcccctccggtttcgggctggcgtgctattccttttctttcaacaaaactgaaccgaaccgcattcactcatccttttctcaaatgtagaatcaagatgcaaactatcaaatgtgtcagtccttgttattgttatttttctatttcgcttctcttttctcacaagaatggcatgaaggctgacagacattgtgcgtgttgttgttgtccatataggtcgtcgttagtataagttacttcccgcatccgactcaagtcgatgatatcaagaatgctcagttattcttcttcttctgtgattgaatttacctaggtcggggatggagcagtcggaaaggtaagattgatggccaatttatgtttgaacatggactcgataattatctgttctgacagagtctatttgtatcaacagacttgcttgcttatctcgtacacaactaatgtaagtagtttgctcttgtgcccacgcaaaagagaatattaaatttctgactaggtttccgttatgatctgtgtcgatttggacgattacagaaagttggtcaggttttaatctaagttcatctgagccttactgacatccaatatcacatcagtttccaagcgagtacgttcctacggtgttcgacaactgtaagttgcactttggtcatgatcattttttctctcgtatgctgaaaactatcggctgtgtaaatcgaattttagatgctgtcaccgttatgattggagaggatccgtatactcttggtcttttcgatactgctggttcgttcagctgtcttttttacactttctccggatatctatgtatcgaactcatcgtgtgtatctttatatttgcaggtcaggaggattacgaccgacttagacctttgtcgtacccccagacggatgtgttccttgtttgtttttctgtcaccagcccggcatcattcgagaatgtgaaggaaaagtggttccctgaagtccaccatcactgccccggagttccttgcttgattgttggaacccaggtggatctgagagacgacgctgcggtgatggagaagctcgccaagcagaagcagaggccagtgccgcatgacgctggagagaaactcgctcgggagctgggagctgttaaatacgtggagtgctcagcgttgacgcagaagggactcaagaatgtcttcgacgaggtcaggcctttctctcaagacgcatccattgatatgtttcaatattaacacgttgcgtttttcattcgtggtattctaggccatcgtcgctgctttggaaccccctgtggttaagaaaaagtacgcctgtactgaactctttataatgttgatatccgctgatatgtatgcggtcctcttttgtacctttcatgaaaacaggaagggatgtttgattctctagatcttgagctccaagctagctagtcttttatataagcattgagctaaagaagagatgaattcccattcttcttctttctctttcacgaccttttctcttttgtctatttttgttgtttcgtcctctctgtcattcttactatcacaatcgccatgtcctctccttttctccttctccttcgcctcagtgtagtcattccctactttgctttgcgttctgagtgaaaaagaaaatgccacacttcttgttttcattatccttcccatcgtcagcttctcttcgtgcctattgctaccttttgattcttgtttgattgaactgttcgagtccttctttacctttctcttccctctttctcggtcgtccttctgtctatttttttttcgctttccgtctaacccgcctctttacgatctggatcaaatcatttttttctgaatgacttcgaatgtcgctgtcttcaacatgtgcttgaacgcatttgggaactgatcatataaacagggtttacttaggattggtccccttaaacaatggatcttaagatgctgtctgtccttgatgatgctgaagagttaatcccgccgacggtggcgcagtttttttttatagttagagaaatcctctagcacctttcatctctcgtacttccagctggcgtgtttaagatcatcgcttttttctacgttgacctcgtacaaacatctggttgtctcgttgacgttttgccatatcaacggaacgaggaaaagaaaagacggatcatacgatctgaaataaatattttgtgagtcggctccgttgttccattgagccctgagatttgttgcgcttctaaagacacaatctttcgatctctttgttttctctacttccatctgttgaggctgttgtcacagaaccttcttctctggattctaatctgacatctctctactcatcccctgtgaactggcatctggcttgttcctttctcagactatttgatctgtgagtcgacctctttcattgtagtcgatctgccatcttttctgttccccatcatcagctccttctttctcgtgtgttcagtctccgttctcttccggaatgatcctcttggcgctctctcttcgttcggtgtttggactgagaatatggaaatgctgactagaaatcgttttatgtcgtttggtttcaatcgtagtggcgaacttttcccttacacttaatctttccgctctcgaacggtcactattcctcactgttccatcctttcggcacttagctatgtctctggcaccgaattctagtgctgctgaagcatctagacgagcatctgggaagacacctcctccccaggcacctagtgcaatttacgccaaaaggttcgttcccgtttgtgatctgattgaggaacatgaaaataagctacagaaaccaacttcatttttcgtttcattccgctgattttcgtgatcaaccgtacattcaatcagggctcgtgagttagaacagctcgaagctcaaccctaccgtcctcccgctcttcggcattcctcttcttcctctttcagctcgcaggccgaggctgaaggagatgccaacgttgaagagcagcctacggtgataggaagtggctatcgaagggcacgagcagggtgagcgcgtacaccagcctgtgtgtatcttccatacacatgcattgatttcctgactcttcgtactgtctttcctctcaatcaaattatatatctaggacacttccgtctaatctcaatgctgcagcacagagatacaatgcaccggctcccgtttctggagtatcggtccctggaacagttaccgctcaacttgggaaccaaagtagtcttgtatcaactccaggtgtcgccgctcatcctagcattcgacaagttcttgattcatcttctggctcaggtcgaggacgctctggcagtctctcccttcctgcttctgggctgtccaatgctttcggaccttcggtcttttcttctgcttggcttggcaaccgaacatcctataacaacggttccggtcagcatcgccttgatgagatcactcggattcagtcaaatgattctattgcgagtgagcaagcagccggtgttctcgattatctaggtcttgcagatagtcctgctggtcatcagcctctgccagcgacgcttagtgagcttcgagctcaagctcagcaacagattcaaagtcaacgcaaccgagccagtactgtatcaagcccttaccgtcaagtaggcgtattcgctcctatccaatctacagaggactatggtgacgaatgcgtgaatcacgagagctacatagactctccaatctataacggatctaccatgtacactccttcgcaaacgcctcctaacgcattcaagaaggcgacccatctgatgccgtctaacagaccgagagctacgtccgtcggaactctgatggactctccttcccatcggaccactaccatggcttcgactatgatgcatgaggatgaagctttctcccgacaggcacaactcgatctcttgtcggagcgattggctgcgtcgacattgataaccgagcctctcaagcgtccgcccatatttcatgatcgctcgcattcggaaatggatttatcctaccttcatcaacccgctgtatcccgtctgatcaatatgaacggcgcactttcgacctccttaacacctaaccccgtcccgtcagacgggttgtctggaccagcgcccccctttccagctc

SEQ ID NO: 694 - DNA, 13300 bp, Xanthophyllomyces dendrorhous
ctccttcccgaagtctctacatcggtcagttggattctacggtcactgattcagagctcatgcagatcttcaccacgtatggaccaatcgaatccgtccgactacttcccgagaagacctgcggctttgtcaattttgtggaaatggaggatgcgcttcgggcagcagaggatgttaaaacccggatgcgtggtaaattagtgccaaatggaagcccagtcaagatcggatttggaaatcccaatagcatgccgcctggaccaggggtaccgacagcctcgtccccaaccaacgcacaaggcgcgtccaccgctgctgttgtcaatgatactccatccagagctctgtggatcggatctatccccagcaacaccactcctgctgtccttattcaggtcttctcttcctttggacccatcgagaatgttagagtcttgacccacaagaactgtggatttgtgagttctgggttgtcctccgttgagtggaatcttcgagatgcattagttgaactgtgactaactctctgaacaactgttggtctgcaggtcaatttcgagcggcatgattcagccgttttggctagaaaaactctcaacatgaaagacttcttgggtcctgatgttggtgccatcaagatcaatttgtcagtgatgttcctctacatttcgctcaagtatcaatcatgatactgactactctacggcgttttgttctcgaccatcagtggcaaagttcccacaaaagctagttctcattccaacggttcaggtgcagatatgttgaacaattatccggtcagtaggacttgtccgtttgttcctttctcttccagatcgtgtactcacccatgattatataccttgcgataggttaaagccggctctgacagttctgccgaccagcaaatcacggggggtcatcctctgggagactatcgctcaagtctgacctctgacctggtcattggcggcgaacacgaaggattagcaactactgattctttagtagctgtggggccctcatggcaaccttctgtgtctgatcaacaggttggtctcttttacaagtttgtcgtcattcgttaatcaaagggaaagaagagtctaatgccatcaaattgctttatcgtgtaaagactgtcatgcgagtttttagcgctggagatcctcaggccgaacccgaaattcaggctatggcaggtaggtagtctgtcaatcgctcccaacatcaactttccgttgatgtcgttctgaacttgatatctccatcatacatatcagaattctctcctccagccacatactatacctctgtgccttctgtggttgatcagtcggcgactcgcagatatgatgcggccgctttgcgagacgtaaaaaaggctttggagaatggaaattgttcaatcgaagagttcaacacgtttgctatggatcttatggaggagtgcgtcgagctagcgagtgatcgtaagtgtcatcctcttctcggtcctgttgtgattcaggttttcaccttcttgctgcgaattttcttagacattggaaacacaatcattcagaaactgtatcagttctgttctcagtctatcaggttgatgctgctggagagaatcgctcctttccttgcatcgattggtagccacaagaacggaacttgggcggctcaaaaggtttgttggctactagatcaccatgtcagcaagcatcacacaacaaggctgacgaatctgtggtgtttacatcagatcatcgactgttcgaacagtcctgaagagtttgctctcatcggccagcatcttaggccctatattcctcctctcttattggaccaatagtaagtactcatttttctttacaaaatcaaccctgttgttcatctgatctcagattttgtatcatccctcttagcggaaattatgtggtatcgctttgcacgcgttttgagtcccctgccaacgactgtgcgtgttgtcaggtttcactttcaattaaatgtcaaccaacttgactaatcatagcttcctcttgatcagtcatctttgatgggatctgcgaccgactttgggatatcggacaaggaaggtgagctactgcgcagtttgtttgtcgatatgaatttgggaaactcatctattattttgcgttcttaacagatttgggtcacgaggagtcaggacctgcttagatagtcctcatacgacacccgcacaaaaggttagttttgatgttttttggatgactgtagcgagccgaatgaatactagattgatcgtgtgtgttgtgtttatttagaaacgcattgcaactgctattgttctcaattcaatcccgttggccactgcccctaacggtatgtccacttaacatatcataaaatgaagctgtagaatatcagtttgaagaccttagttcttttgcattataggatcccttttggttacatggctcattgtgagaaaacaattcctccgattttggattaccaaatgacctgtactgagtataaattatctcccgtacaggactcgtcaaaccttcatggacgctttcggcttcttgcacctcgatttgctcctttcatggagcatctttgcacccataagttggcaagcgtagctgtcctacgaatcatcaaccaaaagattgatccagagggtaagtggacgtctttatttcagcgacgaaaaaaatacagtcttgatttctaatctcaatgaattttaaaatcagcttcacaaatcttgcttgacgctctattcgcctcgccaggcgatgaggttttgattagggtgctcaaggatcgtgagtatcaattatcacttctacttgtattcttgtcctcctgtgtcatgaacttgatcgactgacaacccttctctttttttcctttctggtcatcagagatttatggagtctctgttatcgagaaaactgtcacgtctgccgcgtttgatcgcacagaacgacaaccgttggtagatgctacgaagagagtgcttctgtctctcgaggacgcgtcgtcacaatcgtatcatcgacttctacaggtaggatgcaattttttatattccttccggtcgggttactaatctaacgatctctgtctatgataggctgttggccttccacattctatgtcacccaaggtctccgcccagacctacggaggaatgcacacaccaagatctcaacctggaccatcctcttcatacgccaacctcaacgcgttcccctacggattgaatcttccagtaatgtatgatcataatcggccaagtcctatgcaaggtatgaatgggggcaactggccttctgccatgccttctacgttgcagccattgatgttggggtcaatgcctcaaatagactcattccgaagcattgcatcaccgactttctctcctacgtcaggtaagctcagagctagctatttgctcaacctctgttctgatgtcgacgcacgtaattgatccatatcacactttaccgtttttctttcagatcctttcaaccctttcgctgtaagctggtttgccttctgtgtatttgcgttggccaaaactgattatggtggtcttgtacaacagacgtatgcgcagagcccaccaaggtttgagagacgttcgtcttcatcccgtcaaaagtcgagcagtcgaggtgagaagaatgggagtgttcgaggaacgccccaaggttctgtgtatgatggaggctaccaacctcaaatgctggactggcagaggcagcaggggtctttggtaagtcattttgtgtatgtcttttcggaagtaatattcgaatggaatgctcaagtctacacaacttcttaaacatcctcaaaatttgcttgcagtataaacagatgcatgcctaagtgtgtctcaaccgatttgaatgtggtcccaattatcctcctgtaccttgtgttcttcttgttcactttccgtcttcggtttctctctacactgtatacgttttattgtcacactggccttaaatcagcccctcctccctctttctttacttcgcatcccttattagtgttcttccgatgtagtgtaacgatctttgtctagcctaaaaacaaatatgttccttccgggcgattgaaactagcaacatttccatggtatttgcaaccctgagattgttaccactcattctctatctggtcgtctcaccatctgtgtaaccaaatcccttccatagttctctttgatatctatatgctcttctctatatttgttcctatcgtcagaaaaggtgcgtcacgatgaagtccctccttggtctatgcctgtaagagttcgccatagtatccgatcaactatgacgataatttagtaaaattctgatccgttcatgcttttgttgagtgaatgcctcatcttccacaccttgagcggactgccgtcaatctcgcctgtctcctctggatgaccagaactgctggtcgtactctgtgaaagcatggttgacctggtcagaggctgttttggagaattagtcgagttcgccaagattgacttgagagatggagacggtgatgtctgttgaggatatataggggcagtagcatcaccaggggaagaagaggggggcgcagattgggataaaggaagagaatatcgcttagactgaagagaagcgatcgaagcagatgacccggccaattgtttagtcggtgttgactggagaatgcgggaagagagcgaggtagacagtgcaagggaaggaagagatgatgtagcagtcagaggaacagtgagaggcgagggagcgattgggttaggccgagtctgtttaagggtctcaatataaatttagtcataggaaatggatttcacaatttcggccacccaacaagcagatagacagaagagcacgagtcagtaatcgacttccatcatgtggatgaataacagcttctcgcacctgtttagaaagactctttataggcgtcccacgacctgccgacccccgggtgaaccctgaacctccaacacttggctgagctatcacttttctcaaatcgttccaggcaacgaccgcgtttccgatcaacaacgcgaccaagaccgtttctccaaagttgatccaatctctgttcattccggtatgtctgaataagaacgctctccatgagaagtagaacgatgttgttcgaaaaaggacaagaacgaggagggcacaagaattgatcttaagacgggtaaggaggggacctcgttgaaaagttacgaccgagccgggcacaggacgagacgagtaaggggatccaggatcaaacggagaaagaggtgctcgggaaggagcaggccgggtagttgtagatgtggccattgatatggatatggccaatagcttgatgacggatcgatggtaaagaagaaactgccaacatcttatcctctgaaattgagactgtatttggatctctcgtcaccatggagaccgacggctcattctttttgacatcatctttcaacgacagacggctgctagaatcaattatctccttatttgcttttctcgacttaaaatatcgtctgtattcatgacgatctgtagatctatatggggtgtgtcttcagatatcaatttcaaccctccaactctcccctcttcaaagcacctttgtcgacttgctcgtcgtcgctctcttccaaatcgtttgtcagacccgcaggcttatctccgtctccgatgcttcttcgacgacgatgcccggcggttcgaacagcagcttccggaattgttcccgtagaacttacggagtggaaaaagcaaggcgtcagacatgtagttaaaggaaggcaaagatacaacggtagtcattacgactcacttcaagtactcaaagtctggaccaataaagttatcaacctattcagacagaaggaaacaagaatcagagataagatcctgtggctagatacactgctttatgagtgtcgagctttttaaaatttactgacgcaggccagccatttagcaaaacttatatgtttataaaaggaggaaattagtacacttgcaactttccactctttatggtaaatagatcgtagatgatgtctatgagcagagtcagactcacgtgtcggtctcttcctcttcttttctcagtgcttcgtatatatatcgcatcttgaaagcgtcgattgtttcccggtactgttcgaaattgacggtctccttagcggctacaaatttctggcctttctctacagtagtgttgtacgagtggaatagcggctgctcaagcaaaagaccaagaggaggagccttcggaatgtggatcttccggggacctacacgtacaagcatacagatttagccaactgaagcgccttagtaatgccaacgaatatcatggtggagcaggacgtaccatagcattcagggattagtgtaggaggagtaccagtacgagtcaccaagattacgagagagatcatctttcgaatctgatgcagcatgaaactttgacctggcaaagaaacataacttctgataagtttcgaatctcagcttataagttcgaaaacggaaaagatctatacttaccatggaatcgaacagaaacccactcggtaccattcacgacaaccggatctttgacctgccagaaagcgcacaagtaagcgttgcaacatgaataggaccatgtcggagtatgtctcatttacctccaacttgatcataaatctctgagctgctctatcttggaaactcctctctacagtaaagttatgaaagttgctgtatgattgaattcaaacacatcttttagcgcagccatagtatcttgaagtgttgatgatgttgaacactgactgtgtaccctcgtagaacttgacagctgctcttgcccgttcgatagtatctgaatcgactctccaagctttccgcttcttgatatcctctacgaacgacagctcctccgttccatattctttccaaaaagggtgttcctccgagttaatgattgttgaggagagttccgttagcggagtcccgtcaggcttagtgaaagatgttcgtttaatggtcttgccgagttccgaacctgggcgaggaggaaggaagatgtgagacgggaggaggtactcatacattcgagaatcgcaagcactgttgagagtgtgtcaaaagaaacgttaggacagacatctgagatttcaaaatgcgagaagacatcttggcgcggacacgatgaagacatacgttctagagttgaaagcgttctgaactctcacgaaaccccacatccgaatctgctcgggtaggtattcattgatcttggccgtgagatcttctactccaggaatgacagtgatcatcttaagggagacgacgtttccagcagcatggacgcccgcgtcggttctggccgcgcgggataacgcgacctgggtatcaaagaaagtgacgagttcagtataaatgacgttgatatcttcgtattcctcaatatttcaccgaccttggtagcatcatctgcattgtcctgagagacagctccggccttcatgacagaaaaaatgaggatacattcagaaaattgtatgacgcattcactaggatgagtaggttgaatctacagaccttgacgaacgcgtcaaataagactccctcgatggttttaacatccttctgactgataagattgattcacgaagaagcgctgatcaactgagtactctagacagtttccgcatcgatgagagaatatgcttacatttgcatgcccttgtaacccgttcccgagaacctaccacaccgaatgtcacagaacagccaacaacgtcagtctaagtatattcagtagaggatatgtccataggcaaaaagagaacaaggaaaggttctcacccgatcagaactgctgtcttcttcttgggcaatctgtctgccttgggttgcccatctttaccttctccattctgggtatcatcaccctccgcgtttcgatctctaccttgatacttgccccttccgcctccaccattctttccaggttttccaccagggccgtttccacctcgtcctttctgtctcttgcctctgttatcttccttcttctcttcaattacttcagaaggagcagaagtcagggcgactgagtctgttggtacagataattcggcaggtgcagatggctcggctgaggatacagattcatctagtttgaccttcttcggtgaggagggagccgttgaggcagctgtcgaagcatttgtcgaggcagacgaagacaggctggactggtttacagggttaatgacaggagaagattcccttgaccgtttgacagaaggctcagactgcgattccatgatgagaatatctggttggagtgtcggatagaaggtgtagctgaacgaatgtatcgaaaagttatattgagctaaataatattggcggtctaaaaactaatctgctttgcacggtaagatgtacgggcaattatctcaatgctctagtttgctcaatacacacagacaatacattcttaagcgagcgtatgacgagggcgtgaggagcgagaagaaggaaaacttagtcaagcataatggacgaagagtggacatgattggaattcaaatttcattcatggtttcgtgcttcgagtgagtacatataagaagtagttgaatcctactccatccccgacgtctcttacttccaagtcccaactgatttacaggtcaacccacacccaatccagatcattccagaacaacgtgtagaggttagttctagcgcaacgtcagatgaaactaggatagataatttcgatggcaggggaagatatgatgcaagcagaatagacttacccttccctcttgagatatctttttctgaaatggggttggccgaacgtcagataaatgaacttcgcggatgtagtatttttgaggattctgtaaaatggtcaagatgaacaaaatgaggttcgctacacagggtatctcaaggggatggctcaaacaaagggagggaggagaacgtaccggatgacctcgtcgacctctgcgttgcagttcttctgaacctcctccgaagggttctggagtgatccaaagcgcttctgatgagcgtatatcctgacagacagaggacattccaaaaactgatagactcacccaaacgtctcctttctcggtgatcatggcgctatgattatttgagttgtgagatgaatatggttagactttgaaacatgatcaaccgaggaagttaggatacccactccatagttcctgggttcagagaagtaagttcaagtcagtcgatactgaaaaactttgaagaaaagaagagagtatcacctttatccagcgcaatatcaaagacaccgtcggggaaatcaagcttccggatatccatttcgagccattccatctctggacgggtctccgagtgaagagctttcatgttctggatcaacgttcctgaatagtcgatgttcacgatattcctccagccctcgtcatacatcttttgaaagcaacataggtaagaagagcttagtgtatacgatatctcgagcaccagaacgtgatattcgttaactatcacctacagcttctcctaatgcgctatttccacagccgagcatgaggattcggctttccttagaaggaatgagatctctcctgtgtaaacgcaaaggaatggaaagtcaacgatgctgcttcaagttgatagagtagaccaaagcgagagccgtacatcaaaggcaagcactgctcgggtctaaatcaagatattgttcacatcagcaatcaatctcctatcacttctgagcatgttggactgcaggaagaatatacgtacttcaaaaaccagtcgaacgctgtttccggagcctcagtaccataccgcttgtcccagtattcttgggttccctaagagaccagatagaatcaaggcgcgacaagtcagtcttgtttcaacaagctgagaacacttcgacgagaacgtcgacctacatatgacgagttctgatctggaaggatatctcggtttgttgaaaactttctatcttctgccgacattgctgggttgtattctgttggttccgattctggatgggtgtgtgcggttctttgatggactagaaaaacacagacaactgactgtaattttttgtagtctcttttttttgtttcctcctcgtcgcgtcctctgctcttctcccttgtccatcaaccttcatcgggatatacttccatcgcaagcgataatctacatctagttgacaagcatggactttcgaaattcaaaggtgatcgttctggattcttcgtccgattttgtcagagtcatttatgggttggatgagcttttgaaacctccgtcgtcggtcagtctctctctttcttccttgtctttcggaacgcgttctttcgtgtttctgcccagaaactgatccagaaagctatcttcgttcttctttcatctacatctacgcatcaatcaacaggaggttcttgctcgtgtaggcaaacggttacaacccgacccagctactagtcaagacgaatacgaccaagcatcgacatcgacaacaccggcacccggatcgaaaccgccggcagtcgtctacctcataggctcggatttagaaaaggctgaggcggctggggaagaactcgaaatcatttggcctttcagagacggctggacggattggaaatctattgaggctctttggtaagtggacatctcttttggtagcacatgatcacaacctgattggctttgccttccgcctctacgttcatgttcttcctctttcttgacttaggaaatacgccctctatcaatctgggccgtatcaccgaagaacgaatgaatccccaataatagtcacccatccatccttgttctcaaacaatcaaatccatctcctcactcaagttttattcgagcgtcttaatgttcctgccatctcgctcttgcctcgaccggtcggtgcgctcttcgctggaaatgcgaccacgggtgtcgtcgttgatattgggctcgaagaaactagcattactcctgtggtggactcgacagtatgtccaaacggatgcttagaaacttctttaggtgtcagacactgcgagctttggatggcatctctgttgacgaaagaagagcagcttatcaagacactccagagcccatcgcctagttctctcgaagaaccagaatcatcccccaaagagcaacctgcctccccgtcagataccactgcaccttcaacaaccgcaccaggcgagtctgaagcatcgaaagaaataaacgctgctccgacgactcctccaactcctcctcttcctccagtatcagatgaagatctacatgatactctcatccggctatccgaacatatgtggaagaacaacctgattcgacctgttctggctggtggagaaccctactcggcagaacaagaggaggaaggtgtgacggatattgctgctgccttagtcgctggtcgagaaaaagcattgatcgaagcccgagctgcgaaatctcacaagtctgcagctaaaaaggaagaggaagccaaaaagcgagcggctcaggcagccgccgctgctcaagctacaggtgatcagagggatgcagacgtcacaatggtcgaatttgaaggaagagagctctggatcggtcatgttcgacaaaggttttgcgagccactgtttgagcccagtcttttgcagggtatcaaagggttagaaggattgaatggaggaaggccggatgagttggtaggcgtacaggagttagttcagatgggaatcgcatgcgtcaacgggcctgagaaggtgttgtgttgggaaggtgtctctgttgttggtgagatggctagagttaagagtaagtgtctgcatctgttggtttctcttttcttccagaactgtgtcttgtgagccttttcgaaactgaatgttcttccgtcttttctttctcggattgatagctttccctgtcacgcttctctcacatctcatgcagtacatcttgaccgatcctgaatcaatttctgaggttcaaccgaagaatactaggttcttgcgtataccaaagtacttccctgaatatgtcgaggaaggtggttggtccgccccattcctgggagcaagcatagtgggcaaggtacgtctgaagcctcgcaaacagtgcatcctctctctccaacttccatgggctcatatctcaaacttccttttgcttctccattaattatcgtcgtggtattcagctggtgtacgcagacttgactggaaagtactttacgaccaaagtcgattataatagacacgtacgtctctctcgtattccttctgtgttgattccctctttagtggatgcgcacaagactaaccacgtgttttcctctacaaccgtttactttctttctttgttactgatggtgtgatgtttcacaaactagggtcccgcacggatgacgagcgctcctgatctttgagaatgtctgtactaagatgtaaatgcatatcgtcgttttgtataacgtacaagtataacctgcattcgatacgaatgacggctgcctgaggatagacaaacagttgaagtgaaagttcgagagtcttgatgcttcgtcacaggcaacagacagaaaagcgatcggggccttagatactgatcctcgacgtgtcatgtcggacgacgaaggatagaatgacgtccaatttggactccaacaacggttatccagagagataacaggccgctgttgaagatgacagggctgaacaagcgacctacaccggagagatagagcaggacgtcagacaggtcgaatgagaggtatgacccaaatcaagaagaacgacgaaatgtctgtctgtctgtctgtccggagcccatttgtagaaatttggcgagaatatcttcttcgtcatcgttctcctattctacagtctttccttccccctcgaggcaatatgattattatggagggacctctcaagcggtcatcttctttctcttagtgggtatgaaaagattgacttcttttcgtttcggcggcctactcggttgacctgcaggtatcacagtggcgctagtggtagacacaggatgaatgacgggcgctgggttagatggaggagatataggaagaatatttgctttggcgggaggagaatagacaggagcgacgggtgaatatcgagctcgagcgaacgagggggatgaagaggcgatcgcaggaggtgactgagcggaaggagagccagatgtcctagagctagctggtg

SEQ ID NO: 695 - DNA, 31210 bp, Xanthophyllomyces dendrorhous
tgttcttgacgaccgaaccagtacctccttttttgatctctcctgacgaatcctttttgaagaaattgaccactactttttcgcttggtagcttcggttctggctccggagggacatataccggtcttctatcaataacctttggtttcgtcgagtcgatgacgaaccgctgggccggattgataggtctggttgacatgagcattcggccaggctcgcggattacagaagaggccggaacgggaaacgttcgtcgggacgattcgactgtcgatccggacgaattgggccgggtttgagatcgaggtaatcgaaagttttgggcgtaagactttgtatgtgagcgcgctttggacaaaatggatgatgtcgatgtcgatcgcgtgtctgaggagaagtgatcggagatggtcaatacagcgaatgtcaacttgagataagttgatttacttcagaaggcaaaatcaaaaggagacgataaaacatacctgtggctgtggaaaatctggactttttaatcttatcgcccgagagtttgttactaaacacaagctttctttcttgtcgttgactctctagagcagcatagctatctttgagacattgtcgtctctcctgctctttgatctgacgattctcgtgcgcggcctgttgaagaataccgaacgtaagagaccatttaaaattaaagttgacagaactgaaaagaaaggacgcattcagccgttgtaggcgtatgacatacaatataagatcttcgccaattactgggctcttttatctcgcccttctcatacgcgatacgaaactcgaagaaatcttgaagagtgagacgtttccataggactgttttatgttcaatagaggtgtgttggatgtgatcataatccgatcgacatgtatgtcaggtatactggtatgaaatgaaaagacggatagagacgtcacgtacttctggagtcttttttgatgtgcttgagaaagattaatgtgcggtggaccctgtaagcgatagtataccaaagtgagaggtcaaaagctgaggaacataccgggctagctagctcaatctctgccagctgttcggccttgcactgtgatagaaatggctctgccaggctgtaaggcatatctccgatatccgtcaagactattcgattcgatttgtttcattccgttcaaagaagatccaacccagcaaacaaagcctagcatcagcttaagtattttccgtgagaatagtccactaagaagtcttctgttcagactaagagtgagactgataggacaaagtagatactgacgcgcgaggtgggccatgacgactgaccaaggaaagcatgaaatttcgtcagagtgacctacaacgaaattcgacgagaactataatcatgtagacaaaccttgagaagccatctgtctgagcgagagcaccggacctggcaccatttttcttgtggagtgtccgaacggcatcgggagaagtcaggcgtgtcgttcacttgttaggacgtatgttgatatttatcggaaagaagactctaggcgagctaggacgaagaagtgagccagattgatgtgttagggttactgaggttacaacgacgtaatcaacacccactacatcatcactcgtaaccacgccatttgatcaccctttctcgctaatcattctcctactaaagtgtgaacaatcacccaaaaggggacgtactccgacatatgatgacgacaatgttcattgaggatgtctactgacgctggaatcgtacaaaagacgcttccggccacctcgtatgggtctctcaatgttgccttgacggatcagatccagcttactatgtttagtctgttcggacttaatcagcccgaagggctgcttctcacgatcagaactagacagaccccgaccaatgtcgtttatatatcagaagaggaaatacaagatgctcttaagagacatcttttcattgtcattgatcatggcttgctatacatcatctgtgaattcaacaaaaactcaaactgatatcgctctccgcatgtagaaaacctaaacgacgtctgataactagtgtagctcagtttgtgtcagatcaatcaatttagactttgataccccaatttgatctttgatgcaccttctttctgtttttttgttgaagctattcaagaagtcggcttcggtgtcatcaaaacactttccagtgatcctgccaatgtcatttttgccagtgcccgatctccggcgaacgcgaccaatctctatgacctggccaagacgagccagacaaatattcgtatcgtcaagatcatttctgccgaccttaaaggcaacaagaagtccgccgagaaattgaagagaactgccggcaaggttgatattgagaatgcgaatgcaagccaacgagacagactctgcgcaatgaatcctttatcataatgccggcgttcccatattcatcgctccccagaaggagtcctcttctgttctcttagaatgtgcgtccaatgttcatcctcttccatcccttgtgaaacctgttcctgctcaagtgtagtatacactgctatacgggtcatatcagatgtggaacacacactgataaaataatgtttagcatgctcgaaagaaagaaaatatgaaatcgaattcttttcatctcccctcgactaagcattgtatggtagctcggcgcgactccttggccactcttttcaagatgcgatccttacgtttcactgaacaaggctgtcatcagggtgacccacaaatatatggttctggagtttctgcacatgatgcgcgctcaacctatggataccatattccactcggtttatagtttctctttcatagtcaagagaggtctcagacgatgcttcttttattgatgtctagctacaagtctcgctatatcaagattctctatcattctgtgtctagctgagaagtcaaagaggactttggctgaatgtagtggttacagccatcgtaacacattcacacacttcacgatcaagaatcaaggatttgtacttggatttcttcatacatcaccttctgccaccacccgattttcttgtttctctttctgccttttcgctttcttcttatcatatagataatcttcagaaggttcttgccaaccattcgcaaaaacaccttttctaagcttctcgcctccgagcgaaaacaaacgatgtccgggagcacgaccaacaagaaagacatcgtctccggttgggcagcctcgacttcgaccgagtttaacgacgagggagaacctttgaacggatcatcacaggctgcagcagatgatgcaggagaggatatcaatctggatgtgataggaaggagactgattggagggaaacacaaggaccgacgagacgagctagcccggctggaatctctggccaagaaagatggtacatccttctttcttttcattcctttctctatatgatcaagtcatcaacatacggcctgaatgtctggctttttgtttaacctacttatggctaactcgttcttctctaccaacagctatcccgatcgatgggaaagtttcccttgtcgagctcgtgctttctttcgtcttccgaatcccagacttcacgtccaatgaagctatagtctctctcgttactgctctcactatgtctgatccagaaggccagattgtccaaacttgggagagttgggcaaaacaggagctccaaagagtgttaccatcggctggaacgtacgtgtctttctctttcatatcctcgctcttccttcggccatcatcttctagcatctgctggtttgcttcgcttgacgtctcaacttacttactttcggatacccttctcaaccctaaattcagcccatccactactcctatctctgtttacttggtccatcttcatctgctcgctctcttagataggcttgcttcccaaccgactaagtcttccagcttatcgtctctgacgctcgcgatggcccagacattggacgtgcttgtctccgatgccagcccactgaaggcttccatccaaaaagcggctatcacgcgaacgagacgagttcttcgaaacgtacgattattttacttcgtttttgtccagctgtcgaacaataacagtgctgacgtgagactggctgttttcgtcttcgtcagaaccctacggtcattccgtctttattatcgagccttgttaacaagcctgccgataatactgtgccgacagccttcgctgccgtcagactcccccttgttggccttattgtcgatgtgtgtcttcatcttcgagccaaatctgagacggagaagggagctattggagggactggtcatacttatgttgagcaggccaaagaagacatcatcgagctgtggaaggccgccgtcctcgctggaggtcagggtcgaagtggacaaactgctttgaattcgttcttctcacgtttcgtcactgaatccgaatttgggactcttattccccaagtagagaagggtttcgttcgaaacccaaacacaacgtttgaagcgcttggcgcatttgtttcttccatcaatcagttctcgttagctccttacgctcaatcaaagctccttcctctcgtgctggtcaacgccaaatcggcaaagccggaagttcgattggcttcggtcgagttcttctatgtgctctctcagaagatcaatggcgagagcaaagaggaccaggaggctcgatcgggtgtagcagatgaaatcctagctgtcctcaagtctggcaagaccgtttctcctgaacatcgactggcattgtactctcttgtcagcacgctccctgcggattcaacaatctctccgaaggtctcagccgttctaccgcctctcatcgcaaaggagacgacttccgaaccggcactcaattcactactccaaactctgtctccccacctggctgctacgctcatctcaaacatccctgttccggctccatctgcaacggtcatcctgaaagagttggcctctcctaaagctatcactaggaaggcggtggtcgcctgtgtaggtgacgtgctatggaggatcgggcaagttggagatggccaaggatggacggccgaggcggacaagttcgcggaaggtacaagtaaagtcttggcggacgtcagcttaaagaacgtcgcaacagccgctctgacggctgtaggcggagtaggcgaaggatttatggccgctgctgtgatgcttggtcctttaacgaagtcgaagagcaaagccgttggtacgtacccatctttcttcgtatcctctctgtgcaaaattcaagttcactaacctttgcatgtctggaactaaattctacagcaactttactcagtaccaaccctatcttgcaaaagatcaccgatgtttctcctaaaccctctttcgttctctgggacaaagcacagagaaaggtttcttccaaagaagatgagatttggctacttagagctttggaagctttcatagcgaaattcgaggaaaaattagctaaggatgaggctatgagaatccaagtcggacttgccttcattcacttgatccttgctagttctaaccaccaaatccgacaagacgctatcgttgctctcagatccggtgccaacaggcgattcaagatctacaatcgaatcgtccgtgactctcttaaagcatacttcttgagcaaggaatctactccttcgaaagtggtcgctgaagagacggaggtgaactcggagacgagggctaagcagcttttgcaaatcctgcacaccgctgtgtcattccctgaggagacttttgaggaagtcaaggaggatgctttggtcgaattggtcattttggctcaccatcccgagcttgggtccatcgccgatcatgctttcgtggatttggccgtctcccattccatcagtcttgcgaggcttgttgaccgaactcagacccggcttctcaagctgctttctgacaatgcatccgtcccgaagaaaagcatttcatttgccactgcctcataccgggccgctaagtctctggcattcatatctccggaaatctttgtacctgagctcatggctaaggtccgatccgatctagatcctcagcatcttgactttatcggtaccgtggagcaaggtatttgggctaccccacccggctctctcttcgtggacgttcttgccaacaagaaggtcgctcccgctgccggatcccgggctaccgctgctatggacaagtgggagcaggaggttcgagagtctgctgctaagaagaaggctgctgctggaaacggtgttctttctaaacaagatcaagagctcatcaagaagcagacggcagtcgaggacgacgtccgagcgaagatttcaaagtctcaacagcgaatggaacgcggacttgctctaattcgaagcttgatcgaggccgatgtccttgagttcaaggcccttcttacggagacccttcagattcttttagatggacctttggacaagggttccttcttggtcggagacgatgctttccaaaccttcctgcgtctcggagactgctgttcttctcgacttggtttgcttcgctctttcatcggagtggctatccttcggaactatggtgtaggcgcggtacccaaggagatgcaacaggagcctctgccaagtttggtcctccgagttctttatcgactccgtaccctcagcgaacactctccgttcgactctacatcgtatgcgtatatcactcctttgctgacaaccgtcattgccaagggtggcttgggaggagcttcatccgactcggaagaagctatggaacagcttgctttagttctggagatcatcaatttccattgcggagaattctctgatactgttttccctcgtctctcgaccattggcgacttgattcaacttattggtagccaacctgcgcttcgaaagtctgctgcctctgcactcatcgagcttggtgatgccatcaaagacaacgcggttgaaggtgaaatcgctgctctcatcaagggcaccttatctcaggagatatctgttcgaaacgcttctctgcaagctatccagcctttggatatcactgagttggactattctagcgagctctggatcgcgtgtcacgatgatgatgctcagaacgcccgactagctcgtcacctttgggaggacaacggattggacgttccggatacattccttccttccttactccctttcattgagcatgacaatgcctatgttcgaaccagctgcgctatctcatttggagaggctatcgccctgcaccctggactcattagtgaagtcgtcgtcgctttagaggagctttatgttgaacgggctaagttgcttcttcctgaatttgatgagtttggaatgatcaaggaggaatctctaaaccgagctgatccttgggtcatccgattggccatcgctgaaaccttcaagcacctatctcctctatacactccggagcagattgtacccctcttcgagttcctcatccagactgaagctttaggagaccgaagtcccgaagttcgacgaggtctccttgatgctgggattgttttgattgatgcacatggtcatgtctctcttggagagctcatcaaagtgttcgagacctacctcagccagccgtcttccggaactgaggcaggcgaccacatttccgaggctgtcgtcatccttttcggccggctcgctagtcatcttgatgccacggatcctcgaatccctaaggttgtcgaccgtctagtggaagctctaaagacgccttccgaggttgtccaggccgccgtgtctgactgtatccctgctctcgtcaagcgcatgaagtctgagcttccctctctagtgtcgcgactctacgatctcctcattcatggcgagaagtacgcagagaggcgtggtgctgcctacggtgtggcaggtgttgtcaagggacgtggtctttccgctctcaaagagtttagccttattgaccagcttaccgaggctgccaaggataaagaggactttaaagttcgacaaggagccttgttggctttcgagacactctcggccactctgggacgacttttcgagccttacgtcgtgaacatcctacccctccttttgaacgccttcggagatacctctgccgatgttcgagaagccacccaggatgcgtccaaggtcatcatgtctcgactctctgggcactgtgttaacatcatccttccctcgcttcttgaaggtctcgaggagaagcagtggagaaccaaaaagggatctattgaactcttaggatccatggctttctgtgctcctcggcagcttgccttgtctcttccgaccattattcctgagttgaccgccgttctgaccgactctcagtaagtctttcctcttgggcattaaccgtcttatcagatactcaatagtttcggatttatattctattctatctattcttctgttaatctagcgctcaagttcgacaggccgctaatgctagtctaaaacggttcggtgaagtcatccacaaccccgagatcaaggctctcgtcccaactcttctcaaagctctagtcgatcctacgagcaaaaccaacttggcgcttacctcccttctcaacacgtcctttgcgcacttcatcgattctccttctctggcccttgtaagtcttcaaattccatggacatcaagcctgacgaactaaccatgtctttcacgaataggtggctcctatcattgagcgaggacttcgagaacgaagtgctacaagtaaacgaaaggccgtacaaatccttggaaacttgtaagattcctcactgacttcgtttcgagtcctctcttctgatcatgttttgtacatttgaatggcagatcgtctctcacggatcctaacgatttcaccccttactgtacgtagtttcttcagaatctttgccgaaacaaaatttactaacaggatatgtacatgttgtatacagtggctactttccttcccttggtccatattgtcttggttgacccggttcccgaggctcgagccactgccgctaaggctttgggtactcttgtggaaaggttgggagaagagagcttccccgatctcgtggagaaccttcttcaaacccttcgaaccgacacctcaggagtcgatcgacaagttagtctagcacatacatctatcaaccaattacccgccatttcagagttttttgacaccttgattatcatctttcagggagctgctcaaggtcttagtgaagtgctgtccggtttgggtatggaacgactggagggtcttcttcccgaagttatcactaatgctagcagtcctcgatcttacgttcgagaaggtttcatctctctcctggtatatcttccaactaccttcggacatcggttcgctccccatttgggtcgaattatttcgcctattttaggaggtttggccgacgagtccgagtatgttcgagaggcttcgatgcgtgccggtaagatgattatcagcaattactcgaccaaggctgttgatcttttgctgcccgagttagagaagggtctcgcagacgaaaagtggcgaatccgacagtcctccgtcaaccttatcggagaactcttgttcaggcttactggtatcagtggaaaggccgagattgaggaggaggaaggcgtcgatactggtgttgctgattcttcccgaaaggttctcctcgaagttcttgggcaagagaagcgagaccgcgtgctttccgctctctacgtcgtacgacaagatgctgtcggagctgttcgtaccggatccgttcatatctggaaggccttggttcagaatacccccaagactttacgagagattttgccatctgttatcaacatggttatctctctcctatctagccctggagatgaacagaaggagactgcttcgcgaaccttggctgagctctgcaaaaaaaacggagagagaatcatggccgaaatggttcctatcctccgttctagtgtgtcttcacccgattcaaacatccgtgttggagcctgtttggccttcagtgaaattttgtacgtttctcgaattcgcatgcgtttacaagaattttagcctaaccagatgattcgttgatcttgatagggagaatgccgtacctgctcagcttgaggagcatgagggtgctatcattgcaggtatccgaaccgctctcgttgatgagaatgccgctgttcgagctgccgcggctcagaccttcgatgctctcctccagggagagtttggaaataaggctattgaccaaacgatcccaacccttctcgaggctctccgacaacctggggcttcgtccgagaccgcattacgagcattgagagagatcatgactgtccgtgccaactcgatcttcccggtcgtcatcccaacccttatcactgtcccgatctccgcattcaatgcccgagctttgggttccttggtttctgtcgccggaaacgcgctcagtagacgactcacaccgattcttaccgctctcgtcaagtctttagagactgagaaggatgaagacatcaaggctgaggtccaggagacaaccaagacattattgaagtctgtagaggatttggagggaatcaactctctcatgatgacccttcttggttgggccaagggagaatctcccgagcgacgagtcagcgctcttcagtgcttccgaacattctgtcaagttactgaagaggactacgaggactatcgaatcgattggatcagacagctcatctccttgtttgccgaccgacagtctactgtggtcgacgccgcttgggaggctctcgaggccatggttaaggctgtaccaaaagacgaattagaagatttggtcatccctcttcgaagcagtattgagtcgacctcggctcccggttatgaagtgcccggattttctcgcccgaagggtgctcagtctatcgtgcctatccttttggcaggagtactcggaggtacccacgatcagcgagaacaggctgctggcggtattggagatctcgtacttcgaacgtcggaggctggtatcaagccttacattgtccaacttactggtcctcttatccgagttatctctagtcaaaccttcccccctgccgtcaagaacgctatcctggctactcttacagtcctcctccaaaaggttccccatctcgtccgacctttccagcctcagctgcagaggacatttgtcaagtcggtggccgatcctgcttcggtctctatccggaaccacgctgccgagggtcttggtgtgttgatgatctctcaaactcgagtagatcctttgatcaccgaactcgttgctgggtgccgtacttcggagcctgagattgcctctagcatggcacatgctcttgcgtcggtatgtatgactgctggtaagaacttgggcgcaggctcaaaatccgcgattgaggagctgatcggagagactttcgaaacgcctggacatggtacgttatcttttgcattagttaatcagcatgtttgtagccaaactagggtccattgtctaaatacacatttccttatctcaacaatatagatgctttcaacgaggcaatcgctcgagttgtggccggtttgacgttgtacgataacgagagtgcccagccagtgtttgagtaagtatttgcattcatttgacttgaccttactttggttctgatgatggaaacaatgaatcactaatctaatctatccaacttttttttgcgatcagatccctcatcttcccatctccaccatcaccggtttcttctcaggtgattctcgcgctcgccaacactgtgcccacaatctttgagactttggatgttagggagcaagtcgtcaagaagcttttgtcgagtattgcggtgttcgataacccgagcatagctcgaccagccagagaagcaagggatgttctcaaggggcttggggacgaagtgatcaactcggctcttgcagtttagattgttagacgggatatttgtgtgtaaaagaaggaagacagaaaggaagaaaaaggagcagagaaagttccgcgtagatgatgatatacatgttgttctctatcacccagtctatgagtttgacacagctttgtggcaagccgtgacgtcagtgccacaagcaccctcatatcatgagccctgcccccgcttgcaactttccttttctgttctcctttagccatcaaccatcatgtccatccccaatgtatgttctgatatagcactttgggagtgttcgagcgcataggcatactgctgatgtttcgtcgttgtttcatgttgcaataaactcaactttgaagtattacgctatcctttcggttcctagaacggcttcattgtgagtgtatgtgtttctagccatccatcttctggagaggtgtattgacccaaccacatatcatcgactttagtgaggagattaaatcggcctacaagaaggagtctctcaaatcccatcccgatagattagcccctaccgcttccgatggttcgttcattttgtcttgacgccctctttattagtccactcagttatataggttgacacgccgcgggttgattatcatcagctgagaggaaacgggcgactgctagattccagcaggtagccgatgtacgtatactgtttcctattgtgtttcatattgaagatatagacttgctcttgactcacccttttctccataggcctactttaccctgtctgacccagctcgtcgaagagaatatgaccttcatactccttcgtcctactcgttcccctcttcagacccattcgatggtactgaagaatcggcatactcttcatcgtctaatgtgcctcctaaagaaagcacttcgtccttcttttccaacctcttcaactcggcgactggtggtccggcaggtcactctaacgccgacgaaacattcacgagtgtgttcgccgatctacttgagccggaggttggaagagagcgcgcaggaagaatgtggagcttggtgggaggagcaggaggtgcggctgtaggatttgtgattggaaacataccaggagccatggccgggtacgagttgtcctttattctaaatcaccttgttctcacgttctgtggattcgagagtaaactatcatcgccgtgcatatagaacaaagagcgctgacttgattagaattcttcttttctttcttttcaattcagaggatttgctggaaatcgtctaggtgccgtccgggatgctaaaggaaaggccgttggtgaggtcttcatggtacgttttctatgttcctttatatgcttctttcttctttctccagggggaaactgaccaaagcacaatcgttcttataataccacttttactggaaaaacaaagagtctcggctcggaccgaaaggcagaggtaaagaagtttcgctcgttgatcctgcccatccttatcctgctcacttttatctctcgatttccattggttctcttcagattctccgagcgctcgccgcaaagtttttctccagcatcggccagaaagcattctgattcttctgttctccagctatattgcacccgtcgagttgttcatcttttctctattgagtttgcagacactctctttcttttctcatcctggtttccgccgatcttgtatcaatttctatcactcgtatagctcgacgcaacatattcaatgtcctttctgttattgtcgtctgtgtttagttcacgaccaacggaagaatgcgctcttctccattgcttataccaagataaaactccgaggaaattcaaaaagaggaaaagtcgatagacaagatagatgagaccctgcgaagagggatggcaaaatgactgtacatcaccctgcacacgtatgacatgcttggcacgtgttgacatgagaccctagagagattaaatgacaagttgaccgagagaagatgaaaaaaaaaagtgaagagaaaacgagacagagagacggaaggcgaataaagaagagacaggagagcaaaaaagaaaaagaaaccgatcaatgagaaggaaatcaaagagggaactggaaggaggaatcacattgcgagaagacgaagactttgagatatgaatatgattaattatagttgaagttcaacaagtcacgagatttcttcgaaaagaagaagacacgatgattaatgttatgtcgaacaaattaaacacaagatgaacaagagaatgcgaatgggcatgcacggtagagaaaaaagtcgaagtgaaaaagatgaacgggcaatagagcacatcaagtccaatcatctgacaaacccttaggaataaagagacaacttataaaaccctgatagaaacggacagacgagagagagaatatgttctttcacagagggatatcggctagctttttcaggatcgcttccaatttgacgttcttccccgttcttccttccgaatctacgtctccaagatccatccttgagttagcttctgcgaactctccttgaagccttcctagttctctctcgagtgcacctgacaaggtgttgaggacttcctgagtatattcgaatgagtgggtttctgtgcgcatgtagtttacacagtggtgaaggatctcaggagaggtcgatttcttctgcaacgtatctatagcgcgccgaaagagaaagaggaatgacaagctcaacatctacaaatagagtatgaaccatggtgagaaatgaagagaagaaactgactgatgacgagtctcgatgaggggttggcatgaatcgagtggatagtgggaaaactgaatttcccttctgtgaggtcctctgcaaaattcttattatgggcatactgataaaagtttgcagtcaaagcaccaggagacattagaatagattgtttcgactgtgatacttagagaaacgataagtacctcagaagactgaaggttcatatagtcatccctgatctggaagtatattgagatcaagttgacaagctggacaaagtctctacacaatgatatgtgcccagtacgattaagggttcccagaagaaacggatgagttgagcacgttatgctctacaagaaaacatagacggatgtagttattattgagcacatacatgtcacattctgactttgccatcatcaatctgaccgctatacggaacaaacctcccgtctctagatggacgttcatcccgaacatggtcagcaatagacaacaatgatttcagccaggacaaaagaccattcgctcacttccaagaaccattttcacatattcctcttcgctaggacacgtcagactatctctccagaatagctccaggccttgccctctatggagggaaagcatctcgtctatttaaccgaagaatcgaatgctggtcagatgaatacatacaatccaaagactagagtacaagtgaagcttacctgtgatcactttatcaagatacgtatctttcgagaacggaatctgcgaattaggagttgacgtgcccccgttttcagacgaggccgaggaggaggaggatgcagaggagacggatgattgaagcgaagcagatgaaggaggaattacaggcatgggtatcggtgttgggcgaagcttgaagatctcttgataagccagaaagtagacgtagtttgcactataatccatagtagttatccggtcagaataggcaagtcaggactttcggaacacacacagagatgggatggaacgagcaaatgaacgaacgtgtttattgtctgcggaatcccgtaaattagatgggccacaggcgacccacgcctgaggaccgatgaatcctccacatcgtccattctaatgggaaaaaaatgaacagaagggacgtttacacaaatgacggagcgaacgcacaagagaaagatgtcagtttaccgtcgcatcttgaggactgttgtaactagacgaccagtggtccagcatgatgggagatgtgtagaaaggcaagaggatgaggaaaagactcacaataagctagcggtatgtagcatgctgtttatagcagaccaagcaagtcgaatcggattaccaacgagaacaagaacgagaaagaacgaaataacgaccgtcagtgctgcattgttccgtgccgagggttgaagttgttcaggcatgaaccccatctggcgtttgacctgctcggtctactaactccgttctgctccaagcaacaaccccaaccgacaagctaagagagatgacatacccaacaacgttctggatgacctcgagatcctccttcttgacatccaaccaatagttgaaagcctcgatgagttgtgatcgaatttcttttccagggttctttcctaggtagtgatacggttcaaggagcacgatatcatcctgaggagtaaactcgagtggaattgctgtgaggatgttcgcgtaatccatcctatgtgttccggatgagtgtatgtatgtgtagttctgtgtgttagctatggctgagtgcactttaaattgggtgtatgctacgtgtgcgatgaacgagtggggtatatgctggtcgagtatccttctggttcatcgtatcttccgaaccagatgaaaaacgatcgagcgagatggagaaaccaggagaacacgcaaggccgtgccgatcggccaagtcgccggccatcgaaccaggtcgaaccacctccgaaccgggcgggctcgggcaaagagatttcgaccgccggattgagcgcaattacgtaagtcaaatcgccggcaagagtcattaaaaagggattctatatatcgacacgatggacatgtatgaacagtctggtacagaaacagataattatagagataggagaataaagaaacaatggatacaatgacaggccaacaagatatctatttgagcccgaaaccctggctcatcgtgagcgcctcttcaagctttttctgaagcactgtctttgatctatacctaggcaagcagagcgtattgaaacatgtgtgcgaagctttcgaggagggaagtgatcatagttgaacaacaaatggtcaggatgcgatatctaggtcggttcagagttcaagctcaagacacgtacagggaagataagtctcgggcactctggtagcttgaattcggaagctcatgttgatcagcccggtcgcaggcactctgtcgctccccgtctgatgtcataagcgaagacaaccgatttcaaatcgtcaaagatgcattcgtcgataaagctaaaataaacatcatacgtacaacgaacgccagaagcttttgttgttgttcggtcgaccaagcagagacgagctcccagaacgatctacactcacagatcgttgaagacagccaacaggagatgagctacttccggtgaaagaaggcaaggtcgaagaggaaaattaagcccttactcaatcaactcatcttctgccgagcagccttcgtatacagtaacccctcggagctgccatgaggcacaaaaccctctctaggtcagtatacagagcgagaaaaagaaggaaaatgtgttattcaattgtagaaatattattcactcacctgagctacatctaacgaatctggcgatccgcagaccagtagactaatttcttccgcgtggaacaacgagagcgcattacctgggtttacatccagaaacccaacaccccgggaaaagacacaactctcgtcaacacaatgtcttgtaaggaaggaaaaaatgtatcacacacaacgaaccttcacacacggatagccatcctttctggaacgcccggaattggcgagaaaccgaagtaaccaacatgaactgctcgatagatgtcaggcaaacaaaatcaattccatcagatcggtcaaagccaagacgcaagaagaaataaaaacccatacctcaaccaaccgttcaacatattctatataacaaaaccacatgagggatgtcagtcaatagacttagcagtcagtgatagtgcatgatgaagaacaagatacacaccttctcgattttcagatgttaccggggtgttttctccattggggatcaatggaactggaatgatctcgccaaatgcctcatactattcaccctccccgcacaagaagagtaggtcatatcagcatagtcctgtataggcggggatcaaatgatgatagagacaaacctctccgacaaaagtccgacagaatacttcttccacatctccttcaaactctaatagaactctcagccctttgactaatgaaggttgccattcttccaaatcggtcagagtgaccggttcgtcaagaagtcttttaaacgccgccactggcaagcgaatatctaatgtagacgcgtgatagacagctagaccgataacaacctgtaactcataattccaggcggtttgtgatgatcagtaggtgagaatttttcttcaagagggaggaggtccttttattgtagaagagaagattgaagaaatgaacatacgcccactaaggtgtactgctcttctgactctagggaagctaaaagggtcacgcaaagtccattcgggtcaataacatcatacattgtttgaaacagcaaataagaaggggagcagacttgcctgggttgaaccaacacagatttgtctcttcatcccagacccacataccataccgaggatcaaatagctctctgaccaacagcaagaaccactctttcttcaaacctcccgcatccacaccctatattcgaggtcaatgttcaaatagagagatagagaacacttgtcaacatcaaaccacgcgcgagtggatggaataggtgtgtaaatgggccgacctcttcaccagcaaattcaattcggagagcccgcttaagataatgtattgagacagaaatctgagctaatgagtcctccattaatcgttctcgacggactcgaatggtgatgtatggttggattagtcgtcggccgtcaaggtcgatatacgaagtgttataagatgccgattgttggactctacaaaaaatcgtggaatcaatcgttaatttacaagagaacacgagaaacaaatcaaagagactcacttggagtcatgcagaagaatcttcaatttcgatcctagagacattaagaatggatattgagacacaaagaaacattgttttgagctcgtcgaggctgttcggacccaggcatcgtaatccaccaccgcattcaactggtcgatcagtgtaatatagaaagcagaaatcggcaccctgggtacagccatgttcgaagcaaacatcaaggagagtactctcgcggtcgaacgaaatcgccagtcgtataggtacggcaacgttttggatcgactggcgggaggaagagctgaagcggggatatgtttgacaatccgaggaaccactctgtgagagagagtacaagagtcagctctgatgtattttttcttgtttggagaggggtctaggacgtacacggtactgatcaactccagcttgtgttggaattcatctttgtcataaagttgattgaaccaattgaccaactgaactcaaagaccaaacacagtttgatcaaaacgagaaccttagatgcgcctgatcttataaggaactcaaacgtacaatgtgatgctgatcgttggacagattagacacgataccgaggaaccgttttataatagttccagctttgagatccctacttttgaacaaactgtcgttctatcaaattcagatcaaatggaaatcgatgagcacacacacgtagatgaggcggctacattcgtccaactcacctcgagtaggatgatgacccaagtcaatcctttcgggccttgcttttcatgaaaccttctcctcggtctcctgaacaatccttgaagagcttcgaagatactctcgtggagttccgatggaagggtgttcagaattgcgtagaacgctcggagtttgcttaaatcaatcccaggattgaaagcactaggctccgatgtctgagatacatagaagatggatgagtccgagtagtgttcttcgagttatcgaagggaaaaaaactcttttcttacagagaaagagttggagagcgaggaccagtgcgagcttttaggatacaaaaggagaaatcaaaaccgtttcagtccagaggatagatgtccaaggaatgagaatgattcaacgggtaactaaagcttacaaaactagatgtaattcttcttctaaaccttgccaccgactctccttctgttctgatctttccgacctgacttcgattccccgaacctcatcctgctcgttctcactgtcgccttcgagtgtctttgcttcggcgacgtctgtttctacaaatggcatcctgaaagaagacgctgtaggtgataaaagaccggctgacgaccgagcttgacggataagatattgaaaccgggcaagggtaagaggttcaggatcggagtctcgagcaagtcctagggaaagtgtggttgcaggcggtgataaatagttcgatctgatgagtatttcgtatacaagacggaaaacgaaaagacgaaagaaccaactaaccagcggctcgtcgttcgcttagtccgacatcagttattgttccacaaacagtacatctgaacgagtctaacggacgaggatattgcagtgtagctgttcattgaaaatgcaagacggtgaagaagtctctcgtgagaaacaagagcattgatctagagaaagcaacataatggcaaatcttacctgcgcagcaaacacaaggtgaagtagcctatatatcattcacaagatgtaaaccaacctcagagagcgattaaagctgctcgacacacactctgcattcgtaagaactagatgagtcaaggaaacagtaaaaacgaaccatcgagactgccatcccttttctcaagtttttcggaccttccggcgccttgacaaacccagtgattcctatggagttggtcttcctctccgtctccttttgttttaagcctatacctgttaacccagtaggtgaaggaagcgtcaaacttgctgtactcgcaatcgtccgagagattgacccgtctggaggtagaggtacgttggatagtgttattgggataggcggaggagaagccgttttgatgggtgctgtagaggagatgtgatttgaaagaggaggcagatctgaaatactgagtggaggaggcaattctgatggaggagcgatcgaaggaggggatccacgatgaacagggggtaaagatgtctgagaagtaacagcagcactgttggaagacgatcctctagatttaaacagggatgcgactcttgatgctgagcttccaccgctcccaccgttagagacagccgcctgattggaaggagagcttgctgcatttgcacgagccagaagggcatcccaagtcgaggtagatgatgacgttggcggcggagaaggggcagtggccatcacagccgtcgagggagcatgtggtgatggagaagcggacgacgacgatgacggtggtagcggttggcccgacgtttcattcgtcaaactagttgatgaaaggatgggcgaggatgatgcgcgggccagaagagcgtcccaggaagaaccttgacctgctgatcgagtaggagtttcagccatgactgaggaaaatttgctgatgtttggtcctcggggttgaacagtggatccaacggtcgtcgacggggatgatacaaacgagggatcgaactccggagacatgggaggagtccggaaagggggaatttctggtgaccgagcaggcgatgccgatgcggacgttgtagcccgtgggggtggcacagatgggagttgaacagacgaggaagcaagcataggggtcgatcttggtatggtctttgaacccgatggttgtgtttgctggtgacgtgaaatgataggggcctcgaacgatggagctccaaagagcgtattgacgggctgcttgcactgttcaacatagcctaggagttggtcccaggatgctgcagaggaagaacctgaaggaaccgaactaggtaccacgttagagaaagaagctacacgttgggatgttgaaggagcatttgcctgattcggctttggtcgtagttgagattgagattgagaatgagatttagattgatagtgaagttgaggttgaggttgaggttcgtttgaagcaaaagtcaagtttgattggggaggtggaggctgaagatgaggagggacagatgaggataggagtcgtaaagacggaaacgatgaagagccagatagaaggtttcgatcggacatggattcgttgcccaggctgcgaaaaaaaggtaagaggataaatgatagtcaacgacattacgtctcatcgattcgttatatgagcagacacacacacaggcgcgctcttgaagagtaagccaagagtcgagccaacaagagaggatacgtacgatccagtttgccgatgtcctgacgatgccaagtttgctctgagctcggacaaaatctctctctctctgtcgacctggaagccgttatcattgccagtgttggcatgcataggggactcaattctatcaaaagcgacttgaccttgagagacagatctgttttgaagaactggacgatggccaggtccgcgtgagctagagtcgtaccgttgaggagggagtgatcttggcggtcgaagagtcccagcttttgacttctgttttgaattcgagttggaagctgtggagggaggaaggaaggaaggtaggttggacgtcagtggtgttgtgagcggagactcagtccctagcaaacgatattggccaaaaaggaacagagaagaaacaagcgagcttacagttggcagaagaagaactagcggaggaaaatatgctggtaaatatcgaacttgtagatgaggaattctgatgagggcctgttgatgaattcgatccattagggttgaatggtccatgcttgttgctctccccgctgagctttgagaacatgactgtttttcgagcgtgggtagccgaaggagtgaatgactgagtgtgaatagagtgtgagagtttgcggttgtgtacgtgtgattgtgtatgtgtgactgtttgtgaaatatgcgatgagccaagaaagacgatgcttggatcgatgtgatcagaagtctaattcggagaattccaggtaggtgcagacgatggcggaccgagcgcaaagaagctgaagaacaacgagacagaagaaggcaacggtcgagggtcttcagtctatctctttcctgcccttcctgaacgaggtgtgctgatatcagagagctcggagagaagaagatcaaggccaagatggacaagcaagatgttgaaagtacaggaaggcacaagagaaataagctcagtccaagaaccggttagtcacccgaccgcgcttttggatgacacgctcactgccaccgtcggctgtccttcgcagcgactgcacgatctgtagcagagtatattgatctagtggatggcgcctcgggatgattcagtatctagtctatacagagcaacacttcctcggagcgaaaggagtgtgtgtgtgtgtgtgtgtgtgtgtgtgtgtgtgtgtgtgcgtgtgtgcgtgtgcgtgtgcgtgcgcgctgtatatatgagccaaggatatatctcttttttgattcaacccatattcaaatatctaaataagcccaccttagacaaccattcggacgtgtcaactacggtagccatctcgtataatcgctttcacggaattcatatccaacctcatcaagtctgcacaccatgggacggtaggtctctggatatgttgcttctctgtctttgtttgactaggataatggaaatgctgaatcgtgtttttgccccattgctttttcagaaataccggtctcttcggagccatgacatcgatagatgccttcggcaaggtaaagcatagatcaacctgcctttttaatcagtcaaacatcgtctttttcctgctcatttgtgtatctcgtcgcttgttcttttcttcatgaacctgttctttagactatggaggatgtcaagatacgaaccagaacaggagctttccgtctgttctcgtttacttcctatgggttttgattgatagtcccgagtggaaaaatcactgaattcaggctcttctccttccttctcatctgaatagtcaccatgctctctttggcgatcatcgtgacatgtacattcatcgagtttgtcgattaccgcaaaatacatatcgaaccgtccattctagtcgacaagagccgaggagaaaagctcacggttgatatggacattaccttcccaagagtaccttgttaccgtaggtctattcgccgtccttctctccctctttgaccctcttacacagccgaccgttctctcttccttgctcgatctgtgtatcggctacagtcctatcgatcgatatcatggacatttccggagagcaccaaaatgatttaacgcacaatatcaacaagaccagattgaacgataaaggagaggtcatcgatttgcacggaaccggtaagcgagtttttttttcagatgaccaattgtgttcgcgctgtgatcacaacactgacaaactccttttgccgccttgatatggggtttgttctcgatgtgtttctaccaggactgactggagatttggagaaaatggccgctaccgttgggagtaactactgtggagactgctatggaggcactcctccatcaagcgggtgcgttctcacatctcatagtgatatcatctgcatggagtgctagtcgaaacaaaatcactgatctcacggattcatctcgcgtatctataacatcttatccggccaactacagatgctgtaacagctgcgaagacgttcgggaatcctacgttcgcaaaggatggagtttcaccaacccagatggaatcgagcagtgcgtgaaggagcactggtcggagaaaattgaggctcagaacaaggagggttgcaacgtcgctggccgagttagagttaacaaggtcgttggaaatttccacatgtcggtcagtccaaaatctcagcctgtaccaatttagaaaagctcttgttccgttggatctaaaaacagtgtctcttatgtctttttatcatctaaagcctggacgatcgtatcagctcaactcacatcatacccatgatctcgtaagtctttctcttctcttttcctttgatcagcagttctttcccagaccttcctctgcggctaaactgaactttctccctcttcgcttcccataggttccctaccttcgatccggcaaccatcacgactttggacatgtgatccacaagttttcttttggcgcagatgatgcgccgctggttcccactcagcgaatgctcgaagttagaaagaagctcaaggtggttaacccattggagggagttaacgcacacaccgaagagtctaactacatgttccagtatgttaaacctcgtattcatcagaccacgaaattcgaacagctagacaggtgccctgaatcctaacgtgataaccggccatgtgccgatcgatcgaacaggtatttccttaaagtggtctccacaaaattcgagtctcttaagggagaaattactcctgcccatcaggtacagatgttctttctccattattctcctcacgcgcttctcgggactcacaatcatgtttcgtccgtccttgtttctcgacacagtactctgtgacctcttatgagcgagacatgtccggtgggggaggtgccgccaaggactcgactggtcacatgaccgcgcatggaatggccggcgtgcccggagtattcttcaactatgagatcagtccgatgcttgtagtacaccaagagactagacagagctttgcccatttcctcacttcgttagtcacttgatcttctcgatgcgtcttgatcagaatggtcgtctgtgctgacagaacttgtgtgtttgtcaacttggatgtgttggacgatgacatttatcacctgtaggacgatggctatcatcggtggagttctcaccttgttccagatcgtcgattccttgatcttcacgggcaagaagaagctcaaaggcgagaaggattcggatggctatggcggtcttggtgggaaacttatctgattctgttctcggtcacctggttcgactaggtttgatcggtcaagtcagatcattcaaaggggagagcagaacgaaggaagaattggacatttttcttatcaggttgctcgaaataacattttttcttcttctttaatatccttctattcatgtcggtgtctctacgttacctacaagcaaaggtaccttttcttctgtacacggcaagtgcaaagtgggtcattgtcgatgtccaagccagatgaggttacaaagaagggcggatgctgtgcaggctcgcacgacgcacgcaccgtggcttaaagcatacaaacacctacgaagttcagtctagttctcacacaccatcttgcactcaaacgctcagccctacatcataacatcatgtcgttcttcaaacgtaagaaagacaagtcagagatccctttgcctcctgatgaacgtccccagtcaaaccacaacatctcgcgtcaggatcccaatcaagcacgtcaacaactgttcgcttcctcttcctccggggctcccagacagaatggcagtgcctacgaccaaacctcttcttcaggtcggacaccttcgattgccccttcctatgcctcgacagatccctatgcccgagcagcaagttcatcagcctcgggctcggtatcaaattataataaaccggtgatggacaagaagattgagaccgatccagcaagggccgctctattttcgggttacaaccctgccgccattccccgagaggtcaaacggcaggtcggcggaagggatttcggggatgataacaatcagggcggtgacgaagagcaagacagctccagaggtgagagctcggggggtattgatcaggcagcagaagatgaggaggtagagatgatcaaacgagatcttcgaggagtcaagcaagaaacattaggatccagtaggaacgctctccggatcgctcaagaagcagaagagaccgccagacggacgttgggtcaactaggtgaacagtctgaaaagattgccaataccgaacgaaatttagatatggccaaggctgcttcgtcaagagcgaacgacaagacaaacgagctgaataaactcaacagaagtatttttgtacccgtcgtcgtcttcaacaaggacagaaagagaagggaggcagaacagaggatcagcgaccggcatatcgaagagaccgcagagagacagactgccaagctggatgtcctgcaaagtcaacaacggctcaacgatgggtcctttgcggagaggaacgctgcgaggagaaggttcgaggatccggaaaagaggaaggaagccaggtcgagatatcagttcgaggctacagagtcggatgatgaacttgaggatgagttggatgataatctgacggaaacgcttgatgttaccaaaaggttgaaagcgttggcgttggcttctgggttcgttttgagtgcctttcgttgctaccattcgttcattgatcataacacactgacatattggggtctggaaatctttagagatgagatcaagagccacaacgagcgacttactagaatcaataacaaggctgaaggacttgacttaaagatcattcagaacgtcgaacgactcaaaaacgtaagtggttctttgccgtcatcgtttcatcttccttgtctttgggagctcctgagctgatcacgaatcatcctaactggtttcatccaacggtttaataggtgaaatgagcatactttctgcctcgcgtgtttgacaaatgtccgctcttcttctcttcttctttattgtgaatacagcttccgcttttctctgtcttgttcagtgatactctttctgtcttactctggactcatataattctctgatctcttgcataaatcctcttactcgtcctcttgtatcattcccatgtctctgattcagttttgctaactcgtacatgatatcacatcacgaccacgtctctttcttttaatgatgttaaatcatgggtatatgaatttagtccgaaagaaagacagaagaatagtggactgatacaacatgcagaagaagacttctagaacgaacagggcgactgtttctcatctctccaacgcttcgaccctcctcaacacgttcccaaccctttcaccgatagctctaaagtttccctcgactctagtttcgttctctttcagacttccctccatctgatcgacgatcgccttcaaatcaaccgagctctctttcaatctaactgcttcagattcgagtcgagtgagagtagatccgaatgatgaagatgcagaatgtatgtcggataaggaatgaagtctagcgagtaggggagggagaataggaaggataggttggattttgggcaacatagaggacaagctatctatcttttgaatctgtgcgactgtcaaggaagacgatgtatggtccgaagaatagagatgggtagccgagcgacggttgtgagggtcagatagtaaggtagtatcagttaaggaaggatttgaattgtttgttgaagaggaagtggcttgagctcggtcaagatcggtgaggagaagtttgattctcctagagattgcatcgagatggcgaggttgagtgagcagtgtaagaaggtggtccagtttctgaacggtgggtagcagaggtgctggtagagtttgagtctagtttgatcaaaagagcatgcaagtcaacgaaagatgatctcagaagcatgaaacagtcagcaaagaaaacgcatgactggattgtaaagcaacttacgtcgtccaaacctgttctgccaacaccaatagcgctttctagctctgccagccgtctgtcaatctctcctactttccgacttttctcctcctcgctgatggaccgaactgtctctgaagactttttggcttcttgggaggcgggcgtggaatctgacaaacctcgcgcgttctcgaggttttgtccaagcactctgattctatcctcccaagacttgccgttctgatcgacagccagccgagctccatcagcatctagcttgttgagaccgcccacaagacctttcaattccctcagcatatctttcacattattctccttcttgtcctccgacgaacggtcatccccattcgtaagaatagacgattcagcagtgagttgctcctccagttcgctcatttcaaaacgtaatcgacgaagcctggcgcggggaggttcatcatcgattggaagtaaagcggaatgttcgagacccgaaggaagtgagggaccagcgagcgtagggttccgacaagtctgcacaggagtaggatacaacgagtaggtttcttgaggcatcaacggtgggaataacagtagagtaattttgggattaacttttcacatgaagccgataatacagagcaagctctaactaactggctgctagggcaccaaacttcgctcctgccaaattgaaatcgggtagcggtgattcatccggatattctctgtcctgagcatccttggctttctggatggcccgggcagacgtggggttgattatatcgtcatcagagtcctcagcatactgcaaacatgtgacaccaaggtattgtacttgtgagcaagatgcgatgatgagatctaggaataacaacggtttgtctgacctgaatacgttcaggaggaacatcctcggtttcatagacgtctggcgcggtatcctgtcggtgatttcgaaaagcaaaggtgaacatgaaagcctatcgaaatctataactggccgttgactcacaatatctggtaaatctgcatatttagaggacatgctgaacggctatgaagaattcaaacgaccacagacgagatggaggttgatagatgatcaaggcggtcaagggaagtgggaacgtccatgttgaaactttgctgactaagcgaaatccataaacatcatccaaccaacggagccagacgatgatctccatccatcataccgactaccactcccaacatgggttcgacagttcttcctctacatgcgagggatcggataaagccagactttcatcaggtcaaccttcatatagagtcttttataaagaacgaccttcagatcaaattggatactggtgagtgattcatgatcgcgttcaccttctctctttcactcaggtttctttttcgaactcatcgacgcttgtctttctttgaatcctctcaatacagatgatcagatctgccgtctctctcttactccgacaggctgtccacttgggccacaattatgcccacttcgtcacactcagccttcaccattgaactttgtacctcctccgccggtccccgtacatccgagagacagagagagactgaatacagtatgtaagcattggcttcgtggtctctgcaagaaggtatgtagttcttcattacttctcttgtaaattcctgtcaagctatctgaactgatatcgagaatttattcggtagggagaccaatgtgaattcttgcacgagtataaccttcaaaagatgcccgagtgctactggctttccaaatatggatattgctcggccggagacgaatgtctgtattaccatcctaaagtcaagaaacgaatatgtatggactatgatagaggattctgctttctaggttcgtctctctatcttgtttttaaatgtttccgtatcgttatttactaacgcaagtcctgtttggaaaacccatttccataggcccggcctgtcctcgccgtcacataccccgccggctgtgcccactctacgtcgccgggttctgccctctcggccccaaatgcacagaaggcgcccatccgaaattaacattgcctcccgtggaagcctatcgaccgccaacgcctcctgtcgagaaatcaccgggaccaccaccgccaggttacggtaggtatgccgagtgggaaccaggaagtatgacaggcatgggtggcggaggtggtttccaccgaggtggttggaacaacggaggcgaaggaggtagtggaggcggcggtggaggtggtggaggtggaagactcg

SEQ ID NO: 696 - DNA, 70590 bp, Xanthophyllomyces dendrorhous
attgtgctgtgagtcctgtcaatttctccttccttgtctctccttcaaaaatgaaatatccaattgaaaccaatgaacgccaatctgaccattttacccattccatctgatgtctttcctccctcccatcattcaactgtttgcttaacctttatagacaaatgcggtcaacacggtcatttcgcgaatcaatgtgtgagtctctcctctctctcttttcttctctcttgatctttataattatttccatactgtaacttcaggcaggaaattttcgagataaacagttctctaactctgcacatcatcattgaactttccgtaatcgttctctgtagccgaaccggaacgtcccaggaaacagaggaggtcaagaccggacatactaaacccattctcctctcctttcaaattccactctcctcctacaaccgtttcacattttctttagcgtctgaagaggaacaaacgagaaccaacgacaaaaagatgaaacgttccatctattgaagatattcggtttcacgtatatatgtaacgtaatatattgattcatttgagtcaaattataccgcataagaatagcgataccaaggtttctgttgataaagctgaggcttttgctaagagaagaaaaaaagaaagagtagaggaggtaaaagagtggcgcatggttatcaaaagagacaaaagagaggggaagagaaacaacagatgaagagatgggtgcaattaatgagagtgatatccatgggtcaaggaaacgacagtgaaatgacacaaagcagagaaaggaagatacagtcgaaactggacgacatggaaagacaaatacagtggaaaaaaagaatggaagattgttgagatatggctaggtgactatgtaggaacaaaataatgaaatcttagatataggttggaatgaagggtggaaatcttcatgagattggttgatttggtagagagattccgattagaaagagaggcgaaaagcagaaagaaggtggatggtaaatcacctcagctttgggatcacattcgaaggcattaaaccactgtccaagatcacgaaatttcaagaagtcagtctcgccgtacacactattcggcatcagacacaagattgtgtaagtataaacgcacagttgtcttaacagattgtttccgctttgagaacctctgatggacacaatatggttgcgacacgcgtccttgattttgttcttctctgcatccgtaagctgtatacccaacgaaatgaaaacactctaagttggagaacgacatgctcagatgtgcgcgagtcttcgatagacgagagaaacaaaccattgtccaaaggaaggagatgtgtcctctgagcagcgatttaatcagaccaagtcaacgaatgacctcaagccaaggatgcagatatgaagaaagagacccacgggcccaccaccgttccggctatttctacgatctgcggtgcatgtctacatcatgagacggatcatggtcattactgatacacaaggaacaagacacggatgaaggacgatcgaactaaccctcctttctttactgtgcaaagattatcaacataagcctctactccgggtcttcctaattcaagtagcgccgtacgaaggaatgatattccatgatgaccaacagcgacaggtgagggagactctaacagtgccatgaggatgatcgatcgaagatttgtagatggatttgccaaaatcttagatatcaggaagctacaatgagtggatggcagaacaagacatcaaacgtttggtaagcataaggcactgtaaggatcggacaaatttttgcaagaccgtactggccccatcctccgttggcaatccgtgagatattttccatgatttcgacgaagacaggctcctatttaaggtcaggggcatggtcagtacgatatttgacagattgagcgtttcagctaaactcttttttacgcaccatgtatgtcggtgctggccaagtctcgaacacttgttgaacggatatagttccattttcggtacttgtagcgcattctgtccaattgcctctcatttccgtaatgatgctaagtcctcctcaaaggattgttactataatgcgctcgggccgagacactcaagcgatgcgtaaatcatactaacgtgtcgaaaacggccatttcgttggctcttgagcttcctttgaagatctgccaatgacagaacaagacagatcagcactatgaatcgaatattcggagatagaaaagtcactgactgctttccataatcgtcgtgctccagtctggaaagtttctgctactccaatcttgatcaggtctggaattagaacagcctgtgaaggaaggatgacagtcaatctatttgaagagaaacttttcttgacaacgcaaggaaaattatacaaaattgaacaaactcgaatctctgaatactctgcaatcttgcagacgacatgagtcccgtacttgtcgtttgacaacttaagcaagttatccctgtagtttaagaagttgtatatgtagttcaagccaaaactcgattaactaggaggaagttgtcgacgcttcagaatgcagggatgactaaccgaacagcttcatacacatccatcctagtcgatgctccaccacattcaataagttgttgaactagatagttgccgtttctattgagaaaagttagttcgacttgtcagtcactacatacgagcgcgcaagagtagacaaaatgacctacgctgtttgtgccaaacccatcagctcgcttaggatagcctgatggacgacgttctccataggttgaccccggagttggtgtactctggactttatgagatttatactcaaaatgttttgtcagttacatagagagtctgataccatggtcgattgggaactcacgatcaagaaattaactgcaaatttcagggcatgaccttcctgcgcagagcgctgggttcggttggccaaggtccatgtaagcgctcggtactcggatggaagaacctgacgagtaacggattcatatattgccttagtctgttgtttttattctgagagatggacagatatactaaccagggaatatgagcaagattgagagagaatctttgccactacctctggatctggttcatacatgcgtgtcgagaactagtataccaatgaacattctttcaatgagctccaacagacagaagattgaagcggaaactcatttaaaccctcacatcgttttctccaatgactcctatagcgcacttgacagcggtatcaactggagtacctggttctgtccggcagtctctcctcgattcaaacccaaaactttgagccgagtgaacagaatacggaggctgaattaaattcgctaatgcacatcagctgaggcaaaaacttggccggactgtagaattcgcgtacatacagaaagactgcggctaacatcgtccctgacgttgttatcatatcgctctttgagaacgacattctcgtcgcgaagctgaagcatcatcgccgtttgattgttcaattttgcctccatcttttcaagcggattcaggttagagaagcagcaccggttatgaaattcatagagtcttagtcagtacatacctgctgtattttccgagacatgagctccagagccatgtctttactgggtgccatcaagtctttctctgggcgggataatagtccgctctggaattgaaaatcggtgaggaacaattttctcagatcaactcgatatgtagggcaacgatcaagttccttggaagggaacagacatacattgtacgaaaaagcatgaggtaaggaaggccttcgatctagatggaacacatcgtgatgactgatgatatcgtcggcgggatcatagattgaatcgtgcatggcaaacattagtggggaggaaaatgaggagttgatgtgaagagacaagagagtgagggtggatctggaggatggtggcgatgagtgtagatcgaagaaataggaggagtcgctgaaagccaatgaaaaggaaggttttgcagagagaagtaagactttcgagaggtcaggcaagcaagttgactatggggagcagacgaagtagaattatggcctgaacctttggatcggatcgttagcaagacggagagagtgagtgggaggtgccgagagcgttataaaaggtgggaggggatgagtcaagatacgagaagagagaaagagggtcaacatccaaaggcttcttataccgaatgagagacaagtgaagaggaaaagcaaacaagctagggaggcgatgaggaacggaaactgatccatagtgcctgttgaagcaaacacagatatacgcgtgtatcagatgtggaggaaacagaacctgcagatcgcaacatgagtatatgacgcccctgggacatggagtgtttggattagatctgatgaactctacagagagattcgttcgagtagggtgaatcgcgtttgtttgtttgttgcttcgaagaagcatggatgagtagactcggcgctgagaagaaaattgaaggatgttgtgcaaccccgttcctgtcctgagcaagtcaagtgcagttgttaaagacagatgatagagcaagaagagtatacgacgaagggccaggagaccgaggacagtccagaaagaaatcatcagatatgatcttgagcaaatcagcattcaaatccatcgctttctctccatagatagatacaacgtcgacaggatatacaactcgagataagagaaaattcaattcttagttcttcttgtcccaaccgggaccggccttctcgtaagcctcgatctcctcatcaagccattcggggaagtcattctgaactacttcaagctgttctttctgtcggaaattcttgccggaggtggtgacgatgacgattcctttggtcttgacccaatccaaagtagcctgactgacagtgatatcgacgtcccccttaacggtagagattctatgggctacctgctcggcgatcgcatcggcgggtccacctgggtaacgaatgtgaaataccaggcggagttggttcataaagggaaggggtcatatgtaggagtgaatcacgtacctggaaacttggtgattggactcagagaagagtaggcctcgatcttgatatcgttcagggcggcaaacgcaagcagaggagcgttctcgagcgcattgtatgcatggtatcgaatctaacgtgataaacttcgatgaacgacgacactattggaagatatcggaaataacaaaagacgagaaagtaggaagaaacgaacttgattgacggctggcttggtctttgcgatcagaagcagctcggtgagctccttcactccaaagttagagacgccgatctaagacggaaagaaacaaggtaagtttaactaggcgaaagaccataatttgtaagaccggatactctttttcaaaaacaaaccgatttgacgagtccctccgccttgagaagctcgaactccttccagactttagcaatccctccggccgattcggcagcagatgggaaatgaatgagataaaggtctggatatgattggaatgaaactgtagcattcaactgctgaacgcgatgatgttagttgtttggaagataatcaacgaaccaaggtaatctacgccaagctgtgggcccaatcaaataggtgattaacaaaatcgagaaactctgtcgcccaatatccaatttactacagatatcgcaatcaactactgaccttggccaaactcttattgaattcggttcgaacgtcatctccatcaatattggcgaactttgaggtgaggtacaactcttttcgatggagtccggattgacgaatctgcaagattgtacatagatgagtcttgatgtttgggagtagatcgaatttcaagccattattgaactaacagcatctcctacggattcctcgttcttgtagatcgcagcattatcaagatgtcgatatttgtttttgagctaacatttttgatgccggatggtcaagattactgtgtcagcaaaataaaaatacgctcgatctggcgagatgacaatagttgtgcgaaggatgagcaattgatagaacgaataaactcacagcgagaagaacgtcttcagttgcgttcttctgatacagagcgctaccaactccaaaagcaggactggtcgacaagtcatttgtttcagtcagtcagatcacatacaacaccaacaaactaacgtcgattgcccacctggggatgactgatccgtcattgagtgggtacacaatgtgctttggataaagtccatcggaggttgccgaagtagggttcggatggaacaggccagacatcttggaagccagcaagggaagaactgagccgaatgggatgatcattattttatatgattcaagaagaaaactcaactgaaatagatgtgaatcaaagaagcagagtggtggttggaagtaaagatcgagagaaggaaaagatacccagggaaacggatgtgtgctgaagtttgggttcgtcacgtgcacccgattaatttcccgcttgaacatttgccctccacacttgtggcttcttcaacccgatacgatacgatacgatacgttgaccttcttctcacaagagaaatactcacagaggcatagatatgcagccatcgtcagatacagattcttcgtccgtctgtttggataatagctcggctccgacctcgttcgaatcagcttgggtcatgcctcccatgtcggacgacatcagtttgtatacattcgtcatctttgaaacccctttgtcgtttcagttcaactgaccaagattcctcgtgcagctcctttcaactcgccccgtataatggcaaatctttctttgaacggagatgacaaagaggtcgatgatttcaagcttgtcaccgatgaggaccgagcggaagcgcttagaatcaagggagaggctaacaaagcgtttgccggtatgtccattcatcttgggatccgtgaagcatacgaccacgtattggaaagttgagctttagcgttttcatgatctaatctcctatagccaaggactttaaaaaagccatccaactctatggagatgctatcactcttaaccccaaggacccgatctttgtaagtccttcttcacgtttaacatcatcaacgacttgtactaatccaagcaatatacggatatcattatacccacaaccgtagtggtccaatcgagcttttgcaaagatgaaacttgaggagtttggaggagccgtctcggatgctagtgagtccccattcatcactatgctttcttttagggttccattcattgcagtctttgaacagtgaggcccgagttttgctcatctctacatctttgcgcaatgacttctctcctttttttttcgccttatcctttcagccaaggctattgagatcgatcctaaggctgttaaagcatactaccgacgtgctctttcccagcttgctgttttacacccaaaaccggccgtggctgatctaaaggaggttctcaaacttgagccctcaaacatagaggctaggaagcaacttgtatgtatcacgatgctttgtaaatatctcgatttacaccatgctgaccttgtctactcttttggtctgcttcttcttcttttaggaagcaacccagaagctggtttgtccctcttgctttgaaaacggtattggactactagtttgccctcttggcttcagtccgagaactttttctcctaacagctcatccttttcttctatattgcctctgtcgattcgaatagatgcaccgcattgcttttgagaaggctatctctgcaggcgacaccgagtctgcctctcaccgatctcgtagaatgatcaacgatggatcttgtccgatggatgcgaagtatactggtccgcttcctcaaccgccgagtgagagcgagggcgagaatggtcgatggaaaccgacaaaggaatttgtagagggtatgattgagtggttcagagagggaaaaggtcatttgcctaagagattggtctgggagatcgtactcggttgtgaggaggtgcttaggaaggaaaagacattagtagagatcgacatcgaggaagactgcactgttgatgtcattggagatacccatggtacgtctcaatgcgctttccattgttccactcttagttccttaactcgtgtctgaactcatatgcattcgttctctctaggtcaattctacgacctgcttcatctgttcactctgacgggccccccgtcgcccaaccatatcctgcttttcaacggagacttcgttgatagaggaagttggtccgttgaagttgcccttaccttgttcgcatacaaatggctttatccgaaccgaatataccttaaccgaggaaatcacgaaaccgcgtatgtctcgctcttctgttatcgttctgagtctattcatctgatcctggactgatggtcagctggtgtggctctttgttctccgtctctttctcaaagggatatgaacaaggtttatggattcgaaggggaagttaaacacaagcatggagagcctacatgtgggtactcttctttggacgataaagtctctctcattctcgtctgtgacagataactgaaactttcttcttggttctcgcacaccactcaacagacaaactcttctcggacgtcttcactgctttgccgttggcgaccttgctttcacccactcgttcgcctcgaactctttcctcgctctcactttctcgagaccctcccaaagcgttcctttcgccggaaggtcgaaaacggttctttgtcgtccatggcggcttgttctccaaagacggcgtcacgttagatgatatccggaaaatcgataggttcggtcgtcaacccggtcaggaaggactcatgatggaacttctctggacggatcctcaagaagctgaaggtagagggcctagtaaacgaggtgtaggcgtcggtttcggaccggatgtcaccaaaacttggtgtgaggcaaacggagtgaccgctgtgtttaggtcacatgaggttagacaggctggttattcggtagaacatgacggactctgcgttaccgttttctctgccccgaattactgtgattcaaccggcaacaagggagccttcatcagagttgatgctgagggtgaagtcaagtacacttcgttcaactcggtctcgcatccacctatgaggtgagttgtcctttgtttctttcctttttggccttccgtcgtgtcgtttgagacttatcatatatccatatactaatcggtgttttctgtactgaaacgaaactcttcgctattgtcactaccaaacacaagaccaatggcgtactcccagggattcaacggattgatgtagtgattgtaaaaagaacgccaaaagaaaagagtaccccgaatggcatgttgttatctttggtgaatcggatacgagaaataaatctggcaagacgaatgcagccaggatacaactgctcgagatttcaagtcaattagttgattagagactcaatttcgagacacaccaacatcaaagttttcactagacggcaattgactcattggcgatctttttcaagacccctttgttgtctttctcatgtgcacatattctcaaggacagatgagtctggtgagaccatatacataggccaaaaatgtgctgttgtgttgaagagtaagagacagagaatgagagaaagagatctcgtttgggagacaaaaagcagcatatgatccccaaaaaaaaggtagtcgggagcgaccaagtctgaaaaaacaaaaggccaccgatagagacgtcccagtgatggaaacgtttatcggtatcggggaagggagagggtgttgttcctcttccaggtctttcgccagttggacttgttgaatcggtgacccttgccgagtcctcggttctgcttgccgatggaggtaagacctcgggactctcggtgcttgtggacagggttggcgatccagttgattcgagcgtctcgtcggatagccttgtgggaggggctgatgagatagattgatgatgatcagctgatgatccgaagaaaatgatcatcaaaacaaaacgaagactcactcgacaaggatgacctcgtagtacttgtagacaccgtcctggttgatccagtaggagttaaggactcgcaagttaccacatcgctttccaactcgctcctcagcggtagctcggagacccttctggaacttaaggtggttgactccgtgtcgaacgggcttaccgaaggtagctctgaaggtgtaggaagggttggtaaagacttccatgtcagatgttgtcgtttcctgaaacttgtttgcgaggggaaaactcaccccttcttcacgggcttctttcggttacctcgtcggactcggactcggtagatgaggtagccctgcttggccttgtaccccaatcgtcgagccttgtcaggtcgggagggtcgggaagctcggtggacgacagcgagctgtcggtactcccagcacctaatggatagaaatgaattttatttgagatagtcatggaacgaggtccagggtcgatatttggaagagaaatttaagcagacgaggaagaagattcggtttccagtataaaggtcggtcgaagaaaagatttaggtgtttgaatggtatcccggatagacgacaaaggtgaaatgataggagttcaagaatgtcgaacaaagcagtcagacaagtcgaccagtgggtatgcagcacacgagtataaaaggacaaggattttttcgttggcatggtcagttcaaagtttttttttctcccgcttcatactcttccatcgtcctcttacgcaaacaccacgaaagaacagaaacacaaagactaacctgactcgcatcaagaacctcataacatcgctctgcttcttcttgtagagctcagcaacgtacttgtaggctcccatcttgaattgtcttgacgttagaagtgcaacgagtaagagaaagcgttagggtctgagtttgtcccagagaccaatttttcccaacccacccttgtgtacagatagctcatgcatttgaggaggctgcttcgacctttttgatcgcataattatattcaaagcctgaactcagcctgacgatatcctagattagattagatcaaatacatttgtcgttcccatgtacatcctgcgtcgaaggatcgtctttggtggccgtctctgtgattcgtacctaaacttgtggctgactacatgatgttagatgccgtgattttttgactggtagcatatgtactttcaaaaatgaccgagtgaggcgacgtttctcctgactgttgagttggcttgctaacctcgacctcagcttgtctcagtgtattgtctctcttcagctccttacattatattccttctcagtacctcttcttatgatgttttataaggtgggcatcccttgagtcgacccatgaagacaacctctccaggcgggcccaaaccgcctatgcctgttctttaggcttcttatctcgactggatgagcatctgcattgctcatcgtggcgacagcgatcatcgacaagagctgtaatatgtcttttcaagatgggttcttatggcaagtttattgatattatacaatcaaagtcaacgctaggctcttgatctgtccagtcggtcaatataggtgtgaccagaaagtacacaaattcctgagctagtgcttacctaatatcggatgatcttacgtcacccacaagtcgtgaaaagacctacattcgattcgtcgcctttggattaagactataccaagaacagcgaataaccatcagccactaacgatcctttgccatcccaacatggaccacatctctctgctcgaggacgggtcggatcacctgacatgtaagtttcatctgtgacatttgaaaagatgggaatgtatagtgaagaaaccctgacatttgaccttttcacattcagactttaacgtcgcgctcggtttcagtttcatctgctttgatgctattctatcacttacccttggcctgggtgtaggtactagtctggttgtctctgccatcagatgcgtacttcagttgtctgtgatgagtttagtgagtctcaatatgcatgcttgtcgtgatgaatttgtcgctcaaggactttgttcgtcatgtatctattattctagatcctcgacaaggtctttgcggccaacaacttttggggagttgttgggatttcgctcgtattaaacatcctaggtgcttttgaagcaggtatgtctcaatcctgttccttgtaggtttcctcttgttacttaccaatcaactatgctcacctctactaccaatcagtgtacaataaatcaaagcgtcgattcgcaaacatgtttcctctcatcttgctttcctttatcgtggccactattcctatttctcttgctggaagcgccgttatgagacggcatcctgtctggaagcctgagaagtacatccctgtgcttgggatgatccttggaaatgctgttagtgactatcagttgttctcgaatttcgaaatcatcgatcggatatgaagttgacgaatcaatctgttcctctttcgcttctgataggtcacggctatcggcgtaggggtacgtatatttgtcacaacagcttctgaacactttttgtagctaggctgatctgaagttgaacgacgacgaacaccctcttttaggtgtcttccatattggtcagtttgattccgtctctctcttgttggagattgtcaaactgagactgaagcgattgtgaacatatcctgactttgacataaacagaaagagtttactgagaacaaggacaagatagagacatacctgggcatgggagccacccggttcgaggcttgtaagcccatcgcgagggaagctctcaagcttgccttgttacctaccatcaaccagatgaggttcgttctccctactagtctatcattctttggcttgttttctaaggttctcttctaatgcttttttattttgaatttgtcgttagtgtcatcggattgatctctatcccaggcctgatgacaggagcgatcatcggtggttcttccgtcgaacaagccgcgaaattacaaagtacatctcgaaatttcgatactttgaactttgcctttaaaacttttagatcgactgatatactcttcgtttcctttaccaaaagtgatcttgatgtttatgatcagcgcttcttctgcactatccggttagtccttcttcctcctatcgatcgcctagtcccaatcagaactcctttgaattgactcctgatcctttgttttccatcttcaactctcgccaatagtgctggcagccatgatattcacattctcggtcgtattcgaccctcaacatcgaatcagagacgacaggatatattcgtccgagagcgtgctttctggtgggatcagaagtgttgggaagatcggcgtgttgggttggaaatcgatcaaaaatctaggaggaaaggagcgaaggccatgagagtaagaacggaaacagagcaaggggggacgtatcatccggtgtctcgcttcaaagaattctcttgtaatttttgctggcttgcgtgcgtgcttccttccttcctccacttgagcatatcaaaagtaaaatgatgagggggcaaatgaaatgataataaacgaatcaaagagggaagaaagcaaatcgaagagatagcgccggctcggtaactatgaagagaactagagtatatacaagaaagtaagaacgactagaaggccgaattataatctggactcaggcaagaaagaagacaaggaaggaacaaagaaggaggttggtccgtgatgtaaaaagtgggagctttatgcaaatataacgttttgtgatacagaaaataaggtcaaacaaggcaagaagacgagagttcacagtgatacaatgttatgggatcgtctctctacaaattagggtcccaaagagaagaggaaaagaattgagggaaatctgttgaggaaatacaaaaaactgatatgaagaggaaggatgattattaaaaataaaaaaataaagataaaaaagagtatcaaacaaagacaatacagaaagaggaatttagaaacaccttcagtcgaacaattctccggggtcaagatcctcgtcggaaaagcttggtttcggcagatgtgcccgtttcatcatcattgatcttttttttacgtatcacatccaagacagctcagcaattagtctaaccggccaggtgcagaaaagcagagataataagaacctacagctcatccatgagctcaaccttgccgaaacaaccttcaagcccgaatgattcatcgagcacaatcagatcgtcctcgtcctcttcgtccggctcggtcggctcagttccgccctcaagctctgcccaggatgaggaatgtgtggaagatgatgagaccgagagattgggtagatccaggtcgagatccatgacgtcactcttgtctatatccgaacatgcaccagacagattggtcgtctgctgaaaagaaaacaggtagtctgacggtgtgagtactgttgatgattctgtcgaagtcgagaagaacgaggcagttgagttggctgtaccaggcgcggtcggaacagtatctttttcgactcgcggcgaacgatcggatggaaagagcgttggtttgttggatctctcgagagacatcggttggagagtgaggaacgaattgaggaacatcgtctcttgggtcgctactcgttcgttcagtgtctggagcgaggcagtcgagagagaaagtagaggagtagaagacgatctgtgaaggaagaaatttggtctgattggatgtcctttcgtagaacttgacgagcacccgtcaaagtcatgatcagagtcgtggttgagttgaaagtcataatgttccgaacgacggctcaagttgttgttagcagtcgagagaggtggggatgacgaatgggtctgaagcgacttgcatatctgagtgagtagaacgaagacgaggacgaaggaagaaagaaggaaggaagaaagaaagcaaaggagattataacatgagttaaaggtctttgatgaagcaagagagaaagggagtcctactctgttggcagtggatccttcggacctcttcatgcattttcgccctttggcccaaacggcacctccagaactactggacagagattcattctcgttgttgtctgagatagaggttttgaaggatcgtttggtcagaagttttcttggtcgtgctccaaagtcgactctccttttgatggtggaagggtgatcttcgaggtgtgaatgaggagcagcgttagacattgttgcgtgagagaaagaagagacaccagcgtataaccgatacgtttgcctgcgttgtgtggctatgacgttgaacgatccaccttagatagtacgtcaaaaaggaaagaaaggatgatcgactgttttgtatgttggtgaacaaaagggaaagataccacagacgaaatctctcgaagagagataaacagacaaaaagcagccagcgcagtcaagaggtaggaagctggcagtcggttcgtccgaggttgtgccgatgtatgcttcaggatgtacacgagaatcagagatagaggaagagcaagggaaactatgtttctcgctcagtatgtgtgtgtgcgtgtgtgtgtccatgtgttatcaacccttcctttgctcaactatctagaagacacgtcaggtaaaagatcaccatgagggtgagtggtgtgaacagattcagccaccaaacccgtccatcatacaaggtctttcttgatgcctaccactttctttcaacccacattgctctttctcatacatcaaacttctccctctctgtccttgtgttctcatgatacatatcgtcgtgttcccagctcggctctccttgcgcttcttccgttctcgctcttatctgatctgtgactgttctagggggactaatgacggcgatctagtcacgtgctgatagctgtgcgaccgcaattcccaaagtgttttccccgccacacactctggaaagatttgggaatttctaaatcctttcggctcaacgctcgctctcacccataaaccctcctatagacatatccttccaatggctacccggtgagttcttcctgtgctttgagaccgctaggttatacacttacgctttttctcgccatctgatcgtcgacttacctcactcgcctagggttcctcctccgaaacgagtcaagctctctgggccaaacgtccccaagccagcgcctcctcccacacaggcgccctcggtggtcgtccagtttagatcctcagtcgatggatcagccctaggaccggctatcaacttgcctgcagatactgccagggatgggatggagatgcttgttaacaagttgaagggaggagaggacgtacgtctatgagcattttgctccttctctacaccctttgcctgattagctgatccacggtttcctctttgtgtttggatttttccacgaccatacaaacatgctcgtcaaacctcacttatgcttctctccattaggatgatcctacaccgttcgcgttctctctcttgattcctaacccagatccgaatgcacaatcgacggacccaatcaagattcctgtcccaaactctttgcaatcggacgttctcgcgcctacaccagcctcgctcgccctgctgaagacctcgatcggactcggcaatgactttgccctcccgacattcacatcggaagacatctttaccgttctgtgtgagccacaggcggtctggcgagtccgaccggtttcccgttgttcgtccaccctcaccggtcattcgtcccccattctctccggcgcgatctctcctagcggaaaccttgcggtgaccggcgcgggtgacgcgacggctaggatctgggacttgactacagaattgccaaagtgtactctcgtcggtcatcggggttgggtactatgtgtcgcttgggatccgctggagaggtttatcgccaccggtggacatgacggcctggtcagaatctgggatgtcaagaccggaaagccggtgggtgatgccatgtctggtcattcaaagtggattatgagtctcgcctgggagccttctcatctgtaggttccctccctcctcttcttcttccaaacttaatctcacgtctgtgtatcctggactcatccgtctctggcatcatctgcgcctttgcttctcttgtacttttgcctgtcactagcgcctcaacgacggcccctcggctagcgtcgtcctccaaggatggaaccgtccgagtttggtctctggcgacgagaagaactcagtacacacttggtggacataccgcttgtgtgaatgtcgtcaggtggggaggtgacggtcttctttacaccgccagtagtgaccgaagtgtccgagtctggaactctgctgatgtaggatcagtttcttgcgtctctcttcttattcagccaaagtcttgaatgaaagctgataagcgtttcggttctttgcacgtacaactcttgtagggaaagttggtaagaatcctctcagatcacgcccattgggtaactaccatggctctcagctcggatcatattcttcgaaccggaccttatgggcacgaaggcaaacgaccaaaggacgacgaagaagccaaagctgtcgctctgtcgagataccaggcccatgtagccaccatgccagagaccatcatcaccggctcggacgaccataccctcttcctctggcctgctcaacatgcttcagccgcggcagcgacgccaaagaagccattagccaggttgacgggtcatcagaaaccggtgtcccacgtcgccttctccccggacggtaggttcattgctagtgccggtttggacaatagcgttaaagtctgggacggtaagaccggaaggttcgctgccagtctcagaggtcacgttggtgctgtctacagactcgcttggagctcagattctagaatgattatcagtgccagtaaggataccactctcaaggttagtcatggggttatccgagattttcttctttccttcatcccgtttgcctatctaccttttttaccgacgtatccgatttctttctcttttcttcctacgacgcattccagatttgggacctcaagacacacaagatcaaaatcgatcttccgggccacacggacgaagtatactttgtcgattgggtagccgataaagtcatcagtggtggccgtgacaaatccgtcaagatgttcgtcatgtttctttcttctttacttctttctagcccttgagcgtttttcttccttttttcttttccccaaaatatatatactgatttgacatcttgctctcttgacacggtttgggacaaatgaaaacagatggaagcactagattatattcctgtttatttcttattctatcggttcaaccgatcattactagatgtactctgatgtaataccaccaaaagatgagaatgaaaagacatacgctgtcactctccctttattcttgcgctcactcgtcttgccgtccgaataaacccatagcagtcaatgaggtgtactcatagcaagatatccaagtcttaactcgatagaaaaactatcaatcaggaagtttgtgtggttagggttatgtatatgtatatcacgtgatgtagtctcagaaagctgtgaaaaactttgagagtcttgtcttctaccattcagcttcacacctaacctagcagctttataacaacgattcggtcttgaccatccctcctgtttctctgctctttcttcttctatctagctcagtaggagtaatctagaaatccagttcttgcactcttacaggaaacaaaacctcatcccgatagtcgactcttcagaaaagaaaacaatgtccgccaacgtaggttccttccaacgactggcagacattctcgatagaaagccagaggtattggctcttccgcaaggggatcatgagattgctcaaatctccgaagtcgccctcagagatatcttccaactaggtgagtctttccatcttgcatctcgctctcggtcaggaaggtcttcttgcctctctggttgaaaggaacgcggttcgttcattaggggaatgtttccccaaaaacaaggaagaaaggaagcagtgaaacacattccgtcttctataggaaactatcacactgactctttgttcttcttctgcttcaacctaaaagctttgaaatctgaattaacccatctggagcctatccacaaattcctcgcctcacttaatgaatcctccgcccccgtggagcctgtcccacccacaccactcgatggactctataccgaagggatggaccccgatcaaatttgggagcagcttgaactcagaaacgtcaagctggtggaactcttggaggatgttggcgcagttcagtcaggtagggagcctggggagagtgatgatgagggtagtctgagtcttgaggaaaagatcgagcggggcatcattgatgaggacgatgaggatgatgagcttggttttgatgaaatagatgatatggaagacagtggagatagcgaggaaggaagtgacgatgatgaggaggatgaggatagtgaggaagtagaggaagacggcgaggaacaaggagaggaggatatgttcgacgaagaagatatggaagggcttgaggacgacgacgaagaggaagaagaggatgaggatgacgatactcacaagcggatccaagacctcgatgaacctggatatgctcgagcttctcgaaagaggtaagagtctcgttctctagcacccatttctgtcttagcctccttggtctgtccgttataagccgtggctcaaagtattgacaattcttctgattatcttctttccgttcccaatttaggcaacatccttctctcgacgatgagttcttcagcattgatgacttcaaccgagaaacagaggagcttgaagcatttgaagtctcggcgggaaagctcggcggagatgatgatgatgatgaagacgaggaggatgatgatgacgatctgatgggtttgagcggaggaaagtccggaaaagccgatctttggggaacgatagaggctgacgaagagaacggaacggatggtaagagctttgtcctttgttcctgccccttgtgtcaatactgaacgtaagcgaacgaaatcatgcgatatcgtggctttgtttgccgtttgtagaggtcctctattccgatttcttcggccctcctcccaagatatactctaaaaagccaacatcggcccccaaaaagccgtcattgctaaagggaaagggcaaggcatcctctttcgatgatatggatgatgaagatatgatgatggaagatcaggatcaggaagacgaagatggtgatatggacgaagacaacgaggaaaactttgaagaggaggacgagggagagttctctgaagaagaagaagacgatgatgacgcaagagatgttaccactcgagcgaagggtgatctgtttgccgatgattctgaagatgaggaagacgatggtacgtttcgagtcacctttcgtttttccattgtcctcttgaatctgaaatctaatttggactctcgtcacgtctacaatgaagcccccatgtccacccatgccaaacgacttgctgcactatcgcagcagatcgctgctctcgaatctgagaatgctgcccccaaaccttgggctttggctggtgaggccagttctaagtcgagaccgatcaatgccatcctggaggaagatctggactttgagactgtcggcaagcaggtccctatcgtcacggaggagaaggttaaaggtcttgaggacaagattaagcaaaggattttagacgtaagcatctgccccttaacctgtcttcctcttcacgtcggttcttcgctaattttctgtttcttttctttaaaaataacaacgtacaaaaagaatgacttcaatgacgtgacccgtctcagagcaatggattccaagccgttcttgccctcgcgcgtgtttgagctcaatgacgaaaagtccgccaagtccctcgctcagatatacgaagatgactacacggcttcgaacgaaaaggctgcaggtcgaacacctgtgatgaatgagaaagactcaaaacttcagcagcagcataacgagattgagactttgtgggaggagatttgctataagcttgatgctctcagcaacgccaactttactcctaaacaggttcgttctttcctctcctctgtccggctgtgctgttctctgctgacttgggctttacgtctggatatcatctctactgtatagcccaaagcgcaaatcaagactatttccaacgttgcttctctttctctcgaatctgctctgccaccaacacaacgtgcttctcatctgcttgcacccgaagaggttttccaacctccttcagcttccgacctacgtgcaaagtccgaaatgactccggcagagaaacaagctgcccgagaaaaggacaagaagcggaagcgaaagcagagagaaatgcttgttggaaaggcagattctttcgagaaattcaagcatgctggaaagagaattggaggaaagggcggggataagaaatcaaaggacgaggctctcagaacgctggttaaggaaggcagaggagtgcgtatcgtttccacgtcaaaccataatctctgtctcacatctcatatactgatgaacacgccgctcaaacggctacttccctttcttcttaatgcttctagattaccgttattggcaaggatgccaagaagtttgacaagaagggtcgtcgagaaggtcaacctggaggggagaacgcaaggcaagatggctcgttcctcaaattatgatagattccatgcatttagatctttatgagcaggcacaatcaatttccgaaagaaacttatacgttcatcttgaacatcctgaagcccttcaaacattttggtataggagtggaaagcagttctctaggtcgtatacctcgagaatgtagagagtcaacatgcatatagttacgagagcagaatgatgataagaatagcaagcggtagcaagagcacgtaaagaaggtcatgatgcgaagcaagtcgtgatgaggaagataaatagaagaggccaaacagatgaagcagagagagcggacgatgtatcccccaaagcatctgagaaaggaacgagtcgatcattcaagggaatgcatcaacctatctagcttggtgtccatcgaggtgagagatgaagtctgagaaggtgtgaaagacggcgcatctgacacccgagccgccaaaaattgacggttgatcgaagtcgatcgtttaggaatgctaaggggagcgtgcggcgcaacggaaaggaaaatgggagtggtcggcgaaactactggagatggagtgaactgaagaactccttgatcatgttctgacggttgacgcattcgaagattgttctgtaagcgaaactagaacatgtattgtgatgtcgagcaagggtttacttacctctggcaatttcatcaataagttctgccatttgtcgagaactagaatagaagatctgtaacacacatgatatcgatcagcacttcaaaacttgtaggtgttcatacgtatgtatttgatgataattccgaaccttagtttccggacgcggtgcacgggatttgtgagtacttcgccgcggatcgatcgacgagtctcgatccttgaaagtaaactgtacaggttcgtcaatgctcatacgagatgggtcagaggctgagatctcagaatgcatatcccaatcgatgtcgtcgatatcctgtacatcgcggaggttttgaagtacgttgtacaaactgttgttatcgacaaggaaaagtaatctatgaatatactgatcacaacaatcaaagcaagacaagaaagactacttacacatctccatttgacatctcaagtacttcgatcgcatccgaaggagctgtcaaacttgactgtcgtttgtcatgatgatccgatctgacatctccttcaccatcgtagagatcatacctgcatatacgtaatttgacaatttgagttggcgcgttcaacaaacacatgttcgtacaggttgatagtaatcaagtttgactaagaatacgcacaaggaatcatctgtagatgacaaacttttctggagaggaggtcgagagtccgaggatcgattcgtctgtgagttcatagagggacttcgtccatgcccttgcgaactcgagaaagacttgcgttcattatcaagattatacacattaagctgcgatttggccggacttctatgaagaagagaagagccactgtgctgagaccgatgaatatctttatcgctggatcgattcaatccccaagaagaacgagtatcatccggcatgatgatggtccgccgaaggacggagttagaccgaccgactccgctttgttgagaactcagcgtgcgaagatgggtcgtcgaagagagatttgaggtctccatgggatcctcgactactgtctcgatcatcgttgggcttcttcgggtggaaggtactcgactgattgaagagagaccctctttatgatcatccgatctgttactgtagtgagactttctagagctcatctgagaatttgacctctggagcatctgagatacatccgcagaatcgatctccaatttctgagcggcatcaaagagaatctccatagctcgcgcagattcatcatctgaagtctttttgttgttatttttgttgatatcgtttgaccggttagatgaaaaagatgactctctattcaattcggttgatggtccagagacatgaccatagagcacttccttcgggtgaagcggtgcatgttgagaaagagaagcagatggaccttcaggaggtatagacggtgtctgagggacgatgggagaagagaaggggttatcgataggagttggaattgatggacttgatggacttgatcggggctctgaagattttcgaggtcggagaagatttcgcaagctcttctttggttttggtgctttttctgctgaaagatgaggctgagggagggctgtgctatacatcaatggagggaagaagagagtatgtggattgtcgggcgaagttgggttgttcagcaacggagaagatggtagagggggaacagcaggaggtgaggtgggcaaagaatcttgtccccatggatatccgggctgtcgtgggctagagtccatagacttgaggtcctcgccagactttttcctcctgatcttggaaccaaaccttattccgaggccactcccatttttgaaggttcctgggctcggaagaaccggagagtccgctggagaaggaggtatagagggcgtcggagaggcgctaactataggctttgagatgacattggcagtcgtagatacaaactgtgggctggatatcggaagtttgccctttcctttcaaagatttgcttcgtgccggcttgtttgatgttgagttgtcttcaattatcaacattcagcatacacgagacaagatcagctttgggtactcaaagagaaagtgaatagaagggaagatcgattctacttactcttgagcgagtgtgtagcagcttcaactttagctctaaaattatctgcaaaaccaggctcatgcatgttcacgaaacaatcgggttgaggcgataaacccgaaccggagggaccaaaagaatgatcctgctcgataggggtaatctgggaagtagcttcctcggaaacagtaccttttcccggcttaacaagatccgactgagcatggtatttagcgatgatttcctccgaagcactaggaatagagggttcgagcgatgatgcctggtcaataaatgaagccgggagaggcggagtcgcatgcagcttgtctggttgttcggtcacacgatgtgtggttgaatcggttttggaaagcgagcgaactgattcatgagcgctctgttcgttgtgaccaagtaagccaacctccttttcgctcttctctgtttcagataccttaagaacggcttgttgatataacggaacgattggttgcattagtctttgatgaataatctggatatcttccttcgtgagaggtgatagcgtctccattaaagcggtttgatcgatctcgttctgagaaacgagtggctgtagatcctcaagggctaatgaccgccgattgatattccgaaggccctccttttccatcattgcttcctccaatacatccccaagatcatccgatcccttcgatgttggatgctggtagcttgatcgattcgaaggaaggctgagctcgtggataggttcagaaggggaatcaagtgcaaggagctgatgttccgatgcatggtgttgctcgggggcgtccgaggtgggatagttccagccgacctgaaaaggagctctggagtaccgtgactcgacaatcccgtcttctgcaggcaggatcgccgaaaatcgttcatgtccatgaaatgctgtggcggaagagacagatcgatcgttggtgtgtgatactcctcgaggagcattctttgagtttctagaagagacgactgtagcaggttccaagaacaaggatctgcctggaccaccaaactgaaaatcagagggttgtctactactcgaagaagtagaaagagtgggctcgtgtagaccgctgatcgagctagctcggctatttacgctcatgttgttattctgtcgcctaggagcatccatgaacctgtcggtgtcatcatcttcatcatctgataatagatgttcagctgtgttcccgctgagatgcttgattgatgatttgggaaaagatggcggtaccaggtaggtgctgtcctcataggacgaggcataagatctagctgaatgaaagagctcattctctcgatccacgggtttatgttcagagtctaaaaattgatctgattcggacgaacgcagagtgttgaactcgtcgaggtcttctgtcaatgaaggtatgatgaaggaggaggagagctgagatggggtaagggaagattttcgtacatgcccaaaagtggacgggtatggctgagcgccaggtaagggagaggagtctcgagaaagattgttggtctcctgagatgaattaaaggaggtaccgaatcttgaggaggctgtcgaaggcgacctactacccactggtcgaggcatcccaggactgttgaaatgtacactttagtacagcatcctctcacaaacacgccagcaatatttgatgagacgacaagaggaataatgatagaacgtacatgtacccctgcacccgatctgcagtcacttgagatgctgatcttttgtgtttccgttcgtccctcttaggcaagccggactcttcattatgtatgttctcatttgaaggagatagcatcctgactgacggctgagatccaggtttgatattgctgaaggttgacataacgacaggctcttcttcatgtctagaagcctgaaagctattgctctcatcaattcgagcaagagtatttgatattcggttgagctggtcgtgggacaactggtcgagaagtgactttcgtttccaagagcgggacacgagcggtggtgaggaaacaggcggagagaagtcttcgaaccgggaactaatttccgaggtaagactggacaacgaagcagagttaacgatgccagcactgctgtaagatgggccagaagtcggttcgagaggagaagtactcgtcaaatcgaaatcagatggtcgtcttgagtgagttgaccttccggcagtatccccgctgtcttgcgaggccagactcctactactttcgctcttcctggctcgtcggatcttttcatgatcaccattgtggcctccgaagaagctcgagctgggatgatcagcttcgctgagcctagatcgaagaggatggccagagtgcgggttataattgaaggatgatggcggagtaggcttaggacgtttccgtaacctagcttctcgaagctgacgaagctcttctagcacgatttcttcctcctcgacagttaagctatcttttgcttcaccctcccgaagtcgatccagttgcttcttgagagcgtcgggtgactcagtacgagccaagaagctgaactgtctgcttagactgataaaaacggggaacaaggtgatgacggcggtgaccaatgaaatcagccgtacaaaacgcgtcagggaagaatgacattgagacttactctggaaggatgactgaactcctgaaatcttctccgggggaggctatcgaaatgttattgagtgaaggggcagagactagctttgattggagaccgctgtcttctgaatcatgagtcggcgacttgggagaattctttgaattctttgagccgaacgtagctttcaacctgaacgaatcataagaaagtctatcaggtttcttatacatgaagcagcagacatgttagatgtgatttgaatgaatcaactgacttcagccggttcctcatcttcacttcaaaacgtcagagacagccaagcttgattggttaacgcccagattgatgggacgagattgatactttgaaagaagaaatatgaacagaaaccacagacacacccaacgccttgcaagatagtcactctgctctttaagaacggacgatggtgttgttcagacagatatattgtctgtcgttgaagttactgttgtcgacactatctgatgaagagggcggtggctgaaagagggagcaaagttggaaagggtggccggtgaaagtaaattcgcttaaatgttcttatatttactgcatactcaatcgctccattcttcggaaccgtgcattctaatcctccagacgctcaaaagagaataaatgctagataacatgtatacatatatattaattgaccatctagaagggtgacagacccttttagggcgcactaaacaaataaggccatgacggctaacaccggacggtgatcggagtaaccctggagctgctgcatctcctcatcgttctatgtgtacatatagggaaatggcagttaggatcaattgcattgtaggtttcgatatagagaggaaaagtctcagacgtaccagtgttccatagtgaagaggaagaacctcgaatcgacgtctgtggacaacattcctttccggtctcgcttgagcggctgcgggctcggacgtctggttcgtgttatgatgggaagaaggaaatagtcgggtgaaccaagaggttttttcttgacttggcttggtcgggtgaaggtgcccagctgatataaaccgtgacatgtgcggaggagaagatgttccgaagccagaatgtgtcaaacttgctgagctctgtaaggaagcccgaggaggggttgtcgtcagattattcggatcacttgaacttggatgcaagctcatgggctgaggttcatatgtgaatgaagagggtgggtgaaccgatggatgagatcgcgttcgtgggccatgggctgatcttgggtgacctttcatagtgtatccttcgccagggagcaagattggtgaggaaggatcgtgagagtcaatggatccggctttgagcgatgagccgcttcccccgctaacatgagaacttcgaggttttgaggagactgaaccaggtccgagaggttccccaaaatcgaacaacgaatccgaaggactgtttagcatagacgtccgtggagactcgcttgtgctatgaatgctgtttcgttcatttgagtgtgtagagtagaaagaggccgtctgtcgtatatcgactcgctttcgtaagtgtagcgcggtagcaaacttctcgagtttagaagaagaaggcaagccatcctcgtgctctttccatggactcggaggaggatctggatattcttcttcaaacgatttccagagtaatcgatcgcaccaactcgggacctttcatagacagaaagaacgacatgagctgctatttgacccatcatctgtgaatttcggataaagaaaggggagagagggtagatatgaaaacatactctgcgcttagtagacgtgtcataaatgccctggctttgaatgctgtgttttcctagagatgatccaccctcatcttcgtcctcatcttcactgtcatctgaattcaatgttcgattgtcatttctcacactgagcgaccgacggattcgagatgacaggttccgagtcagtgccggtctcggcggagatgcactatcaatcgacgagcgattggtaaatggcgggtttggagggatcgagaccggatcaactggaggtgtagatggattagtggttgagggtgaagactcggtagattttccagaagccgaccgagcagatactgaaactattctttgaattgaaccggatgctggagaatttgtaggcgacttgatgaatttcataagctttcgcttggcctttatagccgaactaggcaggaagatcttttgggcgtctttgagtttctcagtgaacgcgtgggtgtgttgtgctaaggtaggctcgacatcggacatgtcgctcagttcttcatctgttacacccgacgggtttccagaagctataaacaattttgttaaattcaactgaactcggctataaaagaaacaagaggagaaacgtgagatcctcaacaggaccaaccgggagagtacttactccaattagatgacacaatagaactccgttcagcgcattcatcgttctcagtttcgtcctcgttttcaggaacattctcaacaccagacacattcctgtgccggcgaattgtcccgcgtttctttattggcttgttgtaattggcgaggtcatatttataccttttcgaagaattaacgggtttgatcagaatcatcacaagaccaaagaactgataaaaagattgaaaggccagacgtgtgtactaacgttggagggaaatgtatttcggcttccttgaacccgacaaagcctcgcgcttcactcattatcctccgtagctgatcaaactgtaacgcctgatcgtactctagattgcccacaacaaaatcgaagttcagtattatgaaaaaggaaacaaatatgttaacgggtcgtctacgtaccttttcgggatacaagccagtctgcatgtaatctggaaacgtcgagtcgaaagttgaggtctgacaatatccaaagccaaggatacatatcgttctttatagtcagagagatgaagcgaatgaatatttggggtatgtactcacctcccatccagaacgtgcaatcatatctgtcggtcggatctacattcacagtcaaaccatcgagggcgttagctctgtcaaagcttactcagtatcaagggagtgaatgtctctaccttccagtagcagtcttttgtcaccctgatccaaaaaagcatcaatgttgagctccgccttgatctttgctgcgttgagtagccgaacatctgcccgagaagcatgtgcagcctgaaacgcgcataagaagagcagtcagtaagcaaatatcactatcgttcgtataaaagatgtatcactaaccaaatgagagttgacgaagaggagtctagtcgaagccatgtgaacagatatcgcaacacctcctttattctaaaaaccatgaagaattggatatgagatcagtcaaatctgatctgtatctctcactttccattatgctgttggtccagaactcactccaaatcgaccctagaacgacggttatattttacaagtcagctttctgctcttcctcctcttcgtatacatgagttcagagcgcgaggattgtactgactccgatcagacccgtggtaacataactcgttgatgtatctaggatgttgataatgagtaccagaacagacaatagaacctcttgatagattcgtattactcactcttcaccagatgtttgcaacctttccaaacatatacggctattgttgagagatcacgaaacacagaacgacagacacaattggttgtgtaaacagatgcgcaagtacaatgatcgcatggccgagcgcatatgagatggactgacacatatagatccctagaagtctttctttgactaaaaattgataagcgcctctaccttcctccacaacccgaacatggtccatcatatctggcgccattgatggcaatttttccgatgtattctgttgacttggctgcggttgttgctgtcccaactggtgcaattgttctttgatgccgaagctagacacctcatcgtccaatggttcgtccgagtgggtcacttgggatgttgatgtgctggacgaatatgtctgattatttaacgtagcaagcgatgcagacggaggtaaatcgggttggacgatctgatcggatgagggagggctttcgcccgctcgattagcaaaccagtcctctagaagatcactccatcctttggcctcgtgacgcatgtgaagcgtattggatttgtccttctccttctctttgagtttcgatttctctttctcggcctgcttcgagcgttctatagtgataacatctctggtcgttctgtctttctccttcttttctgatccatcctcctcattctcgttcacgtctatctcgatgctccggagaggtgagcgagctgctggtacgtcgtgttttgcatgattcccttttggtgggttaggtacggacaggtagtcttggtgctgtagcgttgaaggggttgtaggtgaagtgatctgtcggagagacacagaagagggagagattgacctggggatttgtaaactgagattagggggctggagtcttgctgatgttgcagagggattaggagatccattggtaatcgcaggtgtggatggtgcagaagaaggggtgatgaccatatgagcggaggaaggagatatagaagatggtagaggagtatcagaggagatagatccagtcgatgattggggggtagctaggacaggcttcggaatgtctaatacgggtgtagatatcggtccactagacgatgagggagaatgagctgacatgttgggctcgactggagtcaaggatgatttggaggcctgttttgctgcagcagataaaccgcctccccacttcacacctgccgctagacccattgggatcccactcggcgtagggcattcctgtccggcaatgacaattagatggtatggactgtgcacaaaagttgttggtttgagattctttggtgagaagaggtatccaaatgcaagaaaacctggttgtacgtactgctcatcgttcaacggaagcttcggtagctttccatctgcggtatcttctgagcctatatgggaataaggcggaacgcgaccaagtaatggagccaggtcgccctgtatatgatatgtgatgtagtccaaccatcagatgaagcctttcatggtggcttgaaccgaacaaaagaacagaccttgggtattgaatcgtgcatgttccaggtcaagaatctaatcttcaaaaagtctcttccacctgcttgaatctcctgttcttccaaaatatcctctcctgtctcgggcaccttgtcgttcgacagagtcgcggactttgaggtatgcgtagttgcattctttgacgaaacagcagtgtccgagttagatcgaggtaaagaatgctccatgctgaggtgatgacgatggaggagatcatgaagcttcgacatcataggctgatgggtctctgtagcttgttcatgatgaggactgactggcgaagtagaccctgctctccgagccagcaaacgaacaaacgatcaacaatcaaaccaagcgttgatgaagaagtggataagcatcagctagctcgtggtctgatgtctccttacctgacatttctgagcctaactccgaaagcagccttgactcggacatgacgagatgagggagaacgttgggatggctgcaactcagagaacggtgtatgcgctttggagagaaacgcgtgtgcgtagttgccgcccacttagttcatctaacctttcggtcgatcctaccgcatacatctgttgacctcctcaagctttctatgtcgctcaagtctgtatgctctgataggtattctctcatcaagtacttcaacatgggaataggaaactataacatgcaatgatcattttaattgtacaacaaatgagcaagttagaatctccagtatgctcttcttttccagagacgcccctctataaacttctatttactcgatgtaggctccgagttaggtgacagcagagggttctcttccctagcttgagttagaagaggcatgagatctttgtccttaaccgctttctgtaagttcaaagatgatcaagagtgcatccgaaggaaagagagtttgtcaaccaaacaagaactacggattcacccccgaaaggtttctctgactcacccaaacgcaatctttatagaccctccaactctctccacaaagtttctcgtattcctcggctttagcctttgctctcactgccggatcaacggttgatttagtaccaggaagtgtcgtttctcccgtgagaggctcaaggtatccttcaacccatttgataaaacacgcgtcgtatgtatgtttataagggttgcatgccgggttaacttttatgccgaaaggaagaaggaagttggggaagagaaaggagtatatgattagcaaagctttgagtggtctcaacccccagagcgctcttctaagagaagacagaaaggatggcatgatctgtactaactggaactgaaagacaagggaataagctcttaacaaacagtccatgaagatcggggaggggaacaatctaagaaagactggacgtactccatcttaaatgactattgatgatgtctagacgatcacagaagagaagcgttccgaaaagaagaactgatgagaaacctctggatactttggtcggtctacggagaactgattgggggataggctgatgggtatatgaaactgagatagctggtgattaagatgactgtctgcgtgttgactgtgtgaggcaagtgtgtgcgtgtgtggtaaagagacggatggaacaaattgagagaaggtaaaaacaaactatcagtccagcaagggccacgtggatcgactgccgccgagaagatgacggacatgcagattcaaccatagcttcaacctccaccacaccgaaacaacaggtcagaagctatgaagacatggatatatcagaagatcaaattagcgagggtatataagaagtgaagaatggaactctatgcaaagccttaagagatgtattggtcaaccgatagagtgattggagtgcagtaaaaatatatagaacagactgtgaatggcgtatcagcaaaagacatggtaccaatgactagatcgaataggcggtaggagaaagcatatgcatatgtggagaaagagaatgaagatagaggcagctgggcagggttcttgctcaaggatcacatggaactcgagtgagtcgaaagaacgacggaataattgagcaaggagttcgaagggtgcgaaaggagacgaaatctcaacgggacgtcctaaattacgaaagtgggtgagaaaccgaatgaaacctacagttcattctgcagataaagcgtactgagagcggtaccggaaattgcagaagaaagagaagaacgcgctcgttgtttttttcattttttttttaatttgaaggaagggattagtttatgagacgtggttggggtctaacagatgaagcacttgatgccgaagaatgcgatcagccgacaatgggtgtcacagcccgttttgtagtcaaaccagcaacgctcgttgcgccattcgaccgagctctacttcctggtcgagcggatccaggatgaagctccggcgaccgaagtctcgagccaaacttatcctgagcggaggatgacgaacgacgagtctgagcagaagagctccttgctctggatgcgaccgttgactgagatgaagccaatgtccgtcgactggcggaagaatttggtcgaggtcctggaccaggagtcggctcgacggtgtcaccgccacttttgtttcaagagtacaaccagcgcgtagaaaatacgaacgaaggaggaaacaatgttgagaaggcgttaggaccatgctcaaacaacaccagtaaacggagaaaacttaccgataagtgaatgacatctgactcttcgtatccgacgaatcgtcactttcctcgcctctatccccctcgatctttaaatcgcgattgttttcattgtgtgctttaagagcgcttcctgttagaggccgggtagtcaaagatcgacccttaacaaggctgatatactcgaagaaagatcgacctcgatgtcagtcgcatcacatgataagagccgagaagattcactgacgttccagtggaggtcggcctatgcttggatggtatagcagtagacgttgtccaaccctccaactttataaacttttaaattcaacatggaacaccagacagaaaggatgacgacggcatttaggtgaatagaatggtcggatatcagcgtgaagcgtagcacatgcttgttatcgatataaagtaggagcagagcgcttactcgataaatatttcgaggtctgatctgatggggtcttcttccagtagctgtcactctgttgggcgcattcagttccgggagggaaggagaccgagaagtggccgaggccagaggtaaggaggttgttcccgtcctttggcacaacaagctgacatcgttgaatcggctgcgatagagatgacagtgtgtatgcaagatttatcagaaagaaatctggtgagtccaagtaagacgacgagacataaggacgaaaggacgtacacgatccatagatcatttggcgtcccagaaccagacccgtgactgggtctcagcatttcgcctatccttcgaatgttcgttttgtccttatccttgccctttgtctgagcaggagtcgatcgacgggagatagcggcggtagtagtagcattggtggttgtagtggttgtagaaatcttagagccatctgggccgcaggggtattcttcaaggatcagtcggctaggattaggaatcatgagcatctgttcgacgatggatacgacgataatgacaagcaaaccacagaacaagggaagtcagaactatcaaggttctacgtgatgaatataccctctcacaaacactcaccttctctcgctccaacccttcaattcgagcgaacacatccctcgtcttaactcgttcttcgactgccgtcttcttatcctcgatcgaccgaatgatcaattcaacctgatcgaccatagacagtgttgcttcgtattcctttgttgaagggtcggtgttctatttgttattttcgtagagttgtcgtaagaaaaaggttgaacaaatacattgagattgatcctctcgacgtcaacaagaggatcacaagcaagggagaaagtcttacgtagagaaggttctggaggagtagaggatattttacgagtctgtttccaggaatgaatattcagatagcgagatcagacatcagcgcgtgtacattcacgaccggtgctgagtttcaataaaaggctcaagtacctttgaaaaggtttcgagagggagatcgccaggccactttgtcctcgatcagctgcgagttcgtccagttcctgttacacgcgcatagatgtatggtcagtgatataagacgaagcatgttaggacatgatcgaccgaggtcttgacttgtctgactgcttgtaacgaaagatattcgaagaaaccctacctgaaagatccctttcaggcgctcaagctcctcgtcttccgccgactttttatccttcttcttctttccgtcactcgaagaggacgacattaaggcctggtcgatagttctaagggcgtcagaaaggtgaagaacatatgtggtgtatgctttgagaacgtatgactttttgtatttccgattatcgacacagattagagaagaacagagtatcagcctggctgaactccagctcaatctgaaacaagcagagggcagaaatagaggccttacatgctgagtgaatacatctgccaatgatcttactagaggaaattgctcctcgtgtcttcttttcaatgctctacacaacgcccgatgacctggcaagatgccgtccctcaggacttcaagaatgatcttgagatcttcgggaagaccaaaaatgtctgtgttcgagaattcattcacagatttaggggcaggcgtggttgttatggggtatggctgagcgtgaaggtggacgtgagacaacacacgctgaagttttcggccggtcgtttgagagattgaagaggaggatagagacgagaccggtcggtcgactgaagaccgtttcacaggcggaagggagtgcctcactcgagcaggggccgatgtcggagggctcctgtctttatttctgatagaagaagggcgcgcagatggatcagaactcgcgccatcagagagattgcctgccgttctaccagttgagattccggatgatccttcttgatcttttccagtcagagacatcagaggtagtccgactggttgagttgtaaactttgcagcgataggcagacgatcaaccgaagtaagggaacgaggctcttctggtaagggtagtggtacggtgggaggtgagctagatgacactggcgaagatggaagaagcgcgttgatgaatgtggacagcagattctccaagtcagtcacgtatctagcccggcgattttccccaagaaagacaagatgaacgagttagcaatcccacactatcagcatgcaacaaaaatggaggtcaagtattttgggttcgagcgtacctatcttcggatctgacaatctcccagaggacctcctgtctcgttcgttccctaggtccaagattcatcaacagatcctcatccgcccactgactccagttttccggcgcgctcacaaaactcctctctgcgtctgtcgtctcgttatgttcttctatcttgtgaaaactgccactcattctagaggagcgccctgcgatagactgagcatgcaatcgactgtccgttgacatgatgctttttggtctcggcttcaggtatcctgcactggccgtaggcgtgataactgaggatgatcttatccgagatgagctagttgcaggagcaggaacggtggctgggctagcgcggaaagaggagttgggtcgatcggaggtaggagttggatccgagcctgaagcgatggaagcatttgtgactttagttttacttgtacttggagccacagatacatggggagaattagcggccggttctttgttggtttgagagaaactggttgaaggcgtagatgatgaaggggaagagggtctatgatgtgtttcttgatcgagagctagttcgagagtaggctgcacaggagtgtatgttgtctctgactttgccgtcttcgtttcggtgggattgggtgctattgaaaaggaagaaacagacagtggagtgaatgtggttggtaattccaaagccggagctaaactagtaagaggcggagcgagtgccgtagagacgatcttcttctctctctctggacaatccgatggcttggcttgagcgcagcgtattgaaactggaacaggaggaggaggtcctatcctaactgtgctaggagcttttcctcttcctattggtttcactggcgacggcgagacagcatacgatggcgagaccgaacggagtggaacgacagcagtgacctgggatacatggaacgtctgttccgactcaaaggacgtcgaaacagtcggaattgggcctaaggatggtggatcggatggaagagtttgtgttttattctccttgttttgctcatatctctctgatgccttcaacttgggtatgactgccggactgtgtgagtcggctggaatagacgggtggtgatcgttgttgggaactgttccattactcagccgagcgaggaaagctcgcatcaggggctgtcggagcaagagagatctatctgcaggcaagaaaagagcagcgttctaagcaacaaaacagacaaacaaacccccaagagcgatgtgaacgagtagtccgaagggacagtgaagtagagcagacgatcaaaccggtagaaggtgaaaggctgcttgtacctctgttgtttacgcacaagatattttgattatgtaatcgtcataactacctaccgcctagggttccattccaccgaaacatccatctactagacgccttccttcgtttgccatccactttccatcgaccaagcatcgtgttgtacaagccaacatacagagacatttacattcacgcccacgctcacgttcacctgcaccacatcaactgatacataccctgcattcactcgactctcagatgggtgttacattctcttcgttgttctcgagcctaacatccctatcgttatggggcaaagacaaggaggtacgctcaacatgtctatccttgttaaacttgtatcatcttgttctttaccttggtggctctcgtcatctggagagtttcatatgactgttccaaatacaaacctgagccgacgtggtcttaacgccgtgttcaattttcttcacaggttcggattcttatggttggactagactctgcagggaagacaacgatcctctatcggttacaggtcagttcttaccatggttctgccgggcattgcatcaagcctggttgtgtctttccttcttgtccgtattgtccccatggtgtatacaaattgggacgagcgtgagcgagtctggatgcactgtatatcaagtcgttttccctaacggacaaagcatattcgacgcacagacacctatcggacgtcccttgcatctggtgattaatcaatagagtaactaacatgaagtgttttgcctccgtccgtataccgataaaccagatcggagaggttgtttcaactattccgagtgagttcaggtcattcgttctttgagcttcgcagatatcatccgatttcacttaactctttcccggggtttcttaatagcaattggatttaatgttgaaagtgtacagtataagaacatcaagttccaggtatgggatctcggaggtaagctcccttcgttgaacggattgcatcagaaacatatgcttttctcatcttggaatacaagatagatctgacgctgctgaaacatatctcatcaatctcatcacaggtcaatctagcataaggttagtcgtaatcaacgtctacatctgaactagaagcacgccgtatggcgtcgcgaatcgaactaaagcatgatgctgacctgatttcgctcccgtgtaaaacaaatagaccgtattggcgctgttactatgcaaacactcaagtgagtttcgttacatagcctttcgaacggagaccacgcgttcttacggaccatcctcttctcaggctatcatctatgtgatagatgcttcggatgccgcccgacttcccacctcacggactgagctcttaacgatgctaagtgaggaagagctcaagggcgtaccagtacttgtgtttgccaataaacaagtccgtttatttattcaaatctccttccgagttctttatcgcgttggtcggccttgcgacaagtctaaacgcgttctgttcttcatttttacattgttcgatatataggatgtttctggtgctctctcctcgggtgaaatttcagataagcttggactggcaggaggagaaaagtcgagggaatggagtgtaagaggcagttgcgccacaaagggtgaaggcttagaagaggtcggccccatctcttgcttctcgtcttctatcttgcaacgttcagacattgttgtttcaatagtgctgacgaacctgaaaattgatacagggcttggactggctggtcaacatcatacaaggaaaatagacagtcccatcctcaatggacaggatgtctgtctgctgcgcgttgtaaattctttcatgaactttctcatcattgtatctatcgttcacctctttgccgaaactaaccaaaggggagaagggtatgacacacagagtaaaaagatgtctcacatgccctctttctgattcatcttggctgcaacactcaatgcttttgcaccattcacatttccatctcccgtctttgcctgattttgtaacaaagaggctagcacctacctaaatgatattgaacgaacgcaaaatgggagagatatctttgtacgacccttatcgagcacgtgccctcactcacgatcgaatttggtccttccttgcttgttcccgagccaaaaatccagcaattctagatccttctctctggccgctgataacagccccagctacacttcctcgatgattcagatctgtgtgttcgcccgcaaaaccgagttgacctccccatatcggttttccaagctcgttcaaatccaatggagtctgaccggtgttatagggggtaggagtggatgttgctccgaacgagaacttgtcggtcgtccaggtggtatgaaccgatcctacaggcaagggaacaggtccagatccatcatgaggaattcgagtggacaagatcgaatgaacggcatccttgatctcggactgggaaaatgattcaaacgcagaagagataggcgctgggatgtacatcaccaagccggcttgagtagggcccgcttgttcagatgaagctgaagacggagcaccagtcgggggaagggtgttgatgacaagtgtgacagtgtccaacagttctttcgctgtcgttgggttgacggtcgaggagtccgaggtggacgtaggcaagagaataaagctcccgatctcttccgaatcttggatccaccaagaggtcggatacctgatatacactttgtcaagcatcccgacctttgtccggttgatagaagcagatagtcgaacgctcaagggggggttgaaaaacttggataggtcgagagattgaaggatgcctagaggaagggtggacagacatgtagaagcggtgtatgttgctgcgttcttgatctcggatgaactaccagtgatgctaggagtggtggtgacggtgataccggaaggcgtgtcgagcctgatagagtccacagtctcactcaaacgaatcaacccacctagccggacgaggtcgtctcgcaaggcgttcgtcacagattcataacctcctttaggtgcggctgtgaacggaagagcaagaaccatcaaggaggttgtttaagaacgagaacctgaagcaggaagtagacgcagatgagtgtatacataccatcagttccagcgtagttgtcttgatggtaagcaaaagaaaggtcagaaagactgaagtacatgatcttctttgttcgactctgagtcatgacgcgcataccttcgtagctgtgccacttcagactagcttcctctagtgtgattcccatcccaacctgcatcgtccgcgccagcccgatcgccaaatttctctcttcatccgactcaagtcccttgaataaatccgacgaagcatcaaacaggtgcttcgagataggctgatcttcatagctcagactagaagcaacttgtttcatcacttgagttgctctctgaaagttggcaaacagctttacagacagagcttgtggaacgggacctatgtagcgtaatgtcaagagtcaagagtgtgagaggtgtgctgtataaacactgtgtacatatctgagtatcctcaccagatggtcctagcaggatagaccgctttggtttgttgatggcagccgtcttgaaagggatgacaacgcacttatcagctctgatacaaaaaggagcatatacagacggtcatataacttacaatacccaactcctcgactaaggctctgacaggcgttccctcggcatagccgtgaatccacgagcaacccaaatcgactggaggacattcagctgtactgtatgttgacgctcggccacccgttcggtctcgcgcctgcatcaattcatttcagtcagcctcggagatggaaaaaatcagaaaaaagaaacgtcgaataaaggcagcctggacttgatgtttacctcgatgacaagaacgttaaacccactctgagcgagcttccgagctgccactagaccggagaatccagcgccaatgataatactgtcgaatgcgttgcttgccatgtttctgtccgatggtattagatgactgataggtggtggaaagtatgggtttcattctctatccgctttatcggaccggctgccgtcttgtctaaagttggctgcgcaatcatgtggacttacctagatataaatgaatatacatataaatcgaaaaacgtcttgatctgtacgcgcatctgtcactcgttttgcccgttctctcaacatcttcctattccgtcttccatccctactcgcctttctctcttcataccaacacgcacgcgtccatcactgcaactcagtcatgtctgttgagaatgacaaatccacagatccttctccaaagaagagggagcttttgaagaagaagactaccatcgtcagtatccgtttcttacccgtttagcaagacgaatccaagtatctactcccttgatcaaggaggcaagcatagagtcgacctaacgcgtcttgtcttctgttctcgttggatttcgaaaccttctcgaacggatgcattcacaggatgtagctgaagtccctgacattcagaactggaatgattgtacgtgatgtcttcaccttgcttcctcttaactttcttcctcgcgttgctggtgttctcgctgacatattcacgcgacttactattcttcgtccgtccatatctaaagataaaacataccgagcctgccagcgtatgtgcttctgttaaatcgtctcgagtgaaacacaagtgcaaactattttctttctttctcttcttatctcatgcctggaacaaacgcgtccgttttcagtccccgatcaagagaagaccaagcttcacgtcggagatagcatctacatccgacctggaattccttatgaagctcctaaacgagggaagaaggtgaagggctctaagaaacagacagtaaccatccctgatgatgtgggtgacttagaaaaatggattggacggattgagcaaatcgtaagcagcatagattccttctttgtcttccctcatcctttagcactcgacacgagagacgcgtagatacatcctggaaatgaatgctaactgaaataatcacatctgaatacgtacagagagccgtcaataaggtggatgtctacatgtaagtcatctttggccacgaacacgtgtcatcttgtttcgcgatctatcaaacttacatgggctctgttttattctaattctacagcaagattacttggtagtgagtatcacgatcccgttcggatagtttctccagtccagaagtcgcgtttgatcaatgctgattcagattgataactctctgtttatgtctgtagttacacacaagaccagctgcaatcctctgggttcaaatacgcgtatgtctcgttcaacctcaatccgactgaaagcgtctctgtatgctgaagtcactgcctctttgtttcctcaattctatcagcaaacagcttcagttggagggaggagaggtagttcattcggatcactttgaaatcatcccggtttccacatgcgagggttagcttgctctttctcatcgaatcttcattcgatgatcgagatatatagaattcatcggactaatttccttgttggttgcttcttcctttatctggctaaaagacaaggcgacggtaatcaactacgacgagtgcgcagaagaccagatccagatcgcccctgacgattggtttgtaaggtaagcctgaatggggactttttcttgtcgaccaaattagctctgcaaagtatcttcgggatttggctgaccttgttctggtacctctattgatccagatatcgaactgtggagctcatgggtgccgatcagtcttctgaaaagagcaaagatttcaagtcgaggaaaaagccgcatgttcagaaacctgtaggtcgagccgcagaatatgaacggtgttgaactgagatctcactttctatcttcttgatttgtcttttcccttcttcttttttctcttttttgttgttataaataggccgaactgaactacaagcctggatgcatctgtggaaagatgtactacccactgccctttgcaaaagagagccgaatgcattactgtcctagagagaagtgcaagacttggtgaggggcttgttattcttggctatcaacggaactcgaactgcctgctaatggacaaagtgcgtgttctgatatgtctttatttcctttccatgggtggttttgtaggtaccactctacatgccttgcctcgagcggacgagaccgagtcgccgaggatgccgttcatttcgagacgaaccatgcccaacctaccgaagatggcgaggccggagacgcctcggcagatgagaccgaggttgagccaagcagtagtaaccatcccagtaagaaactgaaatcaaacggggatggaacgtctgccgagtcttcatctgctgtcggtggaggtgacggttcctctaagtcgcatccggtctatccggccactctggtctcgatgcttcctcctgctcttctccgaatcgctagacaaccgatcgtccgtggaacatctacttccggcatcgtcggtacctgtgtctttgtcctcgctgctagacggattctgagagacgtttgtgagtttgaaggaacgttacctgaggattggaaggttgtttgtggcttgcccgaggtcgaaggtgaggagggaggcttaaagctcaagacagctgaagaattggctgatgaagccgaggagagagaggaggagagggagaaggctttgaagaactctcaagagggtaagaacggggtagaacagtcaaagaagaggaagaacggggaggacgccgtgaccgacgaggacggtctactgggtggacccgacggagaattcgtctttgcttgccctagatgtgagaacttgatttgagtgtcgtgtatctaccggaaaccgccatcacgtcttgtaaaacttcttttagcagatctccccgtttactatctttctatcttctgcgcctctccgttttcttcgcttgtcttttgtatgtcgatatcctcaggatgagttcttctctatctttctttcttcttataatctctccttcaagttcttcgatcctgtggttctgttgtgtttagtacctctcgattgtctgcttgttagttcttcttctagtggtttccagtgatgacaatgaaatacaacttgagtgatcacgtcgactcgtcttgttagggttactgaactctttctctgttaaacgtacgaccaaacgcggcagtaatttgttccaccagcttcttttccagtccataggacttggaatcataattgttatctcgaaaatttgtgtcttcatatctcggtagatcgctcttcaagtctctattcatgatatgatagtctgacagtcgacggtaattatacatcatattatgttctattcgaacctacgatacacagtatatgggttttgactagtcgatttaaagcttggcgagcaaggcctcagcggtcgaggtctcgaggtccccaggggagttttccacaagaagagcctcaatctttccatcgttggcatacagagcgaatcgctgtaggataagaaaaggattgtcttatcgtcagcacgaaagaacaaggtgtatatactgtccatcttctttgggggaaaaatccgatgaaacgcaccttgcttcgaattcctccgaagatggcggaagcgtcaaagacgagaccaagggcagaaacgaaggcacccgtgtcgtcggcgatgaatctgggaagagagatcagaaaaatagaataagcaaatcgaagagacgaacaagctaaagatgaagaacgaggagctaaccgaatcttggtgccatcaggagcaagcttctttccccatgccttcatgacgaaggcatcattgatagagacagcgctgtagaacagaagagaaactggataagccgagtgtctttcacacatggtcaaagttgacttacaagatatcgttgacgcccttggcgacaaacttgtcgtacgactcgatgaacccagggacctgctcagagcaagtaggagagaacgctccgggaactccaataatgacaatctttccctgctgggggagggagatggtgctcatcgggtcatcctccttgacaggaatgtcgggaagaaccccaccgacctctactcaagcagcaaacaaaactcgcgatcaacaaatgcggcaagttggagggagaatgagatggacgaactagcagtgccgatggtctgggagatggcagcggaggcggcagaggcagcgctggtggcagaagcaacgatggaagtcatgtctgttatgagatgaggagatgtgtgtttggaagcgacaggtatgatagatggaatgggagtgagggagaagaagtcaaaagaaagaaaagatgaaagttgccggcttatatcggagagaattctctcttctgttttcttcctgaacctagatacaaaagccggcgatttgctgatcagggcgacaaacgtcacaggcacccggcagggttcggtcgccgagttccacctagagtgaggctgatatctgaacactgataaatttgaatatagtctattcaaatatctgacatgacgtaagacacgtgcaggtcactccgcctatcttcgttcgttgatagaacaatacattttcaacatttccatgctctatgaccagcccaaaccaatcccaacctaatcgcctcatgacaaccatcagttaatatacacactcacacccgaacgtgattacatacctacttcagtttctcagatggatcgtctggcgtcaattctgtctcctatacaagactccccatcccatggttcgtcagacgagttcgtcgatccggcctcgcaagccatagaaccgtccaaggagagcgagtccaaacccagcagcacatcggggcgtatacgagcaatcctccagaagacggcaaagtctgctcctcttgtatcagctgtcatcgcaccagtgatcaccttactcgatatccccgctttaagtcagagatggtatttctttcaaggtgttcccgctaaagatcctccggcttccataggcatgagtgttgtttctctaggtgagccttctcttcatgtactgtatcacatcattgatctatatccagcgcaaagggctaaacaaaactctctgatttctaatcatcaatttgaccagtcttctgcgctctaggaaacatcttgttggtcatacggttctctgccaatcagaaaaagcttgagcgctggattattcccgtatccacatttgcattctgtatcaagaccgtcgttgagattgtcaacatcgcagtctacggtgcttcgagcgaaaagccagcaggctacgtacatgccgaggggttctggagcgcgtgagtattgaattctctatatccgcaacagtcccataggaaagttcatatctgactggctgctcgaattgattcccattcggacgggaatacacagagtatattcatgcggcctgtcgggagtggtagctgtgctgctaatgttccatctcgttgctcagaaaggaaaagactggaaagactccatacgggttagggtcgacggacgtcgtacgtttctggcctggtcttaatgatatagcatctgtttcaacttctatgacgccaagactgacgactattgacttcgatccgtaattcaagactttatggagtccatgatggcttttgtgctatcagtcggtatgtgtttttcttggccgaacaatcgttcatatatctccacgcccccctcagaactcttctcacaaaaaaggcctcaacaggcatacaagcactcatcttctccaagctagaaggatggtactattttgatggtctgttcttttcgattgttgcaacgttaaccgtaagtctgttgagaatttactcgtcaaacaaagtctcctttctctgtatgctcacgttgttctatgttcatgttcaggtgggatacggtgatttggcgcctacaaaagcatccacaaaagtacttttgtttccttgcgcactgatcagtgagtaattctctttctcttatgacagattgcgagctgatgtcaatgcatccaataataatactccatctgtagctatatctctcctcgcaaatcaggtaagattagaaatgtacctcttcttcaatcggcgttaaatactaaattatatttaccgctacctgattcaaaaaaggtctcgatcatcttaaactatctcgccgatcgaactcagactcgaaagctgaaatggagagcgtgagtctggccagttgttaagggggatctaagtttaatttactgatcccgtgaccgaggttgcctcaagccccctttagtcaaaagacgttgctgaaaacccaaagtcaagcctcgaagaggtcctccgaccactgggacttgcacgatgagattctggtagatccaacctttcctgctcatctaaagtcagtcagtcagtacattgcgaagagtttaaccttggtcgacctctatccctacgacagtacctcgaggatgttcatagcctagaagaagccctatctcagtcttacgatctgatcgtctccttcctgagtttcctgagtttttgtaagtgtagcaaacctcttcatgtcctttcaattgaagctcgccaatgtgtttccttaaaaaaaagaaaaaagttgactaacaatttcctgagcctgtttttctctctcttcatacagggttgttaggctcagtcgtatttaaatacacagaaggatggtcttacggcaacgcagtatacttttcatatgtgacgtgttcgtgtggcttctcttcttctcaagcctcacgggtttgtctcgattttgacagataggctgacactagtgtgcgatttcttgggcttagtcttgaccatggggtttggagactacagtaagctctttccgttctgcgctgaagttggattcctgttttatttttactttactttttgaagtcagacggagaaaatatctgaggctcaagttttgtgtatcaataggtccggcttcggccgcaggaagagtgttcttcatcgtgtatggtctcgttgcggttcccttggtcgcatcctttgccgtccaaacagtcgctaccgttctatcctccgctgccgataaacgatggcagcgatcacgagaggccagagaacgaatctcgcgtgatccatccacaaaacctggagagatatctctgaggccgtacatatcccgaacctcatcctgcgctcccgctcctgattccttcgagcagcgatttgttccccattcaacgtttgtcaaacaaaatcttgagacagcagccaagataaggaaggatctgagagaaaaagcggtagaggaaagtgttgtgagggaagagctggcaaagcgtaccttgagactggcttgtatgctggaagctaacgcacggtcgcttcttatagctacattacctgcgtgagttcccgacgttggtgtcttgttcttcgagtctctatatctctgttcactgattttaccatgatacatcacattccgcatcaaatatttgatcaaaatctcaggggatcaaaagctcaaatgttactcaaagccgatcgaaacatccagcgacgtgatatggagactatgctgtccggagagtccagtatacacgatatttgggattatgaggatgcgtgagtgtttcaatttctcctgttctttgaatttctgactttcatccgtgctaaggtatagacgtgtttcgatcgacttgtagcaactctcctctgacagacgaaacacagctagaatctgtacgtgtcctctatttagcttccctctctataccattccaggctgatttgaatcttgcgcctccacccacgactcgggaacagataaagagatatagagaaaatttcgcaaagtttctcgtcgcaggtagtctcatacgtcagctagaagagcctgaactgtctgccttccttcgaacacccagcgcaccaagcgcaccgaccatcgaacagcgcgcaaaaacgataggatagtcaattgttgttattgttgatattatttttgtccgtacacgtacacattcaagtaaaattatttgtgggactcaacccgctgttcggatgttcaatttgagaggacgtgaagtagacttcaggcttctagtctcgatacaacgagtaaccaatcttctcaacaagcctatgaatacgaagttgactagggattgagagatcaacgtgataaacatattacacctcgtcttgttgggtctcgcccgctctatcttggccttttctgttggcgcgcggatgcaccgtgggctgaacaaccatttacagtcagactaagcatctatggtgtaaaaacctctcattccgttcctcttctattcttctctttctatctgtctcaacccatatcggtctgtcgacgcaacagtggccaacactctactgggtactgacaaaagaatgaaccatctactattgaggtcacgtgactttggcgtgacgcgtgactggaagttttggcgggctcaggctataaatctcttgacgattgggcatccaaagtgtaattcccaacgccgacctctcctacgggagaggtctcactctaggcataagtaagtggtctatgctgtacctaccacgttgaaatgttttctttttcactaaccgtgattctttgctctttgtctcgattgatctttttagaagcaccgtcgcaaagtttgcactctttctacggatggatgagcgaacgatgcagcagccggccgtaagtccaagaggagaggaaaattcagagcagattgggtgaggagtctgaaggggccaaaacccaaaacttcggggttctcaaaatcttagttctacagttcttgatttttgtcatttcatttttattcgtatctatattttgtatttatgtcgataacttgactttatgatacaatctgcgaacgtatcgtgtaaattgtctgagagcgagggaaaccatcaacccgaaagtttgttctcaagaggactagctacatttgattgatcaaacgagaacaatttgaacaagaggcaaacatcaagaggaagaagtttccatcgttaaaccaccaaccaacatcgccgtgtgctcctcctagtttttctaatcatcagataactctccatccttagatatataacgagaacacacgaacgacgttcatctgaacttcgatctcaaaagagacaacgccgaaaaggacttgctcctcgacccacgtcctaccctttcaccttcactcctcacccttctccagtctctccgaatgaactcgcttaactctttaataccgttcactacgtcaggaagcttagtggattgtgtcgacagtgagtctctctcccatcacggcctctcattttggctaactgtccagtaaggaagagagacaagatgaaagaagagaatgagaatggaaattgagagggttaaccgagagcgacgactcttcctgtctacttcgtgttgatctgatcaatcagaaaagatgctggtggtcctccgtgacgggagaaaatacatcggtgtgcttcggtcgtatgatcaatttggtacgttcatctttgtgtgatatttcaccttctttcagattagaacgcgttgaaagaagtagttttgctgaacgacaaagaaacgttcctcttatgtagccaacctcgtcctttctggctcgtttgaacgactgtttcatcctccgacatcgacgtatgctgatattcctcgaggggtattcctaatccggggagagaacgtggtgttgataggcgagatcgtaagtttcgggaatgtcctcgactgctgagatgtccaaaaaaaagaaagaaaggtgcgagtgggctgaacagcgatcatggcgttcatttcttgaacgtgttacaggatctggatgttgaagacgagccaccggtgcaactcatccctgccccgatacctgatgtgctgagagctcagaagattgactcggtcagtggtatcccttttcgcctctccacgaatctagctggcacgacggactgaacgtttgtctctttgttcattgaaacatttaggatcgcaaagccgctcaagacgcgatcaagaccagagttctccacggacagggtttctcgacggacaatgctgaaggagatgcctactagaccaggtctttctttctgctctcagccttcctttcttccactctctttcgactcctgttcaactgtgctgttttgtaggaccgagactggtttgcaaccgtcgccatgtctcgtgtgattttcttataatgtctgttggtgataagatgccttcaccctttatttgtatccattcgttcactatccccaaagcccgatctgctttagtctgttgaacacaaggacatacaatcctgttcatgtctaccattgagatggatatagaatgaaagcaaaaaattgacgcatatactcatgtcttcgccccccaagggaaaaaatagaaaaaaagaaaagaaaaaaagatggccgtctggccggggcctcgcacgggctaccccaattttcctcttgtgcccccatctctttgaaacctcccgtttgttcttattccttcagtcgttctcttttctttctgaccgcatctcttgttttcgttctccccacttgattcttgtctgattgtagatagtttctctatcctcttcttttcccatcccttgtcaacgttgtctttgtctctttattccaatcttagttcatcaccatggcacccatcgcacgtgaacccggacagaagggcgttaactggagtaacatcgcagttggaggtatcatgaacatggttcgtctctttcatctcttcctcagagtcttggttctctttcctggtctggtactcacacatcgtctcacgtcgtaaacatcagttcgaggtcaccacgctcggtcaaccgcttgaggttctcaagactcagatggccgccaatcggaagcagacgattggacaagccgtcaagacggtttggtccagaggtggtgtctttgggttctaccagggccttatcccctgggtaagtctgctaccgccttctgctccccgttaaaatgagccatcaggctaactgtcttatcgaacggtcaatcgatgtttgatgatctctgccctccaggcttggattgaggcctcgacaaagggagccgtgttgctcttcaccgctaccgagatcgagtcagcaacttcaggaatgggtcttaaccctgctgtcagcggtctcctcggaggaatgggtggtggaatcgcgcaggcgtatgtcaccatgggtacgtgtggactctctgcctcaccatcgcgtcgttgatgtactcttgcaactagtttgtccaattgacatcctctcttgttgccttactgctttgttgtcttttggcctcgttgctttgttttgctccttctttcactttcctctcactctctcgcctcttctcctgaacactcaacggtgtaggtttctgcacctgcatgaagaccgcagagatcacccggcacaagcaggctgcgacgggtgtcaagcctccatcgacatttgccgtttttatggatatctaccgaaaggagggacttgccggtatcaacaagggtgtcaacgctgttgccatccgacagtgcaccaactggggatctcggttcgtttcatcaacggccaactccgaatatatgcgacagtagccgatactcatttgttttattttggttgtggaacctctatttccgattattttagaatcggtttggctcgattggctgaaactcagatccgatcgctccgaggtatcggcaaggacgagaagctcggcgccctcgataagattctgtcttctactatcggaggagctctggccacttggaaccagcctatcgaggttagttcacatcccacatacttgcgtggtgtcttcttcctgtccttctgttactcacgactgtcaaatttccaaatgaatcttccacccaggtcgttcgagtcgagatgcagtccatggcaaagtcaaccgatcctgcagtcttggccggaacgaagaagaagactgtggtcggaacgctctctcatatctacaaggagaccggtcttaaaggtctctaccgaggtgttacccctcgaatcggacttggaatctggcagacggtaggtcttgagcttgctcgcgtgaccacgagtcaagcggacgtactcacaatgggacatataaagacaaaaccaactgatcaacgatccgatgctttcttccttcttcccatttcaggtttgcatggtgtctttcgccgattacggttcgtcccgcgcctttttgaatgtcgtgtagatcaaactgtgtggacatacagtaaactgactaagcctgcgtcgtttttgttctctttcgttttaataagtgaaagcctgggttgccgagcgataagtcccgtagtccggggcttctatctattctttttgttattcgttgtacaaaggtttttctcactgtcatctagctttgttccgaagggggacacaacgtttcgcggcttccgattgggttttattagtcataccttagcttctcgattgaaagattttttagactatgatcatcttcgttcgactacgaatcccgtcaaatccagcttgagtcgtttcgttgcaagataaagagagagagaatcagccgattttggtcaccgagatctagtcttgattcaacagacacagcgaataggagggtataaaatgcacatgatgttatatgaccacgtccgtcgggacaaagcacaaggggaacgagaactattttcgatatatgatgagactaaattatgtaaagaggaaaaccctccaagcttcgtgattcattctaacaacagactgagactcgactacctgcccccccggtcgtgtccccgccttctccacaactcgataaatctccaagccctcctatatgtcgtctgccactccatcagctttcctctcggatcttctttcccgctagcccttctcaacaaagcgtccgtctccaagtcgacagcacgggcttcaaactccttgacgatggaggaaagagcagaaagaatacttcgatggggtaaccaaagacctggtgctaggctctttggatcaaacccttgagccgtcaggagcgatctctgcccggccgtcggagacatcgtcaaggttgctgacgtcggaccgtcagacgagagcgaaagatcggattccgtcaggaagatcaggtccccgtcgtcggatcgagtggtcgacgcgccatgtgaaccggattggaggtcaaacgagcgtcgctgatccggggaccaaggtaaccttaaccggttcatgtcgttgatctccttgatccttcggagaactttgtccggagtaaacatccggtacgatgtcaacgtcatctctttgaactctggggtatgtctctctatcgacggacataaaaagtctcctttaaagagctgacgtttgtcgagcaatctagctctcgattctctcagtgtctcaccctctagcgtccgacctgtccaggcttcgtactgtctacggatatgctcatgcttgaacaagatgacgtcgttcaggacgaagaacgcttcatcgagcaagccagcttcaacataagcgagcgcgaggtaactccaacaggtcgaatccagcccaaagccaagcttggtgatcccgagacattgctcggttatataccgcaactggtaagttcccggtcgagagggcactgaaagaagacttcggatataggctgttaacggtctcgaaaggagagatgatgggggcttgtaggagccagtcggaagggcgatcggcgttctggtcgtcgtgtttgcgacattaggaggcgatgccggtgttctgggcgcaagcgccgatgggtcgatcaaactgtctgtcaaggaagaggatgagttggcgaaaggtgctctcacacccgctgctgttatcgaaggatcctcctttacaggaagaccaccgttgtccaactggcgtttgagtcgacgcctctcgacggatgaacttgactcgacttcctcctgagcgagcacgaccgccgacctccataacaactcctgctctttgatacttatagtgcttcccactctgtccagcaaggttccaacaatcttgagagaaacctcccacgctttctttcctttgagttgttcgtacgtctccagtaccaagcctggttgagtctgagcggcgtaagcattgacaagctcggtaaatatcccagtgacgggatcaggcgagttgattgaccaccgtttggcccatttgttctcagtcgaccaaccttcgcctgggccaggaagcgtactgatcaaccggcggcataattcgatcgcttttggcttagtcgacacgtcggaggacagataccggataatgttgatgtacaccgggtattctagagacagatgtctggcttgcatctctccgataagcgcaaagatctctcgggacaactgtcgagcagttcgcttcacgcgctgagacccactcagcggcttctcgacagccgactttgtcagaggcaaagcggcgaccgctttcgacgctccgggctgcggtggaaggttcgggttgatcaactctacgatgagtgtggtgaaatgtctgctgtccggggcgatcccagctctgtcctccatgatcttcatgatttgccgagcgtcatcgaggaacccactcttgcaggctgccctcattagcgacagattgagagaaccatccgggatcacagctctatccgccaaaaactccctggccagctctctgagctcctcccaagaccctcccatccttcggtgagcgtctaggtaggttgtgaggaacctagtgtaatccactctttcctttatgggtgaatctttcgagatcggagcagtctctcgagcaagcctccaaacagattggacgtggtccaactcggaggcatacgcgtgcgcacggaggatgatagtccactcttcgaacccgataggaatctccttggcctgcatttctcgaagccaataccaactgatcgaactatccttctctgccggcccggcacgcatgagaaaccgcatcactgtcctagcgaacgtcttgtcttctagcgggttcgaacgaagcgccatcatccggttgtaaagctcatgagcggcagcatggtctctactccaggtgaacaatcggaaaagggccaagtaggtttctgtactgtactcggcgccctgcttagaagtggtcagagacatccagccttgagccaaagcatgttgattggttcgaataagggcgttgatgatgaataggtagaggttgatcgacggctgctgactactgctaggttgagaagaggcaagggagtaagaagaggacatggaggggctatgaccaggataaactttttcaaacagacggatggcttctgctgtcttatcctccaggcagtattgtcggatagcctttccagccgaagaggatgaatgagactgatcgacaggtgctttattttctgcggaagctggaagaatgtactgaaggtcggcaagcgatgcggttgtaggcggaagagatatgtgagaaagcttttttctaagtggcggtcggattcgttggttaaagtaatgtttcgtgtcagaaatatgtgtggatcgtggcgggacaggtggtgtgggtgaagtcgcgccactaagagcaatcctgaacaggtcactctgtggactcgtcagatctgaacgacagataccagccaaggttttataaaggcgtgagcttgagtattgttgaaactagcagtagcgatcgatggaagaagaaacgagcttaccgttagcaggactctttcttgtactccgctttgttcttgtcgaacgacccacggaagatgtatgagtaagtggatcaggagtggaaggaagagtggtttggagatgtggtaaacttttggaagagcgtgttgtagtgtgagatgccaattctggtaaaacatcgggaatatgcgaaggtgatagagatgatgttgatgatgatgcttgtattgatgggatggcgtcaggggtcgatgcaggtgagagagagtctattgatgcagttgggggttgacgagcaggtatatctaatgaagaggaaatggggatggaaggtggatgtggctcgacggatgaatgtaacggatggtttgaggacaaaggctgatatcttgacggacttgtcccgggcaaatcagatatggctagttgacacaagtaaaattgcaccgaatcagcaccaacagaagacagtgaagtaattactgaaatagcagatgcagatcaactcacaagaagacgcagtgaaggtagacaccgactgggctttaaggtctctgacctcacgttcagttcgtttgccggttctcgcaccttgggatgtcatcgggtggttggttgttaaaggcttgaccgattctgaacggatcggaggtggtaacggaggggctgttgacagagctttccgtcctaataaatcccatacctcaatgccttcatgggcaaaatgggcagcgtggaagtctttgtccaggccatacttccgagctctgacgtcaagcatgcgaggatcgggacccgtttggagccatgcctggttttcgaacgctagagaggtcggagggagtaatgggttcgatagtggggatgccagatgagaggtagatgtgcagaagaggtgatcatcatatgatggtgctgacttgaactaaaatccaacaattcgtgaggaaacactggtcagatattgctcaatcggagggaggtagcagagtggagcatattgcgcataggcgagagacgaataggatggatgtaatttcgcccgagggatcctcgcgacagaggattctaaatttgatcttcattgtccagagtgtggcatcgatcgatcgaacaaacgagatccagacagaagcacatacagatcaaaagaagatatacagtagaaagagcgaactcacgttgctaaaagacaaccctgcgagctttctcttactctgagtgagccaacctggaggtggtggtcctggccgacgggagagactcgatttgggtgtagtgactacggatctcttcatttcggagcgagagtcaatcaagatctaggctgactggcagccaggatgcatgcagtagcgattggagctagcgaaccaggtagagcgagtagagcaaacaaggtatcgtcgtttggaggtggataagaaagaagaaggaagagacgtaagacggcttgaacgaaagattcgatccgttggtggttacgatcggaaccggatcgaaccgccgttatcagtaccggttcgagccggtttactcaaatcacgtgatcgattacacttctctttctcttgctccctctccgttctttctctcatctttctttcttttgacgtcgaccgaccgcaacagtttccttctcgactcactcttcggacactcgtccttctctctcacttcccagctatgctgaaagccagtcgggcttgcttggtgcaggccgcttccgtcacaggaagaaccgtccgtcctcacaaaccgtccgtatctcggcccgctcctagagcgcctgctgctcgtcctcaggtatcaaacatcatctttggaaccaagtctactgccgttctcgatccagtcatacccgcagacgaagacattcagcaaggggaagtagatgacgtcaaagagctgctggaaaaggtgacagtcgacgacaaggactggataaatagtggtttgtcctgtgtttttgctgtgtcccctttttcaatagtatcaccagccagccaatgaagaagattagccttctgatctcttccttctcttcactgtctttctcctcctcttctctctctctctctgcctttctcttgcgtccttcgtgccggagtagctgcagcgttcgccttgccagtcttgccgacgacccggacaccctttgcaactcccgaatcacactctgatacatcgtctacaataaaaaacgcccacccggctctcaaatctcttcttgaacacctcaaatctcccagagcgcactcccggatagttttctccctggctgaagtaaaccgttcaaacggagcatgggacttgtataaagatattcctaacaaggccgacatacctcctgctgtctggtcggatatccttcggtcggtcgtccctcctaagtcgacagcttcccatttctactcccgaaaacaccgccggcatcttaccggttacctccgaacaggatatgaagaacgtcttcatcaagttctcaaagatcaaatccagatcggaatcgtccccaacaggaaggattaccatttcatcatgcgtcactttgcaaatgctggctatgtcaagtcgaccgaggcagtctatcgctcaatggtcgccagagacatccctccgtcttctgattcattcactatccgacttaaagcgatcgtcgaatggatgaccagataccagcaggttgagggcaagattcttcgacaggaagagatgattgcctcttttgataccgcgctagcctctgtcccgccacttgtgtcggagatcatgcgagagcttcaggagaattccccggccgtcacactatcaaagcccactatcgactacgcctgccagttgttctccatcgctggcgactgggatgccttcaatgtgctcgccagatatggctatggtgttgacctggacaccccggatgccgtgccagaggaatggctcaagcgagtcgagtccgatgacggatcacttcaacgagggctcactaagcggggaatgaacagtctgattcatctcctcaacatgcgaggcgaatactggaaggcgttgagcatgtgggagactttcaactacagattacctgctcctgagaaccctgatttcagaggcctggactgggaatcttctcaacactatagaccccggtacattaaaaaagacgacctcattttcatgcctgctttacccccaacgacagcgagagcttatatgaacaaccttccacagtcgctcaccacgataaaccaaacgcgtccccaaacctctttcccagacccgagtataaacttgactgagcgagcagtgtcggcccttctccaaggaccgatcaacgatccaaaccgatcggcctacatccccttgatcaaacatcatctcttaaatgcgctggcctctcactacactgaccgacagagtcagatggctacactcgtgaaattggccactcttcctgtcgaaaaagctcagagtagacaacaccttcttcgaacgctaaagcctcatcagggaagagccaggatgaagtggttcttttggctgacgtatctccgaaaagacctcaagaacggcggacggaacgctagagaaatttgggatattttggcctgggcggatgaagaggccaggttatataggatttcgttagaggccgatcagcggatcgtcgagttggcaatcgaggcacttcaaatagatgaggaccttgccacccgaaagcctaagctccaagatggtacgtacttgctttgcatctttatttccttcactttcttcgattccctcatcaacgtgtcacgtcggtgataattctcaagttcaatttctaacgcctttgttatctcctccgttcaccttgaacagacgccaagccaaggaaggaggccgatgtttcgctcgagcggttactcgaggcgatcaaacacgagatcatgatctacaaacgagacgtccgagctttcatcccacttgctcaaatcgagaccgcccgtgccgacctgatgaaccttcgaaatctgtacaacactcctgggaactcgatcgataccccgctttcgtcaatcctccctatgatcaatgacccggccggaccgacgattggttccagagtcaacgactacgccgtgttcttggccgaacgactgacgtacgagctcgagccgacgttggagcccgtaggcgaatccttcgatccggaaactctcttgaacgaaagattcgccacacttgatagattggagaccgtgtcaaggagacagataaagagacgatcgtcgttgaatttgttcccatccagagaaagaggaactttgtacgatttgaaggatcccgatatcgaggttgggtttccgatggcggtgaaggagataaaagaaaaagcatctgcatcggaagcgtgatatatgacgaattccagataaaatgaacgacggaaccagtgattgagtttatgtgtcaaaggattggcaggaatgatactccatcgagtccaagaccatttacaagttgagattttttaaaagaaagcatgctatctgttcaccaaaagtacgtatgtatttcctgcttgtttcgttcttcctctgtgtcgttcattttcgaacagcgtactagatgtgcgaagagagcgcaagcaaccagcgcaaaaggaagagcacgtcagttcattccagataaaagagagcggtgtgtaaggacggttaccttttgtacatatgctctggcatttgcgtcaaattctttccgattcgtcttgtaaagctcagccacctgatagtccaaaaaagagagacaccataagcgctttcgtcggatattgaaagctctcaaaagggcagtcaaagagaaggatgattttgacgtacgctggcgactaacggatcatcaggattgggttccgagagaaggttatatatacttagaaggactgtagaaagaggtagggattgataaaaccaaactcaggtgaataatgacgaaggctgagaaacaagcggagagaatatcaaacgatatagcttaccggtggccatcttggtcgctggtttccaagcgtcttgtttcaagagaccaacgcaaatgttgccctcatcgtcaacattaggatggtagattcttgtcgtgaacttgatctatatctcagccgacgagagaataaggagagaacgtataatttcagcaaaataattcatgtctagacaaggaggcctgtcgatagatgtgaaactgacaagcggagctagatgtatgcaacacacagacgcacaccgcaaagacgagatttcagatcaacatttgttttgaatactaagacttcggagactgatcaggcgaggtcatacctttgaaaggatagtccgggggaaaagagacgtttaggtcaaagaccccgctttggtaaggtcccgagtcctgagatgaatgaacatgatcccaccgaatcacatcatattaatggtccttagatctatctcatctctcatgatctgaaaagatagagaagaacgcttactggtccttgtatagatgctttccaaaaaaggacgttctcgtcgtcagtttctacccggattgcttgtaggcctgtcgagttgtgaacctcggcgagttcctatgcgcaaagtcataaaccaagatggagagtttcgcacatcagtttcaagacctgcactactctggactcgactttagttcaccttctgaatccttcgtatgttaccagagctcattgtggaatgaatgcgatgtgtgttgatggcgtgttctttttcgtcgtcgtcggatgctgaaagatctctcttcctttttgggcgtagtaagaaaaagaagccaacaggattaactgatgatgctgatgaccgtttttaaccatcaaaccatcatcccatccgtcaatttcggtctttcttcccagattgatgagctcgcagacgccaatcaacccaccggataagaacgcgacaggacttccctccatgaggattggtttcatccatccagaccttggaatcggtgcgtcgttgtctgtttctgcctttccttcttccgtctccatccatcaagttcacttatcgtgttctttctttctggtaaattcatatcaggaggggccgaaagactggtggttgatgccgccacctctttgcaagatagaggtcactctgtcgagatctttacatccagacatgatccaacgagatgtttcgacgagaccagagacggtaagtccgatatctctgtgtgtctatgaaacatcgaaaccaacgcacaactcctcatcctcgctacaggtactcttaaagtccacgtcttgggaaatacactccctcgctcaatcttcaactctctccacataatcttcgctatacttcgccagcttcaccttacccttctgctcctattatccctacttcctattccggtatctctccagcctatacctgagcttcgcgcgttcgacgttttctttgtcgaccaactatccatctgcgtacctttgttgagatattttctgcgtacaagagtcgtgttttactgtcactttcccgacaagttgctcagcggcgaatgggacctgactcctggcgaggaaggtcctcgaaagaaggagtcgactggcctgagaagtttgattaaaagctgctaccggttgcctttggacttgttggaggagttcactacttgtaagcatcaactgttttatttctgatgcacttgatttggaagctcgttcaacgtgcccttctctacaacaggccaagccgatgtcattcttgcgaactcgatctatacgtccaaggtgtgcctcaaggcgttctcctcattgaagcaacttcctcgagtcgtatatcctactatcgatacctccgctttcacacctctgacccctaaacaagaaaattcatccgacgcgcagatggttctatcgtgagcaagattcctatgctgacctgatccgactcatcttgagtcagattattgattgcgtcctcgttttggttttgatagtgatcggcccacgctagtttctttgaaccgatttgaggggaagaagaacgctgcgttagcaatcgaggccttcgcgcgattgacaaaagaaggattagtggacgaccaaacattctcgaatttgcggctagtcttagcaggtaagtcttcaagtcatgtctcaagatgagcgtcttccgcagatgcctggagagctgacccaaacccatgcttttgttgaaaaaggtggatatgacactagtgtccaggataacgtccagacactcaacaacctcaaagcgctttgcgtatcctactcgcttacctatcatgtcgtttccgagttgacgttgaagcctcctcctgtggagactcaggtgttgtttgtgctgaacttcagcaatatccaacggacagctctcctgctgtcgccttccacccgcgctttcctctacacaccttcgaacgaacattttggaatcggcccgattgaggcaatggcatgcaagcttcccgtccttgccgtcaacagtggcggaccaacagagaccgtagtcgacctagctgatgcttcccagggggagaccggcacaggcctcctgcgaccagcggaaggcgctcaatgggcgaaagcactggcgaagcttgttttgatgaagcctgctgagagaaaactgttgggagaaagcggatcgaaaaggacgaaggagctgtttgatatcaaaggaatgggtttccggctagaggaggcttgcaggcaggctgaagagatgggtccagttagtaatttggcttggattggagcggccagtctgggagtcctgttcgcagcatgggctttatcatgagtagttctatagaagtcagcgttcatgtctttgttcttttgataccataagctcattcagacgatcatctcggaggtactttgtatacgtgttcgcaaccatgaggggtacatgtactcgttttactataaaatacctcagtggccacataggaggcatcaatatgatcagactaaccatccatagtcttcatgctgctcattttgctgccgacgctgatgacgccgtcactgacacctattcacatgatcgagaacacagtttctagcccatgtctaatttctgcttaatttggatgatgttcatattcagtactcatcttccaaaagaaaaaatcatatcgatacatcaatacatgaatcggtcgtatgtaagaagagttcaacactacaaggatgtctcctcaagaatatcaacccgacaatcatgatttaatcctgttttggttgaagcgcagacgcttccacctcttcaaattttaggctctttttcaccaacttgattatcctccttcagcgatgacgatggttcttcaatcggagaagtgagatgggagttcaaactctcggaaggcggaatatcggagagcgtttgtgcttcctcagaagtttctgctggaacctctggagagatcacttcagatagttcccgattggcggatgactcctcagttcctatttccgaatcgggatctacaacctgtgttaactccgtctggctgcttagagaagaaaccggtgacacaatatcggttgcagttgtctcgttctccttcgtcgtcgattccgtgggcggatccggcaagcttgacggttcacctgcaagagtagagatttctcctgagttcgatccatcaccagactcaagtgaaaccttatctggttggttgccctcggttatcacaggagctaagaccccttcaggggtactatctaccaatagttgttctttcggcaaaggcgttactgcaggcgacggtgttcctagaatgttggagactgaatccgaacgaacaaggtccctgcctagtatccttgtatcgagatccttccgaattttatcttcacctccaagaggactatcttcgtcgtcattttcgttttcattctcgttatccttgtctttcgactcgtcatcctgagcggatgcctcgtccgcagatgcgggaccgtttcggttactgctcacccggcgcataagattcttcatgcttgctcccacaggtcgacgaggaacagatttatctttgacaagatttggtaggatcggaaggatcggattgactttgttgagagccgaaagtttggcgactaggtagttggcatcttgaagcattctgccctcaatcattggaagagataagcagattaacaaatgagattttggggagaaacatgttgtgatgaaaacgcacctgctcttggcttcatcactcttgagtatcacatcagcataagcactggaaagctcatgattgatggaagcaaacacttgggacaagacgctctgttcaagagaaagaaaacacacatgcgcgtcagttgccggattcgattcaagaattaaaaaaaaacataagacagaaggaaagaaatccggacctctactgtctgatcgggcaagtatctcgaaagaattttgtgaagctgagatgtctccttaaccaaaagttctgcatactcgttaggactagaggggcgtttcgatgcaacctcccaatcaatttcctatgcagcagtagaccaaatttgacgaagaccgttagtgaacatgattgggacgaatcattctgaagtgacacttagataggacatacacggaaggtttttatatgaattgcgagacgatcgcccataatggctaccagcttggcgtgtatctcatactgatgctcttggaaatccttcaaaaataaaggttacagcgttgtcaggcgatgtaaagattgatcatgagtcaactgagacgaggagagaaagtatgttgatgatgtactgacccgtttcaacttgtcgaactcaatgagcatcaccgcctgctttgcgcttaaatgacgtcgaatcgtttctcgaatgtatggaatcagggcgaccatgacggagagggattgtgaggcaagagctaagataaacagggatgagtaaaatggattggagtaagtattatctgatgactatgtaggaacaaaacaacaatggactgacccaagtgttttgcagtaatattcttcaatccggctgatcgcatcgcaccagctcccagcacaacttgacaagttcgagaattgaaagactttttcgatagagagcaaagtcgatcaaaacagatgaggatgagcgaaatacgcccctaatgagcggggtttagaagagtaaaaaaggagacgtactttaaggtactcggtcactttggacatcacatccgtcgtgataagctcgatgttgacaattaacttcagatagtccaccaacaattcaattgatcccaacgtagcgcctactaagatgaaggtcctgtcttcgatctgcagatgctttaccgtttgaccttcggttacagtggccgatggagcaacatccgagccgatacgattcttgaggatgagctcgggtggatctgatacggcagatgcaacgatgatctcgacggcacgctgttgagcaggcgagacctcttcaggagaccataattcgttttcaaccatcttggccgacttagataatcgctgggagtgatagttttgaagaaacatcttcgcctgggatcgaacgagtatacgtcgaatactgatcagaccacataatctcgatatctaattgcggccacattgacgggagccttacctgaacaaccatagtccctcgaagcccgacaatcatctttcggcaaatgacttcacagctcagtacaaagttccaagcctcatcgaatgtctcgatgaagttgtccagctcgagagatgcatgttgctcattccggacccccattatcttggacgcacgcgagtttgccagctctgcagcttgggatagaacatcggaaagttccgtcttgattgtaagcgactggcctgaaagagaggatgacggatctgccacagacgaactacaagagatcgattgaaataccaggatacggagtcagattgacagatttcccagaggggaagagcgcacaagaagaaacttacttggtggcctccatgatatccccaatagcctgggagaatcgttctattttctgaatactttccagcaagccagaggacatgactttttccatagccaagaattttgaatgaggcatctccttcaaaagtttactcagaggagaaaggctggatatcctacggtcagcaagatgcgacaattagactgaactacacgaagaattgcaattcgatctgcttacgtgctgcttgagccgctaatttttgtctgagacgcgtcctcatccaccggctcatcctggtgctgaggtatat

SEQ ID NO: 697 - DNA, 21665 bp, Xanthophyllomyces dendrorhous
atatactgttcaaaaagaaatttgggtagtttgagcatcaagttatcattcaaaggctccaaagattcgtacagaaagcgaatcttacctgtttagctacacttctgatttgggagaccgcgacttctctgaacaccgtcaccaatcgaacattttccctgactctgaccaagcccaatactaatggcctcaactttgccgtcacggcctcgagatcctgaagcttacccaccatttccgcctccaaaagcgcatgtagctctgactctagttgagtaccaatcgccaacgccagacctgcgagcgattgaggtaatccggctaaggatgacaagcctgtcagatctataggagatggtggtgttcgatgttgatgaatgttccgttttgaggaggatgaagcgcgagggaaggaaggaagggaaggagatctgggcggactccttggctcggcccgacttgggctcgaaggaatgaaatgtgaagttgaggtcggtatttctgaaagaccgccatcgggttcttcttcaacctgtttcagtagagagccggaacgaaacctcccagaagaaccttttcttggtctccctggagttgaaggggatgagcttgtttgggttcggttcccgcttcccaacgttccaagcatttgctcagactgtttccctttccctttatttttgacccagctatcgacttcctcccataattcaacagcgccatgtccatctcctgttgaaacgaggcctttgatcatgccaagcgcttcctcgattcctttgatctcactcacagctgactcgacgctcttaagttgtttgagtgatcgagcgagtttgaccgcttccagacctcgttgggcctgagctttgtcgaccatgtcaagttctaatcgaagagactcgatccgagagagacatgtttcagactctgattgaagatcctgtaggttcgtcagcgcggcaaagaaggaggctgaccgcttcgaaatctccgcaatgaggtgctgttcgacaacgtccaggtagccggacaacttctcctgaaacacttccgtcgggataggggtcggaggatcggccgtgaaatttgtgggaaagtgggatgtgaccttagcgattgatggatcgggatcagcggacacgagcgagttcgacgagggagttcgttcagacaacggtttaagggtcggaaggggagagtcgaatgagcttgaatcgatgacaggcggcggagagaccaatcggccagtcacctggtcaaatatgtggggatttcctagattgaaatctgttcgaaagtatacatcaggaatactgttaagggcaggaagatgcctctcggcctcgaccgattggttcttccgtcctacgtctcctacataggcatcggtgctggacttgtcagaattccgagcagattgctcatactttccccattcagcagaaatcgattgaatatatgtgtttaggtcgttcttgttaactcttgggaggacttctggagggggtgcaggaggtagtgggattctggatgctctaagaggagccggtttgcgagtaggatgactgaggactgtgctgatagctagattttaaacgatccagagtgtgtacgatcagatactaccgtcatcagataacgaggagctcgaaaggtgtggccaatggatcgacgagtcagataaaactcttttgacgaaccgtgaaacccttggcgtgctgtgagatcagatccaggtcgagataatgacccgttcaggctgacgagattgagctgagatagatctatcggggtcgaagagagagagccggctgtgatatcagacaagaaaatggagatgagcttgctttacatcgcttcccataagggactagcttccgttcaaatcaagtttcaagccggccaagatcaaatacaattggatacgaacctctctcgagccgagctctaatggatgagctgaagtcgccatcaaattgggttgagtcctcggccgagaagatactctctgatagtgcaggtgtggacgttctggagatgtccatgtcctctaaccagagctactcggacgtcttgagagatgagctatgagtgatgagagttgagtaaccttgacagagagatcaacagaccgaagatgtttgtccggtgagatgagaatggtccgtgcgccattcgtggttacgaaggtggttactctcacgtgtcatgttgccaggaccaattttactctcagtttgatgtctttcacttcgcacagatggaaaagatgatgaacattgatcatatatcgggatagagcacagagaacaagagcaagaacggtatatgagatgtctgctaaacaagataggaacgagctagacatcctggttcgataaagaaacctgctagtacatttgcaaccatcaagcataactcggtagacctagcccgaaaaagaacgggatagatccatcggtgagcagcagcgaccaagacactgactatagtcttcccttctcagaacgagacgtggaaagacccaaagccctccgaagcccaaaacggacgtcggaaaggtcgaggtcaagatgatatccctcgcgtatgactcgaactcgcccaatacccagcctggaagagctgggggtagatcttgtgcagtcacgacgtctgatctccagccgagactgatgaccagatgagaactgcaaagggttctaccatgagtgaggacttaagaaacgaggggaggaaagtaaggtatgaagagtggaaaatggttacaagcaatatatagaaggaaaacaatagcagaaacttgggaggacacaaggcccgatcaggtcaatagtcagtaggttctatacatctctaacttcacaacttggtatggtgaaggaggagaacactaggagactggagtggtgagtgaaagggtaaaacgaatgaaagagaaaaaaacgaaaggggcctggtaattatagagaatttcatttttgaatttgtaataatcataaaccttatatgatttacaccggttacacttgcgtgcctctcgcgctgagcaggtttcccctcgaacggcctgcatctcgctacccataccattttcccttctcatcgacatcagccatcagcctttctttcttgaacatatcctatccagttatccaaagatggtatgttccttcgttgtggaccttcttcctgctttcagaacaaatagtggatgtctcaagaagaagaatcccgagattgtctgagtctgatcgattgccttttccttgttgcaacccatcttcttattcatcggaccttgcctttgtgatcatactcgaccttttcgtctgctttcaaacatatcaacagaacgaagaagatcatcaaccgatcgctggaccttctaccgtagaagagtcacttccgatggaggttgataactcgaatccaaccatcaaagatcgtcagtcctttttttctttaccaagttatattccttcttttcgtgttgttgctcgcttggcaaggttagatggcaaggttgagaaagcggggagcttagcagatggcagacatggataccaaaatctgtagctggctagaccaatcagtctatcaagattgtggatatagcagatgctacacttgtgcccattcatctgattatcgttggcagacgatgcccacatcattctatctattctcctgtttgagatcacactgcctcttgagatgaatgaggttggaagtctagtgattcgaaacgacttctttttgccgatcatacatcatgtcgaaaaatatcatttgacagaacgactgcttatcatcattgtttgtacttgtatctatttcccgacatggcccttcgacttcatctctatcgttcattatttaatacagatgaggcgttcgccgccaaacacatgcctgacctcggtcaagagattgaggattttcaggtccaaacatggcgtgtatccaactggagcactctctcgaagcgattgagtggagcggactttgcctgtggtggccacaaatggtatgtacctcatctgagaagacccagtattaactttgtacaacatgctgacagatagtcgtctctcgattggaacaggcgtatacttatatttcctcaaggaaatgccaacgggcagccaaacgatatggtctctgtttatctagattacgccaacccaaaatcatcaccagaaggatggcacgcatgtgctcagttcgccctagcgatatccaatcctaacgatccgtccattttcactgtctcacgtaaatatttttgtcaatcttcgcatatcgtcacaaaaagcttattccactgttctgtttttcgggcttggtgatgtgtagacgcccaccatcgatttgtagcggaggagtgtgactggggatttacaaggtttgtagatctccgaaaactgcattcaacacaggaaggccatgcccgaccgacaatcgaaggagatgaggtggacgtgacagcttttgtcagggtgttgaaggatccgaccggagtgttatggcataactttgtcaagtgagtggatttgaccgacggctaagagcaagtgtaattgggtgaccaccaacagcctgctgatgctctttgttcaaacttgctatgatcaatacgtgtgctgggtgggtgcagctatgactctaaaaagtttacaggctatgtaggacttaagaaccagggtgctacgtgctacatgaattcgttattgcaatcgttattcttcacatcatacttccgtagagttcgtcctcttttctttgagaactttttctttcttgggactgctgcctctctttcacaaaacgatgtactgatagcctacctcttttcgttgtatttccgctcttgtgtacgattacattttcgaacaggcggtttatcaaataccaacagaagacgacacgccgagtgaaagtgtggcactcgccttgcagagagtattctatcacctacagacttctgatcagcccgttggttcgtattcattcccttatcattttaccaatttgtgatgtcaacgtccattctgacgcccaatactgactttccttgagacacataggcaccaacgaattgacaaggtcctttgggtggaagtctctagattcgttcatgcaacatgacgttcaagaattcaaccgggtgctacaggacaagctagagacgaagatgaaggtgaattttttctttccttattgcatatgcgaccagagtataccggaagtgtaggtggcttatcggatggattttctgtcgggccttatccagggaacggatgccgagggagctattcaaagactatttgttggaaagatgaaaagttatatcaagtgtgtgaatgtggattatgagtcagctaggtcggaagacttttacggtatgtcgacacgtcttccaatttacttcacgctttgttatcagggtcttgtatttatcttcaaacttggactattacgcggacagatattcaacttaacgtcaagggtcttaaaaaccttcacgagtccttcaaagattatgttgctgttgagacgctagatggggagaacagataccaggccgagggacatggattgcaagacgcacgaaagggagtcatttttgagtctttccctccagtgctgcatctccagttgaagagatttgaatatgatattcaaagagataccatggtcaaggttcgtctcggaactacctgctttactgtattttctctttcggcacccttgactcaacgttcaacccctctatccatttgtttgttttcatctggcgtatatcatccagctaaacgatcgtcacgagttcccctacgagattgatttgggacaataccttgatgagaacgcagaccgatcgcgcagtcacgtctacaagctccacggtgttctcgtacacgcaggtgacctccacggtgggcactactttgcactcatcaaacccgagaaggacggaaagtggttcaagtacgacgatgacagggtcactcctgtgaccgataaggaagtcctcgaggataactacggaggagaaatcttaacgcctgcaaatgtcaacttgccccgaaacgcggccaggccagcgaagagatttatcaacgcgtatatgctggtctatatccgagagggtgacattgatgaggtgttgaagccgttcgaggaggctgatacgccatcccatctgaagaagaggttggaagaagagaagctccagctagagtctaggaagagagagaaggaagatcagcatctctacttgagcgctaaggttcgttgagtgtgcattcgtctttcttgaagtagagacctttcttgttccctcgatggtcttttcttttaatcactgcaacttttgccttggctaactatttgatatatatatattaaatcaatagatcattacagacgactcgttcaagaaacatcaaggtttcgatttggccactttcgaagacaaaaacatacctctctctgatctcgatacattccgtgttctcaagaccgagccctacaaacagttcaagcagcgcgtcagtcagcactacggttatcctgaaagtcaattccgactctgggtgctcgttaacaggcaaaacaagacggttcgaccggattcgccgatcgaagacatggaccagatgcaaacaatggaaaacatccgaaatcagatggccaaccgagcgaatgatcttcgactgtacttggactttgagcccgatgcggaaaagagtcttcaggtcaatcacaacacccacagtatgattttcctcaagcagtttgatctgcagggtcaaaccttaaccggcgcgcacaagctctatgtgaaccgaaactccaaggttggagacctgattccagttatccaacgactgatgatgtggtcgcccaacacacctataaagctgtatgaggagatcaagccggggatgattgagcctatgaagttcaagaacacgtttgcgatcagtgagatccaggatggtgatattatctgtttccaggtggactaccatgatcgagagcaagaagtcgccaacaactcgattgcgaacgctcctgcgttctacgagttccttcaaaaccggatcctggtccgattccagcccaaaaacggcgatagcgaccccaaggccatgttcgagacgatactcactcgaaagatgacctacgatatgatggccacgaaggtaggagagtaccttgagcatgatcctatcaagcttcggttcacttcgcccaacggaccgaacggtgctcccaagacgatcgtcaagcgcgctctcaatcaatctgtccaggacattgttcactcaacttactctgctccagtgacgatgctctactatgagaagctggatatcagtattgtcgagctcgagaccaagaaatcactcaaggtcatctggacaggcgctctcaataaagaagagggatctttccctttccttctgcccaagaccactacgatcgagtcattgggtgagcaaatcggcaagcaggttaccatgtcggacgatggaagcaagagaattcggttcttcgagatcactaacgtcggccgacggaagccttatgatttctcggagcacacaatgatcggaaacattgacgatgctaccgacgtctatgccgaggaagtacctgtagaagagctcaacatggctgaagacgaaacgttgatctcatgcttccacttctccaaggagccatcgagatggcacggaatccccttccgatttgtgctccggcctggagagaaattctcacagaccaagaagcgacttcaagccaggacaggcgcgaccgataaagattttgcaaagtatcggttcgcattgatcttgaccgatacttctggttacaaacagcccaactacattgaagaccacgacgagatccatcatcacaagttcaccagctctcattatcttggaattgaccatgtggacaagacgggcaggtccaacaggtcgacgatggagaaagctatcgttattcgatgattaatcggtcactcctccatccctcctgtctatctaattcttgtcttctccgtttcttggctggacgtccttgtgaccgttttctatcaagctactgtctccgtagttctttctcatacgttcaaatcaatctgatctatatattttactttgacctctttattcaatctcacagtcaaattacccttgaactcctcttcctcccccttctctttccttattccttcccttatccaaagtcgttcctgctctttttgcctagtaaactctcttctccttcgcataccttgtattacatgcaacttttctttcagcaccagttctgaatgcagaaaatattcccgtcctgaagatacagatagcacaagagagagaataggaagaaaagctttatccagcaatctgtcatcgttaaatcttcatcctgatacaaatgaatcccgtacacccgacttgacaaaagcgtgacccagccgtcccaagacaagacgatccggatgcatcctgcgctatcctcaaccaacccggctcaaagcgttctccttcccactccttcaaggacaaagcctctcttagttacatatccttcccttttctctttcgtgtttcgtcttcgtcagagaccatgagagtcagggacaagaaacgagcgagaaggggagaagtgacggataaaaacgtggaggcggatttaggaagttgagaggaaaagaaagtataggatgagaacagaaaggagaaaggcagaagggaatagacgagcgggagaaagagaagcaaagacgtccaagccctcgtactctccctcgtgcttaaaactctgtgaatccgcccccttggctctggacaactgagtacgcacttcgaccgtcatcttccagcccaatgtccgaagatttgtatagagaacctaaatcattctggcccagctgactcatcctatccgactgtgcaaacccaatggatgaaccgacgattgaaacatcggaagaagtgtacccgtggatatcacttcccgcaatgacactcgccgtatccgcattggaattggtctctcctgcatagaggtcttgagaaatgattgacgaagcgtaggatgaatatgtctggtttccttttcgaccgcctacagctgattgggagaatggaccagcggcggagtgagaggaaaacatggggagaccggagctggtattgtgggttgcttgtgatttgagagattgggcatcggaaggaacgtatgccagcgggtcatgtgttcggtaaaatgctggatcgaatcgactcggaggaggagcggttcgttgcactacacaccaggaaaaaatcagttcttctgagaatcaagccgcactgaagaagaactggactcactacctgtagagccattgctggcgttgttgatgagctctccagtgtgagcatcaaactttcggaactgatccattgccttctctaaggttcgtcgaggcttgctgaactggatcaaactcggctggagattgcttagaggaccttcaaccaagcaagagcgttccttgaaatgggaaagcaaaaagtgccaaagaggatgctggagggattgtgaagtaatgatgaacgtatcagctatctgcaaaagaaaaggagaaccctatgatgaaactgaccttgctgagaactttgggattacccaagatgacgactccgtattttgctcgagtaagcgcgacattcaaccttctcggatcgctcaggaaaccgatgccctggtgttcgttacttctcacacaagacaagatgatgtaatccttctctcttccttggaatgcgtctacactggcgacctcaacttccttatacaactcttttttgagagacccgttgaattgcatatagttgaccacgtaggatcgttgaccttcatagggagtgatgacaccaatttggctaggaaggacgccagacttgaagaatttagtgacaatcttctcgacgttggaagcttccgttctgtgagttatggcgtgcagcaagatatgtcagctaaactcagagggagcaggggcagagacaagaacgaatacaattcctattgatagagaaaaacagacctgtttaagaaagacgttccactggatgaaatttcctctgttcccaagttctggtagaacatcattggcgtatctgccactggccaggggaaatccacgttttttctcaacctctcgggtgcagtcactccattttggagagttccctcgtaaaacatattggatggaaactcggacaggcaagggtgcattcggtattgaacttgaagtcggattggtcggttgccgaggatgattagtcgctcgaagagcgactgggatagaccagcccgagcagctttcttgttcatgatgaccgggccaagttgttgatgatctcccaccaaaacagcctgcttacagcccaacacaagaggaatcatacactctgtagagcaacaaagaagagatttttagggcgaaaatcaacatccagaacatctgccagtaaggtgatggtggaaggatggtactcacctggctctgcagcctgggtagcttcgtcgatcaatactgtcctgaacttgaacttgctcaatcttggatccgccgttcctacacacgtacaacaaatcacatctgccgcgtttaaaatctctttctcacaagctttgactaagaccttatatttcctctcatcgctctgactcaactccccctgggactctttcaacaggattaacttctggagctcggtatgagtctcggcgttggcaacctgttcgtgcaaggtaaggaatgagattggcgagtcaagtgcctctcttgatttggcggtaattcggacgactttgagaccggtagcatgaatcttctcggtcagttggtcgacggcgacattcgacggtgcgcacacgagtacttgtccggggttcatcttggcaaggtggtatacgatcgaggcggaggtcacggtcttaccggttcctggaggaccctatgaacattgatgagatgtcgaatcgatcatccgtgatggttagatttcgacatatgtgacgagcgactgaaggtgagagaaacacaaacctgaatcaaacttaatggcttttgtaaaacactcttcacagcgaacatctgcgaatgattgagctctggcaaaccaggcgcagagaatctaaatttataaatgaataaaaaagagttaccaaaccaaaggatcgatgatcagtctttcggcactccttatacggaatatagaggaggaaacgtaccgcttgggcatctgtgtccttaaaacctggggctccaactcatgacctagaagtttatggtactatgaggtgttgaaacgagtccagttattgtctactcctaaacaaaagcttgagaggaaatggtgaaaggacttacaatatatccgcttacactcctttcatctacagcaaacgttttcatggcgagttgcattcgatcgaacgaagttgacttccagacaaaatcggccgagaacccatgggtgcagtctgtcggaacaccgtctgacctcctcagctccaatccaatctcgtcactgacgtctgtgagagaagtgaaggagaaattgagccacccgtcaatacagtctctataatttctctgctcacacacaaagttcactaactattaggaatcttgatgacatttcctactccgtcccactcgccacttcctttaccaccgctgtagccacctcctccagcgcctccgccgccattcccaaacttgagcctcaattcgtcgcccacggccaaccttacctccccgctctccaacttgggcatattaaaccaagcgactcgcttttggttcaatccgacgtcccatcggacgatgatatcattttgagtttgagactctttgacctttttgtcgtaatcggcctcgattttgacgagagggccaaagatgttctggtattgatacgcgtcttcgtatctgttttattaacattttgtttttagagagaaaagtggacgattgagatcttgcgagaagcagttttatgtgctgcagactcataacgagaaagcaactgacttgagtagaattggttgaggctcctcatctattccagctcggccaatgtcctctagatcagcatttggatcctccttccacatctcctcaagcttgttgatctgatggtatgagatttgtctagcacgaagctgttcctgctccgagggtgtcttgacaagccaggaaagaaaagcgcgatcgtcgatgatagctgaccattgagtggtgtcccagacaatatctttggaagacgtcatggccgcacaaggttgtctacatagtgagaaggatcaaaagtgtgcgtatcaaaatgttgatcgaaggggatatgtcgagtcggacagagaagattattacaagaaaaactcaccgacagagcaacacaaccacggtgtcactcttagccgggatgaatccaagcataaagacgtttttcgatccacagttgtagcattctggagtggtttctcccaagggcgactcagcatggaggatgacctccttatgctttgctcgaacaagatggttgacgatatgcgaggctgaagtcgtccctcgagcgttgcagaaccatttttgacaaatcagacactgtatgatttgaagcagggatgcatgagaagagcgattcacgagattgtagaaagattagcagacgtcataaatgtaaccgctgatgagtgatagaaactcgccttgactacacaagatgggttatggataccacagtagctgagacgaacggaaaacataagattagcgtttgttcaacgcgacagggttttgctaagcaagcgcacatggccgtctataccacgatcggaaaggaacagagacggagggataatctacctgcatgcgtgctcaaccacacctccttctaacttgaggtcttcgagaacaccatcgagatcatcgtcaagctcctgagcagcattggcctgtgcgtgcgtcatgtggtggttgctggagccatggtgatgacttccgttgaaggtctgctgagaaagcgagtggtccgagtaagcggcgtgtggttcgttgttagtggcgtgtgtggttgttgtgaatgatgaatacacggaagccgagtcatctgcaccatactgatcgtgtatacgtagttatggaatagggagaaggcgaaattaagcatcgatcaagacgacgggaaagaaggatagagacaaagaaacggagcaggggaaacgatacctgtgaggcgccatcgaaggcctcgaattgatcctgtgaggtttgagaatggcagagccagcagtgagcgaagcattctctctgaatgtaccacacgatctcatccagcacatgcttaccatgctgtccgatagatctacaacgaatgacggacgatgaacaggtaggatcgatggttgatgaaggtagacgaatctcaagtgtagtgggagccgatgaaaaagaggcacacatctaggtacatattcaggcacaaatctaggcacggggtgatgcgtaaccgcgattcacgtgaccgtcatcaccgactaagaccaacgacttaggtgaaaaacgtcatattttcatgtattttggatctgatggcgtgcccagaatttaacaaacggatgatctcaagtaccatcttgctccttcatcatcatcatctatcacaactatcgtgtatccctggcataggaaaacctggagtacatctcctatagtcatcaagaaagttcagacaagtaaggaagccgaaaaaaaataccagggaatcaagccaaagacagcgcaagatgcggctcctctcgtcatccgtccgcgtcgttccctcccaattccgcttactcaccaccacatccgtgaagtcattctcggtcgttcggccgtctgaagctagcgtatcgtcaagaccagcccaaggatttaatccttccttcccctgtgtcgatgctcacgaggcgcgcgcggaaaaactctcgagaaatatctcgcaagagccactccgaacaagtttccccaatagaggtcccttagaagatccaaagggcgaagagcctagttactcggtatgtgttactcctgcgctcctttctgaggtctttcttcatcgaacgtcctaatatttgtgttgacctcacttctccgttgactcgcatacgcattacttccatcttgtatttgctattcattcgctttttgtatgtgcgcaaacacatccacttccactcacataggccccttctccggcaaactaccagacctttcatcaccctggccctttgcctcttacatactctgcaccccttccctcatttgacgtggcgtacgagacatggggaacgctctctcctaagaaagacaacgtcatcctcctccataccggactctctgcttcgtcccatgcggcttcgaccgagttgaatcctgcacccggatggtgggaggctttcatcggcccagggaagacgcttgacaccgacaaattcttcattttatgttgcaacgccctcggtggttgctatggctcgactggcccagcaagccccatgccgggcggccaggacggtgaaaagtgggcgaccagattcccagttgtcagcatattcgacatagttagtctcttcttcactctgtgtgctgttggtcaggacattgctcaccatgacacacatatgaacttttatccaatcaggttcggtctcagttccaccttttggaccatctaggtatagacaagatctatgcctcggtaggcgctagtatggggggcatgcaatccattgctgccggccacctctttcctgaaagggttcgtaagtttccctctgtttgatcagcgccgtagaatgtttatcaacaaaatcctccttacttgcgcacatgaacgtactttttttttctctcgacgtataggttggaaggattgtctctatctcgggatctgctcgatctggtctcacaggagttgctctcaggtttgctcaacgaagtggtgagcttttcctctcctttgcagttcatctgttctagtcgactttcattcgttgggcctaatggcaatttgtcttgtccgtgtttcgtatttgaatcagtcttgatggctgatccgaactggaacaaaggattttactacgatggccttccacctcacgcggggatgaaactcgctcgacgtgaattctgttccttcctctagaaaatctatgcatcccctaagacgagaatttgtcactcacttctatgctatatgattctctcttccctggttcgcgatagaaattgcgactatcacctacagatccggccccgaatgggaacagcgatttggccgtcgaatgcgttcacaacaacctgacaaagacgggtcaaatccacttcgagtgccggccttgtgtccagatttcttgatcgaaacctacttagatcaccaggtaagattttgtcttcgatttgttttcctactcagatactggtcgtcttaaatatattgcgcctcaaacgactcttgccggaacaaacagggagaacaatggtgtctaaagtacgatgcaaactcgttcatctacgtgtccaaagcgatggatctatttgatatgacagcctcctctctcgccgatcttcaatctcgacgagatcaactggatgccgagttcccaagttccacgcctgcttctagctcgaccttgccttctgatccatctcagactgacggacctcaaacgccgccactcacgacgtcatacgctccattcttggacgatctagctgctgggctgaagaatttgaaggatatcccgaccttggttcttggcgttcagagcgatattctcttccccgtcgatcagcaaagggatttcgcagaggctttaaggagagcaggaaattcgaaggtcgcttactttgagctcggaggtgtttgggggtaagttgatctccatccatcttaggggattgctatataatactgacgaatcaataatcggctctccacttgattctcactttctctacctcgatccacagtcatgatacttttttgattgacaagacgaatgttggcggtgctcttcgaggcttccttgcctaaaatatgtagcctgacgtccggagatctggaacactgttcgagtccgatgtgtttgctcacctggttgcctgtatatttgttcatctgtttgtttgcgcgcacgatatgtaccatacagtgctgagagaaagaaggtgattcataacgacacaaaatgaaatgagacgaaatgaatagagtgaatggcgaaacaatctctcggccgataagcatgattaaactccccacgcgtgcccactcacgcgcattgtgttccgcgtggtccaaagaaaaaataggtagcgaaatgagagttgtttcacctcccttcctatctatcatccaccctttctacatccatataccgagatgagatttcttagaccgcagaaactcgtcccactcttacttctacctctgcttgcctcagcttctgcgccgatcgctgcacaggacacctcagctgtgtctgcacctccctctaaaggcatagtagtgcaagctgtggatgctttggccgacatcgtctactctaccatcggactcgatctcaaaggcgtcaaggtcaaactggcagaagaagctgtgaaggcggtggagaatgataagatcgagggcatgatcaggttgacggatgagaattacgatgagctcgtcgaatttgaggatctcacttccgaagaagaggaagatagagtgtggtgtgtgcttatgtgagtctttgccttctctcacttgctcttcgacgtttccgtctccatctcggctagcaggacatgttttgcatttggtattgactgtttcctctcttctccttttctcgtttgcccaaatcaagacatggggcaaagacagattcgttgagcgagatgttctggaaagctcacttgggagccaagaatgttagccttggagatcctcatgagctcgatcgtgtcaagtttgccagaatagattacctgaacgtgacaagtgtcttgactcggtggaacgtttggaagtgagtagacttgtcaacccatctatttcgccctcttgttcaaacacttctacgacgagcctgactgatcgttttcctttttcgtgcgatgaagaccaccctacatcgtcttcgtgtctgaccgaggacaaactcttcggttcctcggtccaagatcgatccgacccgaaggtgaactcctcagagaagttcttgtcaatgatgactggaaaaaagcccccgtttgggaatctgaatgggctcctaaaggatcccggtgcgatctcatattcccttcttatctttctgtctttatctgtttcgtgtttatccctcatagctaatgcaagttggagtttccaaaaatccgcgcatgtgcatcgctcatgttactacagaggtgaatttatgcgctcttttgggtactacttcgccatttggaacactctcgcttccagaatccctagatttggttgggtgatgttatccggtttggtatcacagtctatccttaggtttatgcaccgaaacgaccctccagctgtgcctaagaaggtgcgatgttctgattgtctctttctcgtttgacaaccaattgacattcgaggaggggcatttcttcttcttcttcttttcctgtcccctgattccaaaagatcgtggagcctgtggcgccagccgcttctgataaagcgaaagctatagcagatgccgtccgaaaacgtgcttcggaaaaagcaaagcccgaggatgacaagtctcagccacaacccgaggggttcgttcctttttcttcttttccttattatatgacatctttgtcgcgctttgttcgttcttcttatgtttttaatatatttctttcgcgttcgtgcgcattcgctttgaacgctaccaatcagagttagaacgagaagcgcagctgctcgcaagtagatcagtgacaaaaaacagggcttatgattctaggaaaacaaaaggaggaggagggggatgagaatgcatagatgagaagatggtccttcttgatttgggtagatagatgagaaacatgattttctgttatctgtctctttctcttcctttttttttttttaaaaaaaatgttgtatatggtttcacctcctcctttccagatttaatgggtttcgtcgtctcaagcgtgtatatactatgtttttacgtcagttggggacatggttcacacgcataatatgagaggagtataaatgatgaacagtgatggtgatgttaatttcattatttcatttcttctgttctccctctagcccttacagatcctcacttgctccagccccatagacacctgtcggctggacatacggcttcgcaggccttcccctctgcatattcggtggaaggttctttggtgttggtgcgacataggaagaatgaggagcagaggaggtagaaacatcagacgacgtgaaaggaccagtcttggaaggatcgaatagcgggatgtgagtgttgggattggatccccagttgatggtcttggcgggagagtggatgaggtctttaatcctattggtttttgaagtaggacaagagaagaaaagaggcagagtagttgttaggctcgtagacttgaggaaagattgctttcaagcaaatattgtgaacaagaagggcacaaacttgtctccgagcttgatgtttgtccatcggataactctgggatccactcggtattgatcgtctaaagctttcagcgtaatcggcgagcagtcaaactcgaccacaaagtaactattccgtaaggagtaaacccgaatagacagcacaggagatcagtataagggcaagctctctcatttccgcgggacaaaaactgaacaagagaaatcaaagacaggagtgttggactgactctccaacttcatgggtcaccttgtgtcttcgcatcttttcaggcaacgtttgggtaccccaagatttgatcgtccttacatgtcctcctatttagtgagatcaccagataaacatcgcggatttcccatcagaatcccagatgaaacacaaaagaaaggagcaagcgagaccgttagctcatggatgatttaaaggaatcgtatccagtgttctgatgaagacaagagaaaaagggaagaaaggaagaacaaaccgtgctccatgatatgaagagcagtggatctgacaaggtctcgaataggtttctacaaaatcctcagattaatcatacagaatcaaaagagatgggcaaaatcttggttttagctcaggaaatttcctcctaaacgtgaatctgaacttgttatgatataggttatcccatccattctctcttgacgatccctcaagctgccagaccgttgaacgttctgaacgacacccgaacgagatcctgagagggaagaaaagagtctaggcaaaaaaaaaccaatacgaacgtatttatcatagtgagatgcaatggcgacaagctggtagaacggcatgatgtatatcggataggtaatagaagcacacaacagaatggaaggtgaacgtcgtcggtttgatcgtcgtttcgttttctctttgccatttcgaagtcgtctaaggtgtaaccagtgtagccatgatcctacccggttactaaccgctatcgtttagatttgttcaagcccagcaaacctcaagcagactctctgtctctctcctgttctctcctattctctctatccatccacatccatatacacacacgcagaacaactccgttcgattcagagtgcatatacgaataacgtagcatggtcaaacccgctcagtcctccaaggctggaccttctcagtctggcgctatcacatccaaatctagcaacgcgtatctacctacccaagattctgacgacgatgatgactactccggtttggacgacaatgatgaagaagaccccgagttagaagattcggaagaggatgaatttgaggaagatagagctcggactaagggtgttgccgtttgggccgatgatgacgaaggtgacgaggacgttagcgaagaggacgaagaggattacggtcgtcaagacgaagaatccaacggagaaggttatagcgaagatgaagaggagccggtcgagaaacagtcaaaaggaaaaggaaaggataaagaactggcaagtccggaagttctttctcgaatcgttcttgtaccaaaaggctaactgtcacgtttctctacattcatggtacgaatccaatggttggagtaggcccgattacaaaacggcaagtcgaattgttcgaatcggtgtatgctcaataagactaacatttatgctgaacggtctttcgatctatttttgcctctaatcagatctacgcacacttcccttagcgacacttcttaaagcaaaacagtctcttcctaaatccacaggtccggactctgacgaagaagatcaggctcaggcaaaagcggctagagtggccgaagcgcgagagaagttagcggtactcatgagagggaagaatggcggaaagaaccaaacggaggacaagactcaacaaaagaaagaacgtgagaggagagagaaagtgaagagagataacaagcacgcgttcgtcttttcccctcttctctgctggaatcccatcatgattcgagtatagcgactagataactttaccaaaattgaattgcatcaatgattcgtggatgtgtgtacgtgttcctggtattgaataaattcagtcctatggaaatgagttcgaaacgtcaagtctctcgacgaagagacgtcatcgagatcgagaaggtggtccgtcttgtcttatctctcctcccttcgcctgctctacccccttgtctttcctttttggagctccatttttgcttatttggattcttttctctcctcgataggaacgtcgagatcctaggttctcttctctctccggaacggtcgaccctcaccttcacaataaagcgtattcattccttcccgacctgctcactaacgaataccacgatcttcgaatgcaactaaagaccgctcagaaacgattatcttccgtcccccgagcagagcgtgcggcaaaggagagagagatcgaacagatcgagcttgagcttagcagagtccggactagaaaggagaaggacgagagagcaaagagagagagagacgctttgcagaattggaagaaggaagaacgagcgaaacgaggggaaggaaaaggagagtggcacttgaaagattgtcagttcaatttctcgttcatgattgttccctgctctctttttatcccgtccataaccacaaaaacaaactgaatgaatctcctcctttcttccttctttctttcctgatcctgttcgcgtttgtctctcgcttttgacgataaaaagccgagaagaagaggattcttgcggaagcgaaacactcggccctgcttgcccaaggtggtcagttcgccgtcaagaaggcaatcgagaagaagcgcaagaaggacgccgggaaggagaagaaagctcggccgcgtgggctcgggtttggtag

SEQ ID NO: 698 - DNA, 7403 bp, Xanthophyllomyces dendrorhous
ggcgcacctaggaaacgattcggatgtaagaaactatacagaatgactgaaaatccaatatatcacggaaaagagaacgagataggagacagaagagacacaagtttatatcaaaaacaaaaaaagaggaagattgttgtacatcgtacgaaacggatgagaaagaggagagagaaggatgatatgataaatttgaagagatgagatcggcaaccgtctgtgttacacggtgtcgaggggaatgaataatatgagaggatgcagaagagatatcggtcaagctagggtaaggaagagaaaattcatagaaagaagagtgaaaaagaacaaagacgaaaacgaagaggaacaagaacgtaagggagaatgtggaaataacaaagtggagagtgaagagacgtcggacgtcaagattcggagcaaacagttatgtaagaaccaaatcctgggaagatggaaacattaaaaagaaacgccctaggtaagaggcgatgagtcgaggttgtgagatcgaaacacgaagagctgagaaactgagaattagaccaccaggtgaggttgacccacacaaaaagaacagagccaggacaagagggatgacgaaaagaaaaaggcatgaggaaaagaaagggagagaacgttgaatgaatgaaagcaagccttggcgtttaaccgcctcctttcgcgctcaacaagagctcagccgcttcccgatcttcgattccctgcgtttgtttgtctttgatatcttctttggcggtggaaaggattggattcaggcctatacctgattgctccgctgcaggcgagtcaccggctggcaggctctccccgtcttcctctcctctcacgttgccgagatggcttttcggaattgcgccagcctccatcggtctggacgaaaatctgaggggactcgaggctcggggaatgctctgagcgatcacggcgtgatggatgattggggatggattgcctaggagtggagaggtcggttgaagtcccggggttacgtggccggcattgttgccgctactgctagcgttgttgttagggctgttgacagcagtagctgaagtgagaggagatgtgttgacagcagtagctgaagtgagaggagatgtgttgacagtggacatggcgccgagagggctgtatgtgttgccggtagatgaatgggccagcgtaggagagagcgggacttcgggtgaagatgatctaagccttttcggaccgtggccactagacggaagagtctcgtactcggctatcgaagatgtcgacgaagaagcatcaagagtgaccgaggacggataagtaggatgatcaatttctttcgctccttgagcaaggtaaggatacccactggtctctggcacataaacatccaccgaggccggagccgtcgatgacgacaatggcgaatagttaaaggcaggctcaagtggagaagacatgattggagatctgtacggatgatgcaagcttggaagaggcgacaaaggccgttgaatggtcgagtggggcacgagtggagatgtcatgggcgagagcgagttcggccttgtgtagctgggcgtgcccgccaatctcaatccgccaatctgtccatcaagtccagaatccgaagagagatatccactagtgggttgaccgtaagagtctctcccaacataccgttctcgtttcccatacgcattctccgagtccgagaacccgtcgttagccactctgtccgccacgggcgacgtcgccggggaatcacccacctcgggtgtcatatttctcggtgtgtagagcggaagtgagtttgtgcgcatcatgctcgtccctccgtggccgacgggtcggttacctggtctgccgccgttggcatccagaccaatcttgctccagaagtccaaccgaatcgtcttttcaggaaccctgtaccatttacctccactcaacacgtcggttgcttgttctctggtgataacgtctttctcccaatccggccgtcggccccggagtttctccacatcaacctttgtgccagatgccgggggtgtttccgctcggaagatatcaatgctttgagcagatggatggaaccgagatttatgtttggacggaggagccgatctcggccgaggagggggtcgaggaatgtgcgctctcggacgggaatgagaccgactggatgatgtttgagcctcgagagctatctgatgtggtcggcggggggcacgggattgacgttcaaaaccctcgggtatcgcgtggttgtatttgggggacgtctcgagctcggatgaagaagcatcggactcagacggcgcgccaggcccgggtgagtttcgaggtgtccccgcaggagtcgtgtctctcgatgcctgaaggtaaataagacggaaaggagagaaagtctcatctagtcaatattgggtgaaaggaagaatcgactgagatctgatcggtctgttcactcacgccaccgccctctttgttcctaggttttctaccgccaaaatgagaagtaggtcgagattttccatgagtctgaacatatagtccacagctgtgatggtaaaagaggcaggcgaaatgagaacgtgactttgatagttgatgggaggaatagagcgatgaaagcttacgcgttgctaaaaggcagagacaatcggaagtatcacaacagacacaaaggaggtcagggcgttagagcacaaacgactgaggtttgtacttcaacccacttaccacagacgttctttatccaaaccggttcgccacaaggatgtatggttctgatagacatatggatggatggatggatggttcaaaagaaaaggacaaggaaaagaaggaaatttttcagtaaagagttaaagctagtcaaattttcagacaagccacgcttggacttgacagagcatcattcagaccaacctcgtcgacaccacaatttgctgtaggatttgatcggagttttaggaacaatcaacaagggacgcgatcgatggatgacggcaataccaataaaaacaacaacaacagaaaatgagatagacggaacgattttgtagctttcagcccacactaagacgccagaaggatggatacggccaagagaggaagtctatacacgaaccacatgttccgtgtgcgagctttcttttcatctttgaggacatttcttcttagatcagacgatctgagtgaacaggtgtagagagaaagaagatggagggtgaatcggtggaaagtcgggagatgggagaagggaagagagatggagatggtggaaaggctggataaagatcagatcgaaggaaggaagggagggaaagcgaaacgggagagataaatcggtaagacagatgtctaaggtgttgcctggatgtatgcgaatgaaggataaaagtgaggacgggtgaacacggaaacgatcgaatgtcaatcgggagatgtcagcaaataaggccaagaaagatgagaaatcgttcatagacgaaactgataagggcccttgattgattcgccctccgaggagatggccgagatcaagaagagcacaattgttagatggaaagtatcttacctttcagacagcttgatggctgattctgtgctttctctagatggaaagaagagagaaagagagaaacaggaaagagtggaggaagtgaacaggtgtgagacacgttccttgggtacgatttcccttcaggacagatcgacaggattgatgtgtctagggctctgcagattgaatcaagaatgagtcccaatctgttgaaggcgaacggatcgaacggctgatgccggcctggttgttcggtctgtgatatctatgagagatctgggactgaatcgatctatctgctgacgaaaagaaggggagaaacactgatgttgatgggatgattgttggtgtgagagatggtcgaatgggagggaacagagatggccaaagacgcgcgggtctccaggaaaaaatttaagcacgttagggttatgcatcaaactagtcagcctcactatgtgctcaagggtatatatgcacacatgcaatgatacacatctccagatacaaaagctcatacatatctcatatctacaacttgggtttaccctcctcctcagaaggcatatcattcagaccaccaacagggccaagaaactccattcgttccattcgtagtcgaacgcccttccattccatgatgcaccggatggacgtcaagagcgcgtatatctgtttcggcgtggccgaatggttctgggctcctttgaagtgaccctgtagatggatgaggagacaagaaaaagatagaaagatagaaagaaagagaaggagagagaaagaaaatcagaaaatagaagacagagaggcgagcacggcgtttagagcactacttttggtgcgcgacagacgattgactgagtgaaagaagaaacaactgacttttgtctgaggagggagatcggatgcgaaacagagagcgagacagagaagggaggagtccagaggatcttggagaactctggtatctgacaagacgggtgtgtactatagggacgtagaacatgaggacgacgtcaacttggaaaggaatgattacggcgaagactctgaagaggagaacttacaatcaacttgagagcactgtccaccagattagggtgaccccatctcaacgattcgaggactcggcctattccaccatgttcaataatattgcacgatcgctatcaaaatgggatctctaatagagtacacactcttgatgccaacggttcgagagctgagctcacctgcaactttcccatagatgttattgaaaagaattctgcctctggacaccggctcgagaggctgttggttgagagcgttagtgaccggatggggggccagcccatactcccccaacggttcgaaggcagtggggaacgggtgagccgcctcgattcgttcgaccagcggccagatatctgggtggtttttggacagatgggttgagagcgcggtgagtgaggatatggtgagtggaaatccaaccaacgggaaggacttttgtaggtccaaatacaagatggaacaaaatctagttggtcaagcagcgcatatacctatgtacggtctcgagagaaaacgttacctttaacagtgcttccctcgttcgtacggcgaccagtaatttaccaaacatccgtttgtctttgacatcttgaccagctaacgcaacccaatcgggaattttctcttgattaccaacctcgatggctttatcaacaccaacctccaggtggtcacaagcgtcatcgaacagagcaaggatgagctctggttcattcaagctggatagtactgctccgagaaggggaacgaatagagagcgaggggagcacacatccgaatagagtgttctaagatgcgctaacagcgctgggggaaagggacccgaagactgcgacatatgaataaaccgaaagtagcagagatagtttgtatgaaggaaagcgatagggtggtatgaagagggagattagtcgaagcgagtcaatatacagactaaatgacgagtgatgccgtctccacgactggggcgcgaaagtgagcgagtcagaagccggccggatggggacgagcggcaccaggcaattagggaccaggcactatcatatcttgacttcagtctgaggtcaagccgaagcgaggctagagaggcatcccagacgcacagtcgttcactatcttcaggcccgcagtgcgcagtcaaaatgctgttcctgtcccttcggaggctgatccctgccggttggctcctgcccagcctgctgctgcttaattctcccgtcagcgtcgtttcggataaaacatcatcgatcttctcataaaccggatcgtttttattttctttccttctacttcatccttcatccacatccacacatccacttcatatccacatccatccacatcatggaaaagacaccagagggctacttgcccatccctacctcggctgctccgccgtcgtacactcctcagcagccttcatccaagctctcaaagacaaagaagctcgctatccttgcctcggtttcaggaggtttgttctacctcgcgtccaaatgtggcggaggtcacggctttcccgatctctgggatggtgacttcaagaaaggttgggagatcgtcaagcacaagggtgcgaagcaccactgggaggagcaggcttgggagtgggattcctccaaggagcgaggtcacaacagggttcgttctatgccgatgcgttatttctgaccaacctgtccattcactcacacatgtctcgtaatttttcttctcctcttccttacctgacattgactttatcatccacaacacagattcaccatgagaagcttggtacctctgctttgaaactctctgagcctatcaacgatgaattccgccctaatgcgactgtctccctgactgcggccgagtccttctggttgaacttggagtatgtcgctccatctttatcgcgcggcccagtccgttctaactctgttattggttccacttctgttgtatcgtttgttaacaattttgtgcatatgattggtttcctattgtttttcctttttgtgtcactaaccagggatggcgttcaggccgagctccaattcgtcccatccaagggggacgccgtttctttctatgttgagcaggtcttgcaaagctctcaggtcgacgagtccactcttgcatcatacgatgcgttaaaagtcgtcgacgatagcaagaatcctgagaaggccgggttgatcatcgtcagtctatcgtttcccacttggtttgatgtcttcgtcggcactgaacaagatttgttcaattggtttattgacgccgttctacttcgatcccttatttcacctggtacagtcccgaggccagaatgctcagtcttcgccgtcttacatcatctcgatctcccttcctgtgaccggaaagcccttttcgttccacgccgacggaaactccctcgctgttcctgcagccaacttgaagggaattaagttcgatgctttctccctcaccgctggtgtaaccgacaaggtcgagctcaacgaccttcatgccagggaggctactgtggacttgtcctttggagccattgttggttccttcaacgtctcccgagagcttattctcaggactgttgccggagccattcaagccaatgtcaccctctttgagatccctcaccaccaccaccaccacaaacatggaaagcagaacggtactgaatctggtaagtgttttcctcggccagtcgctgtttgatatgttgttgagtattttcctcttttggtgttttccgatctctagaagagttcccttctccccctaaggatggtgagag

SEQ ID NO: 699 - DNA, 1078 bp, Xanthophyllomyces dendrorhous
cctcacttccctcctttcgtcgtcaacgtcgtgaccaccactggcgtcggagcgatcgatcttcagtacgttggtgacatcccttccaatcacactagcctcttgagcaagagtgttgccaggatcggtgaggtgcgagtttctgctcctactggctacaaggggaagtttgttgagggttccaggatcggtgaggtttctgtcggcttcgttcccggagtgaacgtcacgattgagaaggaggtccaccacggacctggaggattcatcaagggtttcgttggtgaccacccttctccccatcacaagcactgccccgaccacccgaagcaccctaagcacccaaagggtgacaagcctgagaagaaggaggccggacatcctcatggacgacctgaggatgagagctacggggccgagaagaggcatcaccacttgcacaagatgcatggcgacgatgatgatgatgatgaggaggacaagcatcgagtccataagcaccaccaccatcacgaggacgacgatgaggaggttcatgatcataaacacaacgatgagaagaagcccaagaagggtcccaagaagcccaaggatcctaagggtcctaagaaggatcaccgaggtcctccccaccctcctcctggttacggctttgtcggcgccttcactggaaccggcaagaccgaggttttctttgcttaattggaaaaaacaaacaaacaatcaaaactctttgtgttgttcctcttttctaggtcgaccttgatttgatcttttctttctttctcttatctattcgatgaccttgcttttctcccttttcctttccattccatccaccggaccgctctcggctctctttcgagtcattctatcggcttgtctgtttgttttcttgttcttttcagaagccaaagaaggaaataatgtgcacctatcctgtttgatttccgctcgcctctccttgcttcaagacggcaacgaaaaaactctttctccttcttacttctctgctatgtattttctttttagctttatgtcggtttaactctacttatttatcatttctgccctgatc

SEQ ID NO: 700 - DNA, 15022 bp, Xanthophyllomyces dendrorhous
tttctgccctgatcttccttttcctttctttccttatatgtagtaaccttttttcttctccccttttatcttatacgtccctttattcacaaactattacttctcttcattttatacgttctcatctacccatttgttttcgtttttaggcctagcaaacacctatatgcaaaggtccttttcgtttcctaattaagaaaaaaaaagaaaagagtggatgcattgctgtggagtctgtcaaccgacttcagagcctttaacgtccatcgagaattccaaagattcattttatgttttgaaatagaacagaaaaattaaagaagagacgtccgtaatgcaatcggctggatcagaagccacaaaggagaaagaaaaggtgataacaatggaaagtagactacaacgacgaggtgatgacaattagaaaagagcgagagcagaagatacgaaaactatgccacgtcatacttaagcggctgtttcagagttcagcgcagtgaagaagttgaaaaaatcgacctgagaggcattgatacccgatcggtagaggtgatgggaagcaatataggccgagtagagcgctctgcagtactcgtcaggtagccgctggagcaacgtgtcgagtccgactttgtcgaccaaagtcttggggatggcctttcggaagacgtttcgtctactcgtctcaagattgtacagaccatggctttcttcaagctcgacttgaagagcattcaatgtgcttgaaagttcatcgctgagcaacgttcgaggaacggttgatttctttatatgaccaagagaatgagaaaggtggttcatcagccggatttatgaattcatacagaacaagttggagcctcatacgtacgcgtcgcttgtactcgtcctgaatacacgcgtgctcaagtcggccgttctcacagatcatatcttggatctgaaaagaggagaagacacagcacagaccgtcagtcaaggttctataatataggccgaaacgcaactaaaaaactcacgtctttgacgtagctcttatagaaatcggattttccgttcttgcaaagcatgagctccaagctgttgataaagaaaaataacaaaggataagcaaactggcaatagagcagagaagataacgagaaggcagtacttactattcctcgtcagaaagtcccaaaccagctaacacctcgagggaagaagatgtaacaccaccctaagaatacaaaaacaagcattagctccgaagcgtttaaacaattagtatgttcaggaagaaaaaaactaaccttattagcggaagaatctttatacaatacgactcctttcttctcgaggtgcagtcgggcttgctgagtgaagaacaggttggctccctcgacaacagccttgaagtggggcttgccatccgcatcgaagagcttggatacgttagtgacgctgtatgagagaagaatgttcatctatcagtcccacaggtcttgcagagacataacaagagagaagcactgacttaacagactcaggctaagaggaaggtaaatatttcgtcagtctagattctgaatgatcggaagggaagataagataagatatccgacttactcgtcctccgcaaggcacaaagatatcagccttgaatcgaaggtgagcgccattccggaatgtggtaccatcggccactttctctccagagggaaggacaacatcggtatcgtcgattaaaatcttgtatccctcgggacccaaaagatcgctgttgaagttctcgacgggaattcgagccttagcaagtcgaataagctcactgtagacaatgcggattgatttgtgatcagtactagacaggcgcatcggacaaggaaaaggcaaaaaggtcacaaacgttcggtttaaaccggaaggatcatggatgacaccagatccatcaataatggcgatcgtcttgtcattcgacagaagaatctcgttagaacccaagtcaccgtcaggtcctccagtttggaactaagcgagcagatagtaacagaacgacaataagactctcaactttcatcttgaggcgaaggtgcgcctacttgccttagtgacgtctttctctttccatcctagagtagcatagacaccaaggatgtactgtcgaacagacagagaggtctacagagaaaaaaaatccgacagtcacatctcagtaatagatatcaaatacttaacacaagcggagactagaggaacttaccattccgtactcatcatgaggaataccaccgaatgcctcaggtcctttaccagtagtgaaagacttccagaacgaggcccctcgggatcgggcgtgtccagcggcccagtccatcatatcggccgttccctcatcgggtccaaagaagagaatctcgggcttgccgtaaaggtcgacgatggggcccttgattcctggagtctttccagggagcaacaggtcgagaatggcatcaacatagtgctcgaaacagactcgagggttggctcccaaggaaggcaggatggttcctttggctcctccctcagggatgtccttgttcttaagatgttgtgtcgaagcaagtccatagtctggtttggaggaaaaaagggttcagttattgcgagttaaagataacaagactgcggaactcactctcatcaaagagacttcgagcattgatagagtactgctctcggcctcgggatcgaacgatacgaatacctcctcgggaaacatctcggaatcgaacatgctacaacaaacgatgcagataacggagaatgagcagtcttcaaaccgatcaaagtgcggaccaccggcaacttacgaaacccctgaagtcggatccaacaaccaagatgataccgaaaggagtcttggggtactcgaccttaggaaggaaagcggggtccaacctgaaactcagagccaccttggtggtctggtaaaagttagctgtacatgccggagagatggtttacttcttgtcagtcggtatggtcaatgcaccaggtggtacgtcaacatatagactcactcttaaggacgtgtttattgaagatcaagaaactatccgaatgccaataggacgtatcagaattgctcatctgaagggctggtaagtagagaacacttacgcctcgatgacctggatgtcgtgcgagttggtcaaagtctttcgaatcttgttgtagagttcctcatcggtcagaggtcgctcggtcttcaacctctgataactcagagtaggcctaagaaaacacgtgtcagccaaagcctcagtcaagacgagataatgattttaaactcacatgagagacgagttctcatcaacttcgggataatgcgtcatggcaaagttaatgtacaacaatcggatctgaagatcgtcaagatagaacaaatcaataggaatcgccaattctcaaatatcgagatgaacatgtccgacttacgagctgagggttggttgagatcacgtccttgatggactctcgagtgaaagtttcttctcggaaccgagtcttgatgttattcagactgtatgaagaaagcgtaaaaaatcaggatacatcagtagctatgcgatatcgcttttcaaagagtcacttacacttcagcgtggacagggttgctctcatccaaaattgacttaagagatatatagctaaggtagacataagcgaaaagaacacagtgagccggatgaactttgagaaataataccaggagaggagacgaccgacctgttacccaatcggttgcagaaatgctgagcgaagatccatccagcgtaagcataggaagcctcttgaacggcatgcccactctgttcggatcctccgaagaaagggttatcagggagagagtagagcagtgaagtctccttgataacttggtggatagaatgctcgataggaggggcatttgaattgggcacgtttcgaaggtagaggccttttacgattgtaaaaaaaagtaccgcatgagcgtgaggttgttcggttcgaccagagacgcaatattggacagatacgcacagattacagtgacaccgttgctgaactgctcgacatacttcctggttgagctgtttatttaaagtgggaagatcaatcaaaatatacacagacagcttatgagaagattgaaggaggcttacaagagaccgtagaagtgataaagatctgaaagcgcgctatggaagttgttggtacctcccatctatggcgagaaggaagaagaggagcaagacgataaaattagcctacgaataaccaagctaatggataagaaaatgacagataatcaaaccttggcaccgatgacaacccgcatctctccagtgccctcaacatcgtagacctcgataacgggagcaaaacctcgcttctcgacctcaaagattacgctctcgtagatctccttggtatttcccgaggccttctctaagaaagccggatctgagatctgatcgatcgttcgcttcttggtatactcaacatgctcctgaggcgagagatctgttggggggttgtaggccgggagattcgaccgagagacaaagtagcatcggacggattgcgttgttgatgcagagactgagccggaagatcgatatgtttccaatcgataggccttgtctattgttgatgaattaagatagagctcatcgattctagtttgcaacaaatttcgaaaaatagataaaacgagataaaataaaatcaacaaagatagacaacagataaggtgtgagtgatcggtacataatcattggaaagacactcagaagacaggaagggctgatttacctcttctccacagttgctccaggaccggaagtactggtaaccccggcttcagaggtgtgaatgaagatggcgcctaagagagaattagacgataaacatacaaccaacccatataagcgcccaaatcttcttgcatgcgatggagggaagtctaagtcaaaagatcatgcaaacttgccttccttttttccttcttcttcaggctggattcgttcgagatcaatctcgagcttggcagccgagtgctttgtgtaggccagaatctttgctccgtacagggccataatatgttcggcgatgagtgccggggtttcgttcatgaagtaggtgtcatcgatccccaagttcctaatgagatcaaagcatatcccaggtaaatacgttgtcaagactacgtcttgatgtgatgtactttattctcaaaaagagaacatgtatatggatcagaacatacaggtagaaccagttgacctcattcttgacgagatcagcaggaaggaatccttggctggcgacgaccttttccacctcgacctgctgggcggccttgccagcgtagacagagtccttgtaaccgacggtatcttttcgaattctgccagcatcaagagggaagtaaaaacatatgcgctaagtggttgaaacccataggaaaggagaaaaacgggcaccaggaacaggtcgagtacgagacagatagatgcatacctgtggatgttatcgctcgatggcgttctggacgccgcggtgaagtctccgaggacttgcctcacgttgagatgagcagcagacatagtgtggagagagagagtgcggaaggagagtttgtgtaaagggagagatgcctaattgaaggaggtggcgatatcgatggtgggtgatcaggaaagaagaagaagaacagaagaaagagagatagaactcagcccaagctcaacgaaaggaaccaagaagcagcccaagggcaaagtgatgtgtgcgctcaaagcgtgaaagacaaacaaggcacgaggcaccagacgagaggttcgcgcaaaagtcaaagggggccccttgcgcgtaaaagagttgggcgagcccatttcggtcgctcaacccagtcccaggcagaacgacgatactcaatcaatctctgcctctcgttgttgtttggttttattttaataatatactctgtccattcagactcgggattaagcaatatcatattgggtttgggcaccaatgcatgcgctatgtatttacacacacacacacatacacgcacttacactcgaccggccgacaaggcatgatctgctgcatagtgaatgatgatgacaaaaaggctcggaagttgtgtatgcgtaccgtataagttatcgacgatgagtcaggtgcttgcttatgtttgctctttttagttggttgatatcaatattatggtatcaagggaaatggacaagagagtaagaggatagatttgtgttcggagggatacaagttcaaacgggttatacgatatggagtgggtaagcgatcgcggaaataggacaagagagaagcaaaagcaacaagaacatgttccttatataggcagacactctcttcgaccacaaggtttgtcactttgagcagtcttcaccggtttgcacatcacataaggtcatgctcccagtaaagatatttagagaaagagcaggaggtgatgatggcaaatacgagtgagaccgacgtgttgttaggtcattcaaagcatttcttggttgcttgcttgtatgtttcgttccttatttttttcgatatttcgaatagagtcaacagtgggaaataaatcattggggtgtgaccatgggtgagatgactatgactaggtgagtgagtgtgcttgtgtgaccatggcgcgggaaaacccccacaggctcatcggatttagccgcttctactctgtcgcatctccttctttgactcggctctacctggcacctctgagtggtcgacgacaaagacatcattctacttctgttctgtttttttatttctctaaaaagggccacggctcatacacagttgactatactgttcactctaccccttcttgcgcttacgacgttcctcaattcgagacatctcctctttgccgtagtctaccatcaatgctactttcttgcatgcccccaagttggcaagtctctgtaggaagagaaagagagaggggacggatcaatataaataagagtgcagactcggaaacaaaacactcacatcagccgcctcgttcccatcttctccagaatgacctttgacccatctgaatctgaccgcgccctgtctgagtccccatccgcgttcatatctgaccccttcttcctcatccgtctcggcatcgatttcgacctctggtttgacaaatggatcgcgtcgactgcatcgttcgaccacctctgcaaacgccccgactgtcagctcggactctggccgtcgtcgctgccgtctggccaagagaagtctctcgatatgaataatcagatccaagttcttgacctgttcatcggacgccgttcgaaactctcgtcttcgccaattcggtaaccatgtggtgagcgcgtcgatcgagtatttagaatctgttcgaatttctaggggcgagtccggcccaggcgcgctttcgagagcgagtagaatcgagagtagttctccgcggttatttgtctgttccggtcccggaacgcgtcgagagatgtttctattaagaagagtgtgcgcatgaaggaaaagggcagaatagcgatattagcgcgggtatacagggaaaaccaggaataaaactattacgtacagatcagtgttggagctccagaacactccagatccagcgaaagctcctcgctgaccatttttgaccgcgctaccgtccgtgtataccactactctcccactcgggagtcttctgaacccatcatctccctgaacgatcggaagcttcatctgttgtctagacgataaattggcagtcttctggttgataatcttcgcgttcatacctgattctgtgttcgatcgtttgcttgcaggtaaagatacgtcctccatcaacgaatggtctcgtttcgttccggttgccacaggcagtgaggcaatggtaccatcagcagcagcatcatgagctccagagattacgaacgcattcgcctccgatcgtgagtcaagctttctatagatagcctcagagaatcctttggcctgtttcaaacactcagccctagatgtgtaaaggtcagagaagaggaaaaagagattccttgtagtcaataatttttgtcttcgagccaaagtaatatcagagtcaagaccaaacgaagtagagactaaactagaacggaccatgtgctgtatacacctggttgatgccccctttgaacggcatagaatgcttcagaagaaacaccaataccagttctggctttctttgggagggcaggaacgggggctggatctgtcgagattcttacctctatcagtcctacgaacctttctgcctctattcgtgtagcaaattttttgaaggcaggattgggataccgatcggtctggtttttgcattcatcccttttgtggctcgttcgaattagaagaagaaagagctcgatcagccaccaatgttttcctctcatcaacaacctggatattgaagctcaaaggtgttaaccctaacagaccactcaccaggtgaggtatataccaggaatccgtcctctccttacagcatagtatcctcccttggccctaagagaaaggaggaagttgaatgctaagtgagaagaacagtcttgaagtttgacaagcttacaacgggcaagatgacaatttcgaatcgaagaacttacatggtggtcgttcaatgattgtctgatggaaagaaacttgatgcgtcttaaaaacatagcgcatctctcaacgttcatctattccttcgttttctccttagtattcaagtcttttctcacactctctggcttcttcgtgttcaaaatgatatgaccacaacttgagttcacaatttgatggttaagatgtgccatacaaacccaaactagagaaagatgcctaacaatcatgtagaaatcaaatcgtatccgacttcttacatcagtcactcgtccttcttgaccttctttttcttcttcttcttctcttcaccgccaagttctggctctccagctgatgccaccgcagcttttctctttttgctgttcgccgtctcagtctcgccgtcggcctcagcctcgcccgccgtgctgtccatcacggctacctgatcttcatctccaaccgttactaaggccgaaggagaaacctcaggctggagagccaattcggttccgtaaccagaaggcttgtttcggaacttcaacttctcggtaggttgaaccctaggaggaaccacccgaggagtatacaatgtggatggaccgacagaggccggttgaatcgtggtagagtggtgagacgttgtgattagggatgacgaggccagaggagcgagcactaaagatttcttgatgggtctaggtgctagaggtgatccgaaagagtgaaaaaggcagagaagagaagcgaatgagactgaagatcagcgagttgcacaaaaaggcctatagcaaatgtgcattcataacaaagaagccccacgtacccacgacatatgcttccttgcttttactaggaagaagaacctttagactagcgagttcttcagcggtccctcctagcgcactagcaccttgcaccacataatcggccgtcttggtactcaacgatccggtaggttccttgttgaccgacgaggaaaggttaatcgtcaacccagacaaatggcgagacttgatctaacaacattacgagcaaaccgggtttgaaaaatagagaacgaaagaacaaggagacttggttaacagttgaaaaacgcagaggactaaaccgaatgatacgaacagagtcagggattcggatagcccaaagttcgagattcggattcgctagtagtcgatcataatcgaactgagacgaagcttccgagatcttgacaggtcgcatctttcgtggaggcgcgtagtttctgagcaaatagagaatacaatgggcaggacgagagcatgatataggacaggagtagaaccgcagacgatgaatatatagatacaaagggtgggtagtcagcgttgtagaatcgtattagtgagattatctagctctgttcggagatgacatcctgattcattcaagaatcaagcaattaaataaaaacaagcttgacagactcacagagcgtttgtagtacccagtctcctatctggtccactggcaatctcgtcctcgctcatagaatcatccgaaccagaatcgtctgatccgggcgcggccttgcctttgccctttttatcacctttggatgaagcagcagccgaagacatcgacttagtaggcctctcgtcgatctttgaggaagaatccgagtcggaggaactgtcagacatagtgagagggaggcaaagaattgaagctcgatggtgattgatgtatagaagttggccgaaaggagtcgaggcaaaaaatcaatccacgaaccaccgtaacctcacaagtgtaactatgtcatacctgtaaccgactgtgcctcaaccggccatgtcgaccataaaccccatctctcaccttcactctctacacacacactcagagaaaccaccatagcatatacccaccggttttctaaatccaaacaggtctttctcaatatctataggtgcatccgtcatctgagtcttatcagacaactatgtttgcggaagaagatgaaaacccgttcgccaatgcggtctctcctttcggcacctcatccgtctttcaacctacttcactagccataccgaatgatattgcaaccacttcctcggcaacagccatcctctcgtctgtcaactacggccctcctctcgatacacctatcctgagtcctacagaggagcgcgtgaatccttatgtccaagctattcaatacgccaaagaggatgatgcactcgggaatacttctgtaccttctatgaacgacccaccatctggccgagccgttgaggatcctatggacggaacgcatgggacagtgtttggagatgcaagtggctcaggcggaggatttcaggtcgctcctccttcagagtccttcaaattccttgatctgaatctcaagatggaaggatccgctcaagaaacgatccttcctactcaggatgaaagataccaacatacaccgtcctctcagccccctaccttctccgtagatccttatgataactctcaggacccttactccttatttggttcttcctcatctccatatacatctacatctgctgtctcatctgaatttgctattgcgccccctctctcttcacttccggcttctcctttggcgccgaaacacatgcggaaggattcattcgatccgcttgcggcaatcctaggagaatcggaagaggttaagatgaagtccgcattcaaaaggagctcaaacacgacgagttcaccttctcgctctacatcattgaagaagaaggaaactcttatagtcaagaaagaggttgaggatgaggacgacccgtttgcatcactcatcaaaaacaagaagcgcaattcaaaaccttccggctcaaagcccaattctgctcccagtaacactgtatcttccgctgctcctttgcctcggcctgtacctaataaagctcctaagatctcttccttgatacccgccgatgatgatacctctccgaagccctcttccagttctattcaaacacacagtacagaggcacttagcggaaaagaagattccggcttgacgcctaaagctacaacgaccgagttgccaatctcttcatcttccattaacctctccgaagtatctacactcactaaagaagactccttgttggctgtcatcccagcagagattgcccttccagaatctcgagcatcaactcctcctccacatgaaccaatcatcgctccttctcctccgattgcttctcagttcaatcacgaacctgcgatggcttctcctcttcagccggcatacccatcaaccttccaattagttcactcttccaattcttcagcctcatcttcctcttcacacagtacctatacccccacaccacctcatattgaacgatcgctctcgagcataacgctgcctccgccgggaatgaccgatccgaacccagatagagggtggtcaaaagatgaagactctacatctgacgcttggggcgatgggactgtgaatcaagttaataatggaccagagtcttatgaggagaacagaaaggtaagaagggaggctagcaacgtagctcttaggggaacaggagacaacggaagtttctttagtggaatggagagggacgatgaagaagaggtttgtctatcaaacatcttgattatcatctatccagacagttccttcatgtacatggcccttgctccagcgctcatcaagtttgccatttcattgtgattgatttcctttcttcctaccatccaatagactgaaaccaatcaatccggggaagacgttaccttcacttcgacccttctaactgacgacacacaggacactgcatctgcgacatcatttagagagtcggcagccaaggcggtcaaaatcatggacatcaaagttggggatcctactaagaaaggaattggggctgcaggccatatagtttataccgttactactcgggtgaggcaacaggctttatcgtctcttcacaatcgctacttgaaggagttcagtttttgatcgttcaacctcttatcctcattcttctcagcatctgataagaggaggagagacttctgtcctccgtcgattctcagattttttgtggttgtttggcgcattgcagaataacaacccaggagtagtagtccctcctgtcccagataagcatccctttggtaagctcagtcctttgtctagcatcttctattagattcatggcagacagagtggtagcttacgttatgtctgctggtcaacatcgtcattctcacgttaaaattcgaatcgacatgataggccggtttgccgaagaattcgttgaaacaagacgaaatgcattggaaaaatgtatacaaaagatggcaaaccacccagttctgcaactcgacgcagacttcaggacctttttagaaagtgattccctaacgcatcacgtatgtaatttctttgtgactcatatgcttgatatatactatcgaccagtctaagcatatctgttagtttcgttacatgtatatgtggtctaacatagctttttctgatgatttcataggtgaagagcaagaaagccgaacaggtcacagagcagaagggatatctcgcgaccctgacgagtggtttggctggtcccaaatttcatgagagagatgaggtagtttctttgtctttaatcacctatgaggtgtacatctgaaggcaaaagagggactgacatcaaatccttacgtttcttctcctctcttccttcttcagtggtttgatgataagaagtctgttctggagacgttggagtctcagctaaaagcactggttaaatccatcgagcttgtttcaaagcaacgattaggttcgtacgaaattcttgccttcgaataaccacaatcaagcagctgacttatctgttgtctatacggattaaccagacatggcgaccgctgtctcagagtttgcagataccgtttcgggtttggccgtttgcgatttgagccagcagctgtcccatgctttggaaaggtttgcggatattggaaggagagtccgagatcttcaagaagagaacgccaaaggagatgtcgtaaccttcatgacgacttgtaagtcttcattaatatatgatcaaggaaataggatgcctcgatgaacatagtcttacgtatctgtcgagttcatttcttgataaatacagcggatgaatacattcgactgatcgcttctgtccgagtaagtctattcgctatctataccatagagtccatttagttgatgccatttccaatctatcaagcttgcgttcgcctctcgtatcaaactttactttcatcatcaaaacttggagagtgaacttcggcgacttcgatcggcatttgagaaagctcgtcgggctggaaaggcgtatgagcgagggcctgaggcacagggtctggccgaggtcagtggctttgttttcacttatatattctgatttgtttcctcttcgaaatcggacaacctagacttttctcattctatcattttgatattctcttgatgaacgcatgtgtttcgttccaggccgagcgacgcgctaaagaggctgaagcagagttcaactcggtctctagactcgtcaaagttgagtatggtagattcgagaatgagagaatagaagatttcaagaaggcactcgaaggtctggtcgaaggaatgatctcaaggcagaagctagtatgtggttgatatctgttgctttcgagaaattgatatattttcatgttgaccacttcactattcttatttcttgacgtagctcattgccgcttgggaagatttccatcgatccctacttcgacttgtccaacagaatatcccttctacaccctcccaccctcgatcagacagtcaggtattcatcgaaactcacccatcgtccacatccacgaacatatccagcgatgacgccccccctgagtcatccatgacggcagtttcttcattagtcttatcggaagaggaagcaccagtgtttaaaccagataacttaggcccggtgactctgccaacagaacccgagaacgcatgggcttgataacaccacttcttaatgatctcttcgccatatggtgaactgtctcgtgattttcgttctctttccatgcaattaacgaagaacggtcgaaattatcttctttttatgtcaatgctcgtgttagtagaaaaactaattatggatacaaatagtagatactgggaatctcatccgtggtatgtccatccgaactatatacacgaacgcagttgtctatgagatttacaagccagagtggaatggaggaaggagagaagaagaacgcatagaaaagtaaggaaatagaggaaagttttttttttttttttttt

SEQ ID NO: 701 - DNA, 7424 bp, Xanthophyllomyces dendrorhous
gtttttttttttttttttttattgagaaaaaaggaataagtagatgcagaaaaacttcggtagtagtaaccccagcatcagcgcatggccgcttgtacacaagcacttcgggcttcttcaatctcagaaacccattcgatcgcttctttactggatctaaacaaatacaacaaaccacaatgagccaaaaaaattatgtagaacgggaccatactagtagatgaagacataggcacttacgatgcgcgaagaaccaatcgatttcctcgatatctcggaatgatttcaaacttattactggaagatgcttcttccgagacaagaacatcttgaagcggaatgggctggcgtagatcgttgtcgatacagagaagagataatacaggaagcaaacttgtcagtcaaatatgagtgagaatcatttgagggcatctaaagagcacaaaccatttggtagagggttttagcaggctctgatagtacctgttatatatgaacaatatctaatgagtatctgcatgtgtacatacttaaaattgtcaatacgcgatgctaaccagtatgaggctgcaagacagcaagttgggtacacatttgatcaacaccaagaaactcgattcagcacctggatggggcaatctacgacttactcattggtaagtataaccgtgaaaagtttcttgctgccctttccctatacgaacaaacctcgacagatgagtacagagatatcaatcagagtgatgacaaggtgcattgtgtaccttggtgagtgttccttctttcagaagttttctagggccaaggaatcgagtaggagccgaaagctcaagtgatcacaggacataatagtccataaaaattagcaggacgaaagaggagagaaagggtctgaaaaacggaaaactcacatccaacctcccgtttccaacccacaaatcggctgataatgcagccaatctgtcattaccttccttcagccggatgttttcatttatgcgcatcagaatcttctcggcttggtaaatagttgttctagaagacccatttgtcgatcacgtgtcagaacgtgcccaaaaccacgatcaagaaacgcgcggcgacctactctagttttgtatagtcctcgcccggctcagtgtaatggagaatctgttttaaaagtagagggtactgcacaagtgtaatagagtatacatatgtagcacatcagcattgaaaacttcgaattgttcatgttgatagacacatgcataccctagtgatacgttgcactatgcgtggtcagaccgaagattaacacccagacaacaatacattagctacacgaggttcaagaactactggtagaaaaaaatcgtaaggctttacttggtatcagtaagaagctcgagaggtccaagcctcggagagctggttcatttgtccgaagagactgcaagatttcctcaagctttaagtttttacgacgcagagattgaaggatgctcgctgctgtagattggttgacacagtagggaacgtaaacatcgacgttgggaatatggctaaaaagaggccatatataggagaaggaggaatagcgttgagaatgatgagacgcgtccagaaaattaccattaaacaaaaatattgacttacttgatgagaatatcggcgatggatgtcaggtacatccgggactctctctggctctcctctagcattgttaaaatatcggaaggtgtccacttagttaacatatacacacatatgtaccatcttgcagaacaagaattcggacagacaaaacaaacctagttcactgtgcattgtggttgacatcatcaaaatatcttcaatgtttgcaaatatcactagtaactccttgtcatctaggatgctcatcaaagctgcataaaagacctgtttggcccaaagaatacccatttcaagatcgaagggatcagtatagacgcacttcgccttgaaaaagagaacaagtcttactccaacgataagttgacaatcccgaacgtaagcagactctgtcgctataaattcgaacatctgaaggaagaaagaaaaggatgatggtcaatgattcaatcttataattcagtcttccgtttctctatcacaacgatatcagcagaaaataccatcgaaactcacagcctcctgtcgttttctctcctggtcagagagcgtcttcaggagcccggaatctgacactctgatgccatatagataaacatatgccgggtcagtgagagcaaaaaaatctcaggatagcgaagttgagaagacttgcaagctagaccaattctgcttacacccgaagacatcaagaaaaaccatctgagatcagttctgtccatttctttgcgttgagtgaaaggagtttggagagacagtgcgaacattacaaggagcttgagttgatgttcgtgacattgagctagctggagaagagattgatccaactgatatcttcttcggtgcatgggcctctaggaacccagaacctgaactagatgtaaccgaagcaaacttgttcataaactgactaagcctcttatcagctcgagctccaaacgtcgacgaggtaactagcgaaggcgcgcctgccaaaggtgtggattgcggaggtgtgatagggcctgaagtatcaggaagagagaaagaatctcgtttgtcaatgcttatcgaggatggtcgttgggcctgttgttctaggaaggcctgatatttgtcgtacgcatcaaagatctctgtaccaggggaaggagatctagatatgattgaaggggcagctagagaagaagtagttgaagtcaccgagatagaacgctttcttgttccttcctgtcctaaatcactcgactttagcttacgagacgtcggcactgagggggctggtcgacgaggcttgctcaaagggtcgttagggtcgtgaggcttaataataagcccggccatctcgaccaccctaagcctttcaatctctcggtttcgagcctcctcttcaccgttttcttctgtttcatcatcatcttcagaaccatgatcgtcttctgccgtagcgggagaaaccactctcggactagaagaaggacgtctgtccaaaggtggaggtggagtgggaacagaacgtctattcaaaggctttacttgttcataaagttctgaattagggggagatattatcgttgtaggaatatcagcgtcttcggataagacaagagtagctgacgtgtgttccggcagagcaaatgatgcgtcagttgcttatcatgtgcaggaagaaagatagccagacatgatcagtgaaaggcgcgagaggaggatatgaaagtgatatgcgtatcatccggagcaacgaagaatttgagattgtcatggtagagaagagcgtagataaatgaaagaagaaagcaaaagagaaataacatgatttcagcctgtgtgcgccatagcgaaaaaaccagaaaagacaataaagaggggggtgtaaacagaaaagtcacgcaatgtttcaagagacagaattaacgtccagaaagatacgaaaagaagaagagaagacaaacagaacgaaaacgagaaaggattttgcagttttttttccgataaaagaatgactaaccgataagctccaagtaagacgcaggaacaaggaagcagactccatcgatcacagccttccaccaggactcatcagaccggtcgacaatggtgatcgtatcaccctctatgaatggaagctcctcatcagttgttccagtatacgtataaagcgctttggcttggacaactatcaagaggcgatttaatgagacaacaggatcagcggttgataaaaaccttctccgaaaaatcaaggacacttaccctccaaaacttcggacacgtatgaagcagggaaccatccggactttcgctctttaagagtagttccgtacatccacgggctttctgggtcagtcgccgggtgggcgtcaatcatcagattctcagtgaaagctaatggtaaggaatataaaagaacaatcagcactgaagggtcacaaatgcagataggaaactcgaaacatacaaagatcttcaggtctctggccttcgtaggaaaacaacgtccggaccttcaaggaccttgacaaattgactccgtctaaagggtcaactaccacctttgatccttcttcttcgacttcttcgtcctcctccacaggagcagcaagcttaggcagctctgaggcatgctgctggacgcccccgttggctgctagaccttggtaccaatctacgctctctctgttcgcgtttcgttccctcacctcctctactctctcttcttgaggcacgggaggggatactgctcgtggaacatcactgatatgagccggaggagccgcatcaccgatcactcgacctgtcacggctgcactggacgtatccttcgtcaccgtcttcttgagtttggctcccccttgaatagaggcgaagagtcccccccgagaggctggatcagcagaccctccacctagcgcagagagaagggagttggatctagatggctgtgtttctgttgaagcgacgggcgagtcggctgatctaggaactggagaggcagaggaagacgtaggaggcataattcctccgaataacgctctagccaactcggctttgcgtttcttagcggtatcatagtcatcggagctatctgaatcgttgtctttgtcctcaataacatcccaatcttcgtctggaggagtgataaactgcttagcaggaggtcgagcaataggggcagcgacggttgcggccgaggatttaatcaccggcggaggagcaggcgaagtggactcgattggagcaggagacgcgtctttcttgaaaaaagggttgaaggagctcgtcttggggacggagacaggaggagtgattgaatcagtcggcgaagtaacagtcccgccagttaatcgatggaaagggttatgagaaccacccgttccggtaccagcagcctcagctacatctgatacgggagcaactggaccagacgcaggcgagacagccttcttcgcacttccggccttcttcctagcctcaaactcttcctcagctttccgttcttcctcttcttgtctttccagctcagccatccgagccgcgcgggtagcagcagcgttcttaagtctttgttctcgctctcgaagaagctggtcctcctggtcatcaacatcgtcctcaacaggcactggcgctttggggggaggtgggacttgagccttaggggcaggagtaacaggtgtctggggcttagaggctggggctgtaggagctttcttcaaaatcgacctaggttgaggaggcggaggcgcagccttgggtttgctggcgtctgggactgaaactggggcaggcgtggttggggccggaccgcccttctctgcctccaacctagccttcctctccttctctttctcagcccgactcgcctcggcctctttagccttctcttcggcctccttcttctccctctccaatcgctcttcaacactcttatctacacttggttccttgtcgtccccagtagctagaccaagagctcgcatacgctcttgaattttttgctcagcttgtaatcgtcgctgttcctttcgttgttctggagtcaggttcgtcggagcaagagcagatacaggcgccgatggaggtggtgcaggggggtgaggagcagaaagtgaatgtgacggagcagccggggcaggaggaggtgatcgaggccgtcggtttcgatctcgatcatcgtggtatcgttctcggtctcggtggtcatctcgggaggacgattggtaatctctatctctgtatcgatctcggtcgtcttgatcgaacgtacctcgaagataaccttcgtctcggtctcttccgtaacgatcctcttcgtatcgtccaccatatcggtcattccgcctgtcccttgctttgattccatctcggtcttcccgcttcttcctctcatcgcgctcagcaatccgtttctcgacctcagggattttctcgtgggcgatatagagaagctctcgctcgagtttacgcctctcctcgtctttctcagcggtccgtcgaccggaagacacgtattcaatgtcatctttgactcttcgaaccctatacttgagatcctccatctcttgctctagagcctcatcctccgccgtcttatcgtcttcgtcagcaattttcttgtcaagcagagaagatgtgctttggagctgtcgcttgatctcggataggtcgtcagaagcgctctcgttacctgttcgaacactagctcgatcgagatgtcgagcagaagacttatacactttagtatctcggttctcgtcgtgtttgtacactgtaccgtcctttcgagaggcaccggccgatggattaggggaggagttgaaagaacgagacttagagtaagagggtgttcccgaaaaatcgtcggttgatgttgaacggtaattagtgtcgtttttgagaaggttcttgagaaaatcgacgttcgagtcgagatccttagacgaggcaggaacgagctcgggaggaagaacattgggaatatcgtttccattgagacctgtgtatagatgaccagttcagctagatttatagttatgagagattaaagagggcaacttacgtcggtagatcaacgccatagccacatggaactcttggatgttgagcttccctcggttgtccgcatcagctagcgtcctgatatatcaacgcacggtcaatgcttgtgttcgaatattcgaaatgattacacatgggactaaccagatttgagccatatcgtcccgattcaacccactctgtccaaagacctcctgagcggtttcaccagagatgaaacctgtgccctgttgatcccaagctcggaaaatctgatcgtagttttttcgctcatctttggtcaatgtccatggaattttgggggtcgcgatggacttattttgagtaagctgcagaaagttgataaatcattcgacaataagcgtacgggagttgattcgctaacctgacgtcagagatgagaaaggaattaccatgttcatggatgaagaaagggtagacgcagggaggttgggttgctgaaacacgggagcccctgaggaagcgtatggctgtgagtgaatgaaaatagtattaagataacgtgagcaagcggatagaagacatgataatttcatctctatattggctattaaagaccccgagatcatcacagcctggtagacaaggtatgagggacatgggatgaggcgaaacgtactgtagatatattcatcggcatgaaagagctgctcatcatctgtagcctagggtcatgaaaacctgtctgctgaggaactaagcctcctgctccggcccacccggtc

SEQ ID NO: 702 - DNA, 18017 bp, Xanthophyllomyces dendrorhous
ctacttgaccagctcccgcccaaccagtgacctgaggtcgaagtccaccaccaatacctccagcgccctgacctgctccagcccatccggtagcctgaggaacaagacccggagctagtccttgttgggaaggaggaggtgcattcaaaaaggagtacggctgagctgatgtttggtttgaaagaggaggtctagaaaagcctgtctgctgcggttgaaaccctgtttgctgtgggtactggtatccagtttgctgaggttgctggaacccggaaggattccactgattattcatagttttagatgtgtatgtagcgagaatggaaggtcgagagagaagaaaagaaaatgacagaagagaagaaacagagatggatggttggaggaaggaaacgaaggcagtcgggcgatgcgacgggcgtgttccgccatctcggtcggtagcggttacgcaactacacaaatgtagttatgggatcacagggccgtggttacacaggcgatcgttcaactttcaggcactcgttctttcttgtgttcctgttcctgatttctttaatcctgttcctagatttctccattgatcctttcccttcatctctctcgctgacattcacgtctcactcgcctttcgtggaaactcctcttccttccggacgtttcatcatgtcgttctctcaatcgacccgcaggtcgacaagatcgtcgcgtaggactccctccgtcgctcctccttctaactcttcccaaccgttctcgtctgtgtttgattctccggtcaattcggtagctcttaaatccaatttcagacctccttcatccatcgcaagcaccgctcagaacaatgatgatgagacaatgtctgagaagaccgagaacggtttggacagagtgacagtcgctcaagggtttggactagcgccgacggtcggatcagctggcggaggcttcggaacggacggtgtctgggtcaaggacaaacgtattgaggtgtggaagaaaggagagcttcccggagaagtccatgatctccttcaaaattccggtatgctctcattctgtttgttcttgaactgacgggatcttcacgttgacgctaatcaactcttcgcttgtcttatattactctacagatttatatacaactgctctatcaggctcgctggatcccttaactggcttcgcaaccctagtcacatcgtcttacttgctcatctggaactaccaaaaggtggcttcttgttctgttctcgtggtagttctttgaagtcgtcaactaatcaacgtgtctaatcttggatcgatctcagaaatcctctacccttcccacgttgtatccctttccacttccttcctcatcgcccttagctcttaacttggcgcatcttgttcggcatccttccggaagagagccaggagtattgaccatctctccacaaggagagatccgtttttgggaaggagtcagtttggccttggtagatggcggtgagaggtttgtcgaaggaatggtggccaatctatcggagggagagaaggtcgagattgtcaaggaggtcgaggtttgtcttctcttgccatcgattttctgtttcatctctatgtgtgtgaggattaactcatcaatgtaataacacaatatcttaatcctggtagcctggtcactatgtcttgaccacaaattactctctcttacatactcttctaatcacctaccccactggtcgtcctacccttcacacgactgctttccaacttccttctacgcattcatcccttctttctcgattcttccgagcaacgcctcacccctcatcgttctcccctccggaccatctccccagaatccttttgactatcctcccgcctgctatatcccccaaccaatccgaccctgcagcatccgccgaaggtggctctaaagatcttttggtcatcaccaaccggtctcttcagagatggaagatctcttctaggtcggcgccccaacttcagacagaacaaaaccttttggaacctatcgtcaaggcgctgtctcctgcacagacgtcgatcacaggcatgagcacgacctctggtgttgatggagatcttgtaggaattagtctagaaatttgggacatcgaaatcgttgatccgctcagaggagaaatcggggtgctcgtgagctttgtagacggatttctcgggtatggagagagaggcttgaggggagagagaaaacgattcgcggttatcagagtcagagtagacgagggtgctcaggttggcgccgaagttaaggtcgaaggagtggtaaagagcgatttcggttgcgtaagtgcctttatcagttgactcgacgtttggtcatgcagtagccgggtttatctgacgattgtcatctgcatcctctcctcctctttcctcgtcgtataggacatcgatccccgtccgcttcccttccctacactgacagttcctcagacgttgacgccaaccaaaacagcctttgtacttcttcccagctcgcttcttatgctctcgcttaccccatcagacccatacgaggaggttatcgagctcaaggactctgtcacaaatgctcttctaggtaaaggaggtctaggcgcgagggatggaatcagaagcgagttagggattgtcagtctcaagagtggagtgttaggcgttggtgttcgaggtggcagtggagaagggggaaccgagtacatatttaacattctcgtgtgtctgatcaaagtttagaagagacgcaatctgacttatctcttcgcgctctctcgaattagtcgcgctacgatcgccaccgctagactcaaatccaaactcgaacaagcaatcttttttggagacaagccagaggtgagtgtcgttgaatccccatatgcgcgctttgtgtatcttcttaggcttttatcagttttcttatttatctcacctaatgatctgaacggcatttcagaatccactctcgttcgagcttcatggaggatatgatggtaaccttatgcaggctgccgaacaagtttcaaatgacattctggcttctggttggtctctcttcttctgctgacagatgcgcaatgtcacgctgaacaattcatgcctactgaatttcggtttttggattagtttctcccaacatggttcctatcttggatctccgtgcacaaattgcggatagacaaaatagactacgcaacctgatcgacttcatcggaggaaacggcctgctcggaaaggtttgtctttcgtcgattccaacatctcggttgacttgtctaaatctgattggcttcccttgttaaacagctttcacaatcaagtaggcgagaattgtcttggaatgctgagcgcctggctgcctgctccgacctgtgggtctatcagaatgtccgaatggggtatgtcatctcccaatccggtgcctttttgacctcacatatgctaattgtcgccaaactatttctctctaccaatcagaggaaacaaccaagcgggcactcccagaggtttgttagcggatgggattcactccctcatgtcgctttctgggtttggagcgggagaggatgtagtcaggctatttttcagaacaaaagtcagtgaaatgatagcgaatgccatctttattgacggatggagcttgattcgttgtgctgacgaagaaacatccttggtaatgtgtactttgattgtgtaggcccgtgaactagggtctgtgctggatcaggtttcaatccaacttcgatcgacactgcgaattccttcgtcaactgagttaacgtcaaaatggcttttagaggccaaccgaatcttcctcgtgcgtcatatcttccaatacgcttcttatcacatgcgatgatgacttatatcaatatgcacatttttatgttgatatactcaaaggcatccttcaaagcatctttccgtcaccgcgaagagactggcgtgaaatatgggatttcaccctctgaatcatctctctctgagccttggacttgcacgaaagctgtgcttgaatctctcgattaccttgtcatcagtacagaggccatcattcatcagcgaagccgcgagttcggatcctcgttggatgaagagccctcctcagcagagatgagcgatggacgattcggtgcacctgaaatcaaacaggggcaggagactcaaagggagtttaaagaacagctgtgtgagctcgctgcggctttgttctcgagttttgaggagagaatcagatacctgttgaagtgagtttatatgactttcctgtggtaacctatctgagaaaatattgacgatccttcccttcggattttgttacccaccacccccctttgtctcgtgttgtaagtgtgattgaacacaacacattaggaggtactatcgatgatcgagaagtcatcactctcaaagatcgataccttcagctccgatcgcgagtgatccttgatttggtcaagattgatcgttccgaacaagcgttcgagctggctgaacatcacagagatttccgagcgctcgtcgagctttgtaacaatcctcagattggctcttcggctcgggtccaattctatattgaaaaatttagggaagattttgcttttgaactctatcagtggtatatcgaaaagggtgcgtcttaatcttcttacttataccgagaaacgatgactctcgcaaagagtataggttgattgaagactcgttctactacgtcacgttcaggtcaagtcaagacgttgcttactcaggacgagatttataacgagcttgtcactaagttcttggactcgacagagaactctcgaattgcttggttgcacgatctttcgatcaagcgatacgactatgcatcacattctttattaaaagagtctgagtcggagcccaagctcgttaacaaacaggtatgtctcatgagatactgctttcttaacatcttcgcatcaccgcatcaccacgacactgctaacggtggggttttgtaaaatttgtatatccaacagttgatgctcagtctgagtaaactttgtcaagttgttaatcttagccagggaggaacaacgagcgaagacgctcggaaggttcttgacggttagtggatattgtctaactgatctctcttcatagtcgtggcctataagctaagttatggatgcccggtactctattcaggtctagatgatcggttggacttgattagtgttcacgaacgacttcgggatctttttcaacaggctttaaaagagtctggcaagtattcatcgaccgttgaagataacgtcgaggtggtgaccgctatcttggcgcccaacttgactcctctacccgcccttcgagctgtatgtctcaagcgtcgatttcatatcaatgcaggactcgcgttgaaaagattaaaatcctgattgaactgaccacctttcttcatatgccatagttattcgtgaggctcggtcgagatttgttgttaggcaagactcttcaacccgaagacttgatcgatcttctgacattgaaagccaaccaaaacgaggatcaagttggagactatgctatcgcgcttgatgttctgatgagagctagggtgagtcgtttccttgtctctctgttcgttttaattcaattttaacgttcaactgactcaatgatttcctgacgagttcatataggaaattcccaagggaagagcgaacatggctttgtcgagtatccagcgaagagtttacatccgtgatgagtacgtcatgttcttctcaccgtccatgccacgtgctaatccagatttttccctctttatcttttctgctctcgatgtggtcgatgcagctggtcagctttgtcttcaacaagtaatctggccgaccaacaactcgaggagattcttcgttcaaccgcatattaccagacccttcgtatcctgaaaggttcgttcctaattcatgatctcttgttattctctcaggtgcctgcgcaaccaagccgtcctgaccttttcccgccctcatcgtagatcttcatgctacacccacaccctctctgggccctttaacactgtccagaccgactgaagctctccttccatcagcctatataactggatctccagccgaattagcagctagatttgttgatgaaccagcagatgaggtcgaagttatctggtcggatctaaaatcagagaacgaacagttgaggagttacttggaaggtcaggctgaaggatcggaaggtctaggggtttgggcggaggagattcagaggttggtagatttggattagtatagctattcatctgtttcatttttctttcacttctcgatttctcgtctggttcgattgctctcaaaaccatctagttgggaaacaaaaaagaacacgaagccgatgataagatgagataaaacaatataaagagaatgatacagctaaagaagtaataaaataagacgacatgaaaaacagagatatatgaattgtgaagcaatgttttatttgcatgagaaaatggtaaaaggaagagagagatgaaaatacacagtgaacgaagagtatttgttatggattaacagaacacgtggcagtaaattaaaggcatcaagatggaaggaaaatggaaagacatgcagtttatgcgatgacaaatcgaggtcagcgaattagagtaggatagagaagaggtcgacaagtatttccgataggagaagaaccaagtgaagagaagcaaaacaagagagtgagaagagcagggagtggagtcacagtaattatgacggcaagacaggcaagataagaaaacataggtggttcgacggcccgaccaatgttcggacgattgccgagttgttttactttctccgacctctgtttccccgacctgtgcccttccagcaatctggtattgtcttctgatgctgtaatgatcatagtccggaagcggtgttaagcatgctcaagaaaagcagaagaagtaagaaaataaaaagacggaccctgataagtgcatcttttctcgaaaactgtttctgacacttctcgcaataaaatcctgttgagggaacgccctgtttggaatgaatggtgtcgacatgtcttttgagatcatagaatctaacaaatcgagctggacattgttgtttcgtctccggatcaacttttgaaagcgtgatgaagaggaagacgtatcagggtcattgaaagttggaagatatttgggcgcttggggagaacaagataggattgacttactatgggtacagagcgtaatctctcccgataacgacccactcacgctcgaacttcttctcagctttcctgctccacccaaacctaacgcactcttcttcgtttttcgaacctttgtccccttggtcgtccctgtaccgcccttcgttcctacctttcgcttatgttctccatttatcccagagaaggacccggtggatgatcgtttacctccggcaacgccagcagtagtcgttgctggtgctgtacttcctccctgaatatactcttcttcctcgtcatcatcgtcttcatcagattcgaactccgagtcagaggtcctgaagttctcgtcaccgtcttcaacccgataaccgtcttccggttggtcatccgggatagtagaatcctggctgatggatggagggggagacgatgctgaatgcaacctaggcggaagcgtctgactctgatccattacagatgatgcaggatcgtactccgaatcactactagtgtaatagcctatcggttggaaaccaaggttaacccctcgaagaggctcttccagttcgtgccccccatcattctccggtgtatttccaggtggacttgatccggcaaagtgttcaatcagcggagatcctttgcttggcgaatgatgcactcccgctgtgagagaagcttttcttgaatgaccagaagggatgtaatgaaactgttctttaatctgtggtgcgtttggttcgggtaggatgagtggggagccgggctcatcgtcttcggatgaggtggagagataatatgactcgagggtatctgaccgagtgggtgcaaatattgctgtgcgggatccgttctctgtcggagccgaatcgacagtcaaaggagacgaaaaatggaaatgagtgtgttgcttgggaacataggatccgttcacatttgctatcgaggatccaggaccagtggccgaggtagaggcagtgcttggatgtacatcttggggtttcgcaaacaatgacggatatgtctttttcattattcgatcgtcaccgaatatgtcccttggagagacggtcgtggatgcgtccgagaatgtcggagattgcaattgaggagaacgatattggtgcatcgaagactggttgtccaaggcgtggatgaatggtgatttttgaggaggttgatgggggtgatgcaacggcggcggtgccggcggaggatacatcggtaacggctgtcggtcgggcttatggatcatgctggaggatgggcgatgggagtcatcgtcgtacgtcttggtcggtcggaaatggttttcacctgatgacgagaaggattcactggatgaaaagaagaatgcatgcaatcaggttaaagattcatcagacatggtcagttcaacggatcgaaagggcaaatggcagtgatagaaaacgaatagagataaaggaaaaggaagcgagaggagacatatggtcggttgcttttcaagctgagttttcttcccgttcctctgatgtctcagcgaatattatacggtccatttcttatgtaccaagccgactagatgcccagccgaagaaacggcccctcgagaaacttctatccgacatgcaaggaacaatgagagaacgaaagaacagaaattcagaggacatacgatttttcctgagagctctgagacctagagtctgcgggtcgaaagagctcgagatcatcgtcttcatcctctccgaagacgtactcgtcgttcgaagtgaattgtaagcttggagactgaaataccgaggacatctcagatatatctgcgtgttcgtggatggcgttggactacttgcttctccgtcctttgtcgtcgttgccgttgtcgttcttgttcgatttattctttctctatctgacttgaaaagaacgatgaaagatgcttacatcagcaagaaattgatgccaaacccgatgcggtcatcacttgagtgacggttacttttgcaacgacgacaattgctgtgtataacacgtgagtgtgttttccacaatgtaaccagccaaccaaccttccccggccagcgagttggcttctcactttcatcggccgtcgtcggtttcatctgcaactcgctcagacgactctgttctgcttcctttcactccccagctcttttctcaccaatggaccttgaccaacatgaccgctgtctctcgatagccagagcaaaactcgaagggggtgaccccacagctgctaagcggttcgtcaacaaagcccttggcatgaaggagacctccgaaggcttgagcttgctacaaaagatagagaaggttcgtctattctcttgggttttctgtgaaaaacaaaaagtaccaccagaagaaatggtcatttgaaccgtctgcctatcacgagccgaagtcgaaactcgttgagtcgtaaacgacacgtgtgcatatatcatttgaaaaagaatagtacttgtatcttgcaatctctattggagacagcgcaactgccgccagccttacgacagaaagaccacttcaacattacccagtcactcttgttctctatctcatctccttttgggtttgcgttacttccttgttgagagcttacaccgtacgttttctcttgctcgcgaacaggaaattgccaatccgacacgtgaggcacctactacggcttccactacatcgtcggagccctccgcttcgagttcaactacccatgctagacatccccctaaaccaaatctttccaccaggccatcatcagcatcttccagtcaaagtcgcaagccggaggagcagaagagggagtacactgctgaacagatggcgatcgtcaagcgaatcaagagctgcaaagagggacagttctatgagatcatgagttgtgcgtccttatatccgttctcctcctgttctagtcaacaaacacgaaactgattagttgtgtacaattgtagtggaaaagacgtgcacggacggagagatcaagaaatcataccgaaaagtaagtgaatataatttagccattggcttcaggaattcagtcggtcactaaacgtttctttctcttgtctagctcgcgttggcgttacacccagacaagaagtcagtcgtcagcttcactcggtgcccttgatgatcgatggtctgaccgatgactctttgttgttaaattcttctgcgcacagtggcgctcctggagcagacgaagccttcaaatgtatgtactctaattcttcctcgaaaaaaagaaagaaacataagaaagtcacagcactaaaccaactgacctctcttcattcaaatcacagtggtgtcgaaatcgtttcagatcttgtctgatccagacaaacgagcaatgtatgacagggatggggctgacccagactcgcgtgcctccatgagttcttcccgtggtttcagcaatggttcgactggtatgcaccgtggcttcaacgggggcggacaatttgcacaagaggtgaacccagaggatctcttcaatgccttcttcgggggtggctcaggctttggaggaggaagtccgtttggcggacaaagtgagtacatcgcccatcgttttgacagtaaaaatagctcttgacttatctctctgcttccttcagcgttcacatttggaaatggaggtttccaccaaacccgggtgtatccacaaagacgagctcgaaatccacaaggaaatggggcagaaaccgagagctctctcctgtctcaactagcaccaatgttgatccttgttctgttttcgcttatctcctttctacccaatatcttgaacccacctgtgcaaccgccttcattctctttcgctccgagatcgcctgattttacgacagaacgactgacgtccaagttctccgtcccgtactacgtcaacccggctgaattcaatcgccatccgatatttgaaagtattccgggttctcaaaagtcaaatcccaaggccgggatatatagttcggaacttcgaaagttcgaagaacaagaggttgagttgggatacgtgaaacaattgaacagccgatgtaacgccgaccacgaaagaaagcagagggagatcgagagacattcaggatttttcggagtaggagctgattgggagaaggtcaagaacacccaacagcaaaagctggagagctgtgaagagttgaaacggtttgggcatcattttaggtcttagaattggatgatttttctttgtaacagtgtttttggttggcttcttgtcgtctgtcctttctcatttgttcttctcctccatggggaagaagttctcttgtcctcgtatcggttctcactcttttcgtttcgtgttcagagaagtccttttccgtacttgttccaatctacaccttttctcgcactgagctcaacccttcactcatctatcggtctgtcaatccaatcatccaactaaggaacagagacatgctaacaggtcaagatgtcatacatgaaagtttagaagaaaccctatacaatcaaaccatttcacgccgattgatactcgtctttcaccgcctttcccttccgtccttgctactccctccatttgctgttttgaacacttttttgtcgactgcatattcaggaaacattgctgtcttagctctggtaatgaagatctgtgtcacgattggtgtggtgtagtgtgctgaggcaagatatagaggtgaggctagacaggcgatttcctgccttggtgggtttaaccgatgggcatatcgtcagatatttctcttcgtgatacgttctgtgatattcacgtcttgcgctcttgcttttccccctcagtagtaccttatttagaagttgtgggactggatcgtgcgacgggacgagacaaaatctcggatgatgtgtctaaagactactcccgatagtgacatagggaaacaggagaaagtttaaagaacttctttcgcgagaagtaacagagatcaaaaacccatcaattccaccccattctgttccccagaaacagaaagatcacatccgctcagctctcctcttctcctcccgatttactttccgtcagcaacgtaggaagcaacggcggccgatcgggcggcagccttgtccttctcgatcttgaggtagtactcatctcggattcgaactagtgatgatacatgggtatcgagaaatgagaatcagttcacatgtttgtgccggagaaagaacagaatgtatcaagaggtatagaaagaacggtgtagtcaggggagaaaggcaaaagaacaatcgtcggtaatcacaaagcgatttggggagaatgcatggaaacggatgctcattcgggatggcttccatagtgacatagaggaaagggctggagatgaagaacgacacttagatggatagtgctttgaaaaacttcgcagccggattggctctgcaaccttcatccggtctatagcttcccgacccatcgtcatgatcgaccaagtgttcttcctcatggttgaacccgcaaccgtttctgaaagtaagataagaagtgaagtacttacgatcagggatgtgggatccgtacctacagtttgaatgaagcataaaacagtcaaagagtgtcaatcaagtgaagatataaagacaaacaaaagagaaaggatagaagatgattggatggcgaaagaagctgcactcaccagtaagcgtaagctccgagcgttccaagaccgaggctaagagagtttgaatcgaggacgaagaggatgaaaagcgtcagatggatctcagagagtggaataggatcggttgtagataggatagaatgatttacgccatggtgatgtcaaagatgatgacccttcggctgaagagaggggaaaaaatggggtaggaaagaaaaaggaagaaaaaagttttgaagacagataacgttcagtcgtgaagaaaaacaagacaaatagatgatggaagcaagagcacgaacagctttccggcagatggggggactcggtgaactcgggagacagcagaagccatgatgaatgtgttgggagtggatgtaagtgggtgaaagcaaaagagagagaagggttgaacgacccggtgagaagacagacgaagtgtctgtaaccaaagtgaaaccatgatttcgaaagtggtgtaaccaactgaatcaacgtccactgggcgaatcatggtagtgcaaagaacacataaacaatgaagcatatatcgcatcgatgaaggaatttggaaagtgtttgcacgtattcgctaatagatttagagtctgactggctcgcacagctaacgatttcccgaagacctcacaagacatcctgaacgagcgggatagtgatgggaacccaacacagtccgacgtgcggcttgagggggcgtgttggaaaacacatgttgagaaggcactattgaagagtatagatggaccaggggtagaaacgaagacattataagagagagcaggatgatacaaggtgtagagcgatgcttttctttctctagctcgtaccctcttgcgcctgcatgcaaagatatcgagacacggtgagactttctgctgaaagaatgcggatggtttacttgtatttacgagattttctatccatatggatagatggatgtaagtagatagaagtagaaccatgatcttagcatgagtacgttcggtcagttcgatgtataggataggacttaaaagaagattaaacttgctctagtgacattctttctgagagagacatctcatataacgttcctggtccatgctacaacccggtcaaacaagcatcttctgcgcgttctctaccacttgtccttcatttgtcttccgatccattgtctacacaccatctgcagatctcgcgcgacgttgtacactcctatatacgggtctcgttgagcactggctacggctggcggttacgtgcactctatcccgtaaccagcgtgccttaactgggctcctccccaccggcattctttcctttcgtctctctttcgctcgatctctttcttcctctttcctctccatcctttttgctcttccatctctcaccttaatttctcatccttatctcgcttggccattctagtcgagccttgttcgaccagcaaagattcaccgccctcatacttgatctcacaatcgcctatcaacctccccttctcgttttgaactactctcgacatggagcctcaagatcctcattcgggctcccctcagaaccaatggcggttcgctcagtgcttcggtgacaaaggcgaggtcgaagacatcacagaaggttagtaatgatagctccaaaaaagatcaatgctacgtctttctctatgctcgctgtgttctttagatatcggtgagagaaagttgaaggtcaaacaagcggaggacacgctcagattgatggtcaggagctgggacaggtccctctctcttaattttcgtcctgtttatctatcgtcttagacatttcttttacgcctgctgtgtcgtcaggcaattgaagagatgtgttttgatgggagctcgagattgatctgttctgatcaaccgatcgttcttggtcgaggttgatctcagagatgagatgatggagatctgtggagatgatttacatctttttcgcctctctccaaacattcctcttctcatcgttccttcagtccagacatcggcatattttacccttgagaaatggtatggaggtgtttgacgcgtttagaatcgtcgcaccactctattcaaacttcttgtcttgtttccttcgtgtcaaacaaaattttctttctggaccatctattgactcttctcctcccttcgtgcctttcactcttctatcccggccatgtctccttcctgtcgcatcctgaactcggcccatccctcgtccttactatgatcttacaattccgtctcccggcaaacgttgccacgcaataaacaactatagccgacatcatctcgacagttgagttcgatcacacgggagattatttggcaacaggtgacaagggtggtcgagtcgtcttgtttgagcgaaatgaacaggtacgcctctattattattatttggagttttcctccttttttctttggttctttcttttaccgctatctttacacgaaatgccttgcccataaggagtcttgttcggaagcttactcaaacctctgatatctttttcgaactgtacggtcgagtagaagaagggttgtgaatataagttttacactgagttgtgagtatctcgaagcatgaaacatcattcagcaaagtagccctggcttgattccgggaaagagatttcaaacgcgaatgtcgtttttcctgacccggccgtcttgtattgtcttttcttgatctctcttcttcaactcttttgtgggaatcagtcaatcacacgagccagagttcgactatctgaagtcgctcgagattgaagagaagatcaaccgcatcaagtggtgcaaacgacaaaattcggctcactttttactttctacgaatggttcgtttgtgtatcctccgtcacgtcttgtactcaacagtcacacgtgccgagcgtaaatctgaccttcaacggcaaacgtcgtcccatcttgctatttctgccccacacttcactcgtgcaatccctcgcctctatagacaagacaatcaagctgtggaaggtttttgagaagtccatcaaggtcgtggccgagaacaacttgtcttccgatcactttatcaacgcgcccatcacctcaacctctggtaaccctcatatcacgtccgctagctcactcacactccctcggttggcccatcacgactcaatcgtagcggccgtaccgaggaaggtctacgcgaacgcgcactcttatcacgtcaactcgatttcgatcaactcggatcaagagacctacatctcggcggatgatctccgaatcaacttgtggaatttgaatatcagcgatcagagtttcagtaagtttcacaacagtgcacatgtcaacagaatggggagtgcaatgcagaacctgcattatctcgttagaagaggctgtatgaagagtaggctggggaagacaggcgtatagagagcaggaagaaagcataccttgggacgaggcagaggacaatctcattgtaccggttgtgtcctgcactgccgacttaattgaccttgatgtctttgaccctgcttttcctcccaatcagacattgtcgatatcaagccgacaaacatggaggagctcacagaggtcatcactgcagcagagttccaccctttgtcgtgcaacttgtttatgtattcgtcgtcgaagggtacgattaagttggccgatatgagacaagccgcgctatgtgactcgcatgcgaaacgttcgtcatttttgcactttcctcggatttcgaagatgtgtgtacgtcctaaactgatctagtctctccaatctacagaatacgaagaggaggaagacccggccaacaaatcgttcttttccgagattatatcgtctatatcagacgtcaaattctcgaaagatggtcgatttatcctctctagggattaccttacgctcaagatttgggatgtcaagatggaaaacaagccggtcaagactataaacattcacgatcatctgcgaggaaagctctgtgacttgtatgagaacgactgtatctttgacaagttcgaatgcacgttcagcggggatgggcagtacgtatcgtcttccgatagtatatcacatgtactaaacgctgattgttttcggtcgtggcttttctctttttttcatcgcttttacccccaggtcggtactcactggatcgtatcacaactatttcaagatctacgatgtcgactcttcttcggacattctcctccaggcagacaagtcggcattcaaagcaaagaagatcggcggcgtcaagggcggggcgaagggcaagtcgggtgcaatggagacgaatggaatcgacttcaacaagaagatagtgcgtctattgtttgctcttgctttgatcctcggaatccgtttggttcgaacctaattttgatccgtctgatgattctctccatatagcttcatggaagctggcacccaaaagagaatactatcgctgttcgttttggtttctcttattccttgtgtttcttttctggactgccactgatgcgtgaatattgtcctacctctagatcgcggccacgaacaatcttttcttgtactcgactcagtccaactagagctcctcgacagacctattcgtcaccctcttcttgttttttcctcttcgttcacctttgatcccacccgcatggttcttctttatattcaagagttctcttctctgttgtctgccccgttctcgatgttttgctcgccattgtccctttttctttctctagtgtctttttgatctctcacacatcctttgatcgattgttcctttctgtcgttttcctttctgttcccccttttttttctctacttctggtgctccatcttacaacccgtctcttatgcctgttcttctcatctctttccccaccccgttccgcccgcccttttttcctccaaacaactccatctccgctttttcttgggtgaaaacctcggctgtataccaaatctatctactcatttctcctctctaatcacccttccttccctcggtcatgaccatctccgttttttctttcttaccgttctgtttctttctccggtgagggatcagggtcctgggaacggcctggtcaatccttcttccttttcactctcaacaccc

SEQ ID NO: 703 - DNA, 302 bp, Xanthophyllomyces dendrorhous
gaacaggagaacatggcataagaagggacacatttgatggatacacatcgaacacagcacaacacagcaaagagagatacaaaaggaaaaagaacgatacaaaactcgatttacagaacgcggaggatgattctcctcctcctcctcctctctgtttatctttctttatgggaactcggcgagggcgaagattgacaagatgggttgaacaagacgaaatgataatgagaagaagagaaaacagaaacaagcacacacacacacacacacacacacacacatacacacacacacacatacac

SEQ ID NO: 704 - DNA, 1909 bp, Xanthophyllomyces dendrorhous
acacacacacacacatacacacacatacacacacatacacacacatacaaaaagaaccaggactatcggttgccaagcgttcgatcgagattgaaggccgtgctgatcagacagacggcggaaaagccctggggggtgtttccgaggccttcgccgcctctcgagatttcctcgctgaacaggccgacatggttcccgtacccgagcaggtcctcgaacatcgccgtcgcgcgggggaggacggtccggtcgaaggcgcccaccctggtcaacgcttcgaccccccagagggtgcagagcgtgaaggcgccttcggatccgccgacaccgtcgttgaccttgtcggtgtcgtaccggaagatcaggttgttcgcgcagagcccgcccttctcgggcaccctcagcacccggtcgagtgtcgatcggaaccggggatcagaagcgctcataaagaacaccagaggcatcaccagcaccgcagagctttggtcgcgggaaggggggtttttttttttttttccaacatgacacgaaagcaaccagatcagacccaagcacacagctgtgctcatgaacgatgggggaaaaaaaaaagacaacaaagaaagacgacctactctacaacatccttggcctcgtatgattgagctaagagggtgggttaaagaaagaaagaaagaaagaaagaaacaagatcggaccgatcgaaaggtcaaccaggaagctcatgagtcgacaagacaaccgacggccaaggacgtaccgaaaaacttttcttcgtcactggcaggacgtagatcgaagggtgatcagtaaacgtgaagaaactccgcctggggacacactttcgatcagagacttacttccaacccttgaccatgacctcctctgtggggacgagaacaaagagaatggtcagtcggtgaacgccggggcggggaaggaacaaggacgacggtgaaggaacggaccgtagatggcatctctggtggcgagccacttgtctcgctgccggagaggcaacgaccgtttgtcggccagacgaaggcctctgtcgacggcgacccagagcatgatcttggagtacaaaaagtttcgtttggtgtctctgacttcccagatgctgagatcgggctggtcccagttatcgcacacccagtcgaccatctctcggacggcgacccacatgtcccacgagaggggcttgctgaactctgtcggacggccagaagagggaggcaaagtgaggtcagagtcgggtagaacgagcggtgtcggtcgagtcggtcttactttgggcgagatagattgaatccatcaactctccatagatgtcaagctgaaggtggtctctggggggaggagaggagagaaaaggacgagatggatgatctatcagcgtacggcactggaatgagaagactgataacaggatgcacactcacgcggctccgttcttcatatggatatgtatgtattatttcagatcgactcggtcagtaagctttcccccaaaagaaaccaagaaggaaatgcctgtccggtcaagcttagacgtactccgattctgaccggcttggagcctagacatcatcggttgagggtcgtcctggtcagtttctttatcaaccgatgatcaagcagacaaagaggcgaccgttgactgacctttgtgtcctgcaaaatggtcgagcgtctcttcctccatatcctgttcgttcacgcacatccacgacgtcagataaatgtggatatgtctacaggtgatcaaacaggaaggaaaagaaagagagaaaagaaaaagaccaacgacatcgcctcggatggtgtacattatctgaagacttccgtcctttgcgcgctttccggctagcccttggatgaattccatgaatgcgtttgcctgtag

SEQ ID NO: 705 - DNA, 609 bp, Xanthophyllomyces dendrorhous
gaattgagaattagtgatgatcgatcgcatgaagagagacaaggcaaacgaaagaggttgatcatggggcgaacctcgtcggtgtaacctaaccggatgagcgcgtagagcgtgaaggaagaatctctgatccaggtgtatcgataatcccagtttctggttccaccgatatgctccggaagtgagaacgtcggtgcggcctgtgttggggacggaaaggaaggtgcacgaatgagtgggtgaacgagtaggttttttttgaaggtcaggcggtcaacaagggatacgtacgatgatagcaccggtctgcagacacgcgacaggaccgattggagaaggagaagaaggtaaagagaaacacaaaaaagacttgtgagacagctggttgagaaagaaagaaaaagaccgaatgaaaggcatctcttgtacgacggaccttttcaaagataagcatcttgagggtcagagcctgtctttggacgacctctctccatcgacctttgtaggtcgacttgccgatccatttgacccagaaggtattcgtttgctgtttcacacacaggaatccaggcgcatgttgtcagaggggtcatgtgtcaagagtcgggt

SEQ ID NO: 706 - DNA, 757 bp, Xanthophyllomyces dendrorhous
gactgggacaaacctcgatgagagaagtgaccaggacctgagggcgaacggagagcaaggcagaacgtcaggggagggttcttgtttctttcgcagtcgagagcaaaggacgacgctgtgacttacggccgacatgacgggatcctctggagatctgatcttgctgacccctttggcaagggtggacaagtcgacgccaagttcttcggccatctcctttgtcgctttgttgccttagggggagagatagggagatggggagacgatgagcgagagggagccaaggctttagagttgagaggacggacctttatttttggcagactgctcaaagcctctggcagggaactctctgagcacaaagtcgacgatctctccttcgtaaacctggggaggagggtgaaatcttgaaggttagcctgagagattggctgaaaagaaagaggaaaaaaaaaagagagaaacttgcctcgaactctgaatagacagcctctcccaaatggccgttggcagaaagatcgagtttggaccagtggatgtccggtccgccggggcctttgtgctcgttcaaaccgtcgacatcgggttctgcggtcccgccgtcgctgctttccttgcagacgttctcgccagacacggcgactctgacgtcgagtgagaggtttttagaggtgaacttgatcttgcgcttgtcaaactcggtcggcgcgacctgggagtcgtctcggatgatctagacggggaggaagggtggtga

SEQ ID NO: 707 - DNA, 318 bp, Xanthophyllomyces dendrorhous
gagaaagaaggaaagaaagagaactgacctctgtctggtgggaatctcggccgtagttgaaggctggggcgacctcgactctgaaggtgagctttcctctgatgacttcgacccgtctgatgagccatggtaggtaggacttgctgggcagggtcgagctctttgggacgaggaggtctgtgatttgcccgacgcctcgctcgctgaggaactgatattggggggagaaagaatttagagagatgaggattgggatggctaggatgattgatacgagagaacgtttgtggggagggagggcatacctttgtggctaga

SEQ ID NO: 708 - DNA, 629 bp, Xanthophyllomyces dendrorhous
gctgggtgagggtgtgagggggacggactggtctacctttttggcgtccaggatcctgagcgtttggggggaaaggtaagagtgagcgcgcgcagaacgatgggattagagagcgttgtgagagagaaagatcgtaccttgcaaagacgctacaggagatgggagagagagagagagagatttggtgtgagcttggctgggcgcatatgcatgcgcgattgggttgatggctgagacgagggagaagatgctgacctgggtgagtcaaagtctgggatgcacattgactcgatacttccctggagaggagggtgaacaagggggatcgcctggttagctttgggtgcgggagagagggagggagagaaacgggatgagcgcacgttgatggatatcatcgctgcagtctgcaggtttccgatcatggcatggtcctgttttggggtatgagcgtgggggtatgagcgtgggcgtgggcgtgggcgtgggcgtgggcgtgggctttcgatgagggcaagagaaggggaagaaaagaaaacgaaagaaagaaaaaaggaatccctacttggatacccatcaccgcattggcgttggtcgacatgggtggcattctttgggtggtgctgttg

SEQ ID NO: 709 - DNA, 1051 bp, Xanthophyllomyces dendrorhous
gagagagagagagagagagagagggcggcgatgagagaaagagggagagaggacgagatggacgatgtgtgggtgaggataaggggaggagtaggagtaggagtaggagtaggagtaggagtaggagtgagcaagagcaagagcaagagcaagagcaagagcaaggctgagggcaagggaggttgagcaagcgagtgtgtgctagcaagggtaagagagagagagcgagagtgctggttacactgagcaagagagagattgcgtgtgagcgtgctggtgctagtgagagcgtgggcatggggatgggcatggacaagggcaagggcaagggcaagggcaagggcaagggctcaagatgggaattggttccgatcggtaatcatgacgttcctcagccgacagaggcactacagcagcgggccacgccgtcagcacacgtcaccgcacacccgagcacgactgaacaagtacacagtgtagtgtagtgtagtgtagtatagtgtagtgtagtatataatagtacagaatagtgtagtgtagtgtagtacagaatagtacagaatatagtacattacattacatcgcatcacagtacagtacagtctaacacactcaatacactctgtattcacccttgcccttcccctctctgcccctctctctgtagtgaatgtgtagtatacatatgtctgtacgttctgtcttgctcccatctccccagcgcacacacacccacccacacccacaccccttggcgatgacgtcgtgggcagatctcagccaggcctggttacaccgatggtaacatacacacagccttcacccatcccacgtgccactgaccgccagccccccaacgtttagcctcctttctgtccatctttccatctcgcctgcctttccattctttccatctttctctctgctcactttgtccgtcctcgtccagtcaccttgacattcaccttcgccttcaccttcgccttcaccttcgccttcaccttcgtcttcgcctccaccttgacatccacacacacacacacacacacac

SEQ ID NO: 710 - DNA, 1627 bp, Xanthophyllomyces dendrorhous
gcccgatcaccccgcccagctcccagccgaccaccgcgatctcgtactccttccccaacgccacccctggctcaggcccgtccgtccagttctccaactcgttcgaacccgctcagcatcagccgaggccggccgagatcaaggccccgtccgtcccttccatcggtcccagacgaaagtctgtcaaatcgtccggcggaaagagggcgatctctccggtgggtctgactcttttttgtttccttgtgtctcgtgcttagtagcagcctcttcttcttcctttttcctcttgttcgcttactaatcttttccttttttttttcttttcttttttttttccccccaaaacggttctgaattctcttatccaacagaccggagaaagaatgctcgtcggacacgccggcggaggcatgttctaacatagcctccattcactcccccatccccgaaagtttcctctgcttccctctccccaactctggatctctccgtggccagtttcttgtctctttcttgactgctttgcttctgggttctctctctcttccgggctcttactcttttgattcctttcctccctctcttgcgctctcttgtcacccactcatgtacacttagccatacgctcaaaccttcctcctatctatctttccatcgtttctcctacccatgtcgtacgcacctcgacgtgctgtctcaatatatatattttcatttttatttatttttttacttttcctcctccttctcctcttcccttagcccccagtctttgtgtctgtgtaccttgttgtctctgtgtctctgttgtctcttctgccgtattcgagcgactcgtcaccctggttcgcgttgtgttcaaatcgactgtttgatatacttacgacctaatcctctctgaagtctatctcacgacctttcactttcctatatcaacattgttgtcgcttcttctccgttctacattctaacccccttgtcgcgcctctcgtttcgtcatgtaatcatcaccaccaccaccaccaccaccatcatcatcatcatcatcgtcgtcctcttttcttccaagtctgtgaattcttacgttcccgagatctctctgttcgtcatacgtcatgcatccctcctcctcctcctcctcctccctagtctagtctactgttctctcctctgttatgtttcgcttcaccctgcatcgtagacttttctcctcctcatcctcctcatcctcctcatcctcctcctttctcatctctcatctctcgtctctcgtctctcgtctttcgtctctcgtcttctctctcttgctcgctcttctccttccaagtctgctcgatgacgtcccgagtccattcggacgtcaccccggtcgagccatcatggtcaaatatcatgccacctcgtctcgtcttgtttcaacgtctgtttcaccgtcatgtttatctttaatcgattcttacaacccctaaagattcattccccaaaaaagaaaaagaaaaagaaaaagaaaagagaaagagaaggatgagaacgagaccgccggtctaaaactcgtgggattctacaccgatgatctgcacacaaccacgcacgccatcaaaccaggaccgggtcagtaagtctt

SEQ ID NO: 711 - DNA, 9832 bp, Xanthophyllomyces dendrorhous
agagtgggaaacaaaaaaaattggggagctcgtacctcgacgccagtcttgcgcggatggtttctcgtcactcggttgcatcctgtatgtccccagtcagacgcaagggaaaaatcgaaacatcaacaatcaaaaagaagaagaaaacagtctatcagacgctcccttcttcacacttgacaaatacataacgatagacaaagaaagaaagaaagagaactcgaccgaccccagacggtgagtttctcgagccgtttcgagcagtctaggatatctttgatggtaaagtccgagacgttcccttgtttcaagcagcccaaaaaaaaccgaaataagacacacacgatcacacaaccacaccgacaccttgggaagagaaggaaaaaagggggggggaaagagatcaaactaactgcaccatccgacgtccaactctttgagcgcggtgaacgtatgggccctctccgtctctccctcaccttcctccttccctccctcctcggcctcatccaagacagtcgtcggtcccggtctccccctctcgtcaacgtcctgaccgggcacggcgatcggtctaccttccggtccaaacaccagttccatccattccttctccaacgtcttccacccactcacgttcaaccgttcgagatctgtacccgccagaccggctagcgcgtagatcgtcttaccctgcagaccccagtttccttgaaggttcacttcgagcagcctgttttgttgaccgtccaggtcgcctccgcctccctcgcgtctggcctcggaccaggcgtcaaagaacgaggcggtgccttcgtcatctaattccggaagaagcgacaagtcgagcgactcaagtctcccacagaacggagcgatcgcactcaagagatcggtcgattgaaggtcgacatgggatcccagcgagaggtgcctcaggctcgatcctaccgtcgttaacacggccgtcagttccgggcatggagaagggaacgacctcgtcggtagcgatacgtccaagtacgtcaggccctggagagaacacaggggaggcaaccaactctcgtccacttggggaaaaaaaaaggaaaagaaagaaaaaataacaaaccccccattaaagagtgtcagcattgacgtcaacatgtcgtccaacttctcctcatcctaccctcctctcctgccccttcttgacaaatagcaaagaaagtcgaccgtacgttttccaatctccgacaacctcaattccttcagccctggattcttctcgaccaacttttccaaacactctctatcgaacctaggactctgcctgatcaagaacccatccagaccgcctctcgaaccgacgatatccataaactccagccaaccttcttttctcaccaagaacggtccgtagagctcgagccgtttgagatgaaccaaggattttccccaggagagaagcgcgctggacttgagttgtccgcataacgacagcgagagctcggtcagacatggcgtaagttgacccagagctgtggttcaccaagtaagtcttccgtgctcgtgcgagtgtaggtctcaagaggcaaagagagtggctcactgataaagtttgcgtccgtgagtagagtacagtccctcatagttagctttgtcagtccgggctcatagaacaactgagcagttgcacccgtcctgtgaaccccgaacggcacgattcaacagcttagtccatcaggatgaaaggggagggaatcaaaaatcgccagaacaagtaccgttacgtacatctttctgctcttacaaataatattgttgactttttccatgttcttcggtccgatgtctcccagagactcgacatcctctgaatatttggccacaagcgagatgcagatgtctgtcaacgctgggattcgttcccgctcctcgtaatgaacaatctgggggggggaacgaaaacaaaaaaaagagcaaacgaagtataagaatctgggaaaggataacaccgtgtctggagatccaaaccgattcgagacaaacctttcgcctttccactttagccacaggcttctttttggcagcagcaggacccttgtacgctcctagaccggcagtgacagcgcagggcctacagagataagtggatggatcatcgggcgaaggaggagaatacttggtcttatcgattgaatcaaagagagatacgggacacgcaaaggacgcacaccatcagccatctaagcatgcgcacacatcaacctatcatgtacctacgtaggaaaacgtctttccgcactccccacagccaatctgagcgcccatcaatgggggaccgctagccggtgctcgatttctttcagctggcgtctcgtcatcactaaagtcatcatcgtcatcatctcctctagataaacgggacctcttggctttaaatgctttcttctgagccgctttgagcctcttctgagcgggcgttagaagagagtcactatcggaagcatctagatcggacgagtccggatcgatctagatgtacgcagtacagaagcgagaagtgtacacgatgagtcaaacgagacaacaaacgggatattaaaccaagagaatcagactgaccacagctctcttgtttcctcgggcagcgctcctctccactctgcttatcgcagccagcgagctcggtccaggaccggcgaccgactgatctccaggagtcgactcgcgagtctcctgggtgatctcatcttcctcagtgatactcgtttgactttctccattgacgagagggtttcggtagtgaagacctgtaggtgcggtaattccttgttcctataccatcatgaaacgagagggtcaacgcgatatttcatgaacaagacttttggccacggccacgaaagaagctcgaacgcactctaagaaacgacgttaaagcagaggtcggaccagtgacccctccttgtctacgagggggcatgatcagtatcaaagaatgtggtaaacaaggaaagacaaaggtgatgagcaagtgagagttcaagatatttcagtggcgaatcctttagcggccaaggaagcctccataaatgaggctggttactaacctcagaacgcgtcaatataaccctaacgtaatttcaacgcgtctatagttctgacgcgtcaaaacgttcatccaaagccacaagaatatatacaccacatcgaacacacaatactgatatgagcgaggagaattcttagtgagtacagctctgtttatcttcttgacaaataaagctcctcatgttcttattttgctattaaaaacaattcaaaaaacccaattagcgaagcacaacgattggagaatatccgggcaaatcaagcccttttatcttccctccaattggcagccggaggagcttcagctataggcatcgtcaaacgatcggctcctcctgcagaaggcacgaaaaagaaacccaggactgaaagaaagaagaaggattcatcggtgatagaggtagcaacaaggcgaacgagcgcgcgattgcagggtattgaggctgattctgagaccctattgaagcaagctcaggtgcgtttgtttaacatcatgttccacctcctttgtagatattcgggcctgatagttctcatccaaacgataaaatcaacatagttggaagaagcagaggcagctatccgaaggaaggcagcgtacaaagctcgacatgcgccgtatacgctagactcgctacccgaacctattccgaaggaagacctctccgcactcacatccaccttgtcctctgcgacatcttctgttcatacccggtcccttccatcaaacccatcggctctcactagctcaaatggcgaatcctctgcctcatccgagattgccaaactccgatccgagttcgagggactctcggttctctcaaccgcaaagatcacgtccgaacgggtgttctctatggtcgttcatcccgaaccgacaaagacacttgtctttgtgggcgacaaattcggtcagctcggaatctgggacgcgttagctgacggaaagaccgagaacgccagggatgaggttgatgtggctgaggatgaggaaaacgagacagacgggcagggaaaacattggaggctgcagctgcacgggaccaatagtctgagctgtatgaagatcagcccttcagatagtaccaaggtatgtccttacttcagatcataatcgtttctatgattggttgacgcctgtatgtgcgattcgaaaatactgtatgaagctatatacttcgtcatacgatgcctcaattcgcgtacttgaccttcgaacgcagtcgtcgctcgaactattttctcatcaaaacgaagatcggttgatcacccatttcgatcttcctttatctggccaagagatctggtcgacagacagacatggcgggctcagtcattgtgatctgcgagaggaccatcgatctgtgaagagaagatgggacatcggaagcggcaagaagattgggggtgtaagcgtgaatcgtgagtaaactgacaattcctctttccttgcccccatatgataggagtacatccacttgagtcgactcacttgtcttcttccttcccgttgtccatcgtcgaactagctttgcaaccccatctagtgtgtactgccagtaacgaccaaacagttcgaatctgggatacccgacacctctttagaattcagccggatgcttcatcttccccttccccacctccttcgccagtccgcgctccgtctcccgagacgaaacctcttcgtactacctctcgatcaacacgagcgagccgacgggcctccgccgtcgctcgctctccttcgctttctccaccaccggctattgtcaaacttgagccgaaggtggaaagagagaccccggctgtagagatcaggccgacatacccaacagtatttaatgatcattcaacgatcgtagagtatcaggagaacaaaccaaacggaaacggtctgatgagaggtctctggagacacggaaaaagttgctcgagtgcttattgggatccatcgggcagaagattattgaccacgagttatgatgatcatatccgaggtctgttttctttttttcttctcttccagagcgcaaatcaagcatgtcttctcttttcatttctgaaatctcatcctatctgattatgtttcgtttgtcctccgaaaccacagtgtgggatatcgacccgaaatctttcacgccagatgaaccactgacggagaaacagtttgggaaaccgactatgtcgatgaaacatgattgtcaaaccgggcgatggctttcaatccttagagctcagtggagtggttcgtccgttcacctgttttaatctcctactctgtttttgttctaactgcttaacttttcattattcttcacttctgtgtgtcttatgtatttccttacgccgggtaaacacgccaaacagccaacacagatatctacccattctttacggtaggtaacatgcgtcgaagtctagacgtcgtcgctttcacaggtgaacctatcgcgaggttgttcgatcctgacttgttcgttctttttcttcatttgcttcttctttgtcttacttcgattcctttgtggttactttctaactctccgctgatggtctgatgctcctttcatactcgcatactcacaatgacaacgaaaacgaccaaaatatatacacagtataacagcagtcccagctgtgacggcttctcatccatcggttatcaatcacgtcatcggtgggaatggatctgggaaatgtcatctctggggtcgagcttaacttgtctttcccatgctttatcctgtattcttcacatctagttcgttcggttcggttcggtatggttgaaatttggatctagcgttatgtcggatctgtatcgtcgattttcaaaattgaaaacctctgtagttttgaaatataccaaaggacaaacacaacaatcaggaatggcaagaaatgtcatgctagacaacagtttagaaacgaaaagaaaagagacaaagataaagacagcgaaggaaagaaaagaagagacaaaaagaaaacgtagagcagtgaatgagggaatctttactttgtctttttaaaaaaatttaaaacaacaagaacaagtgcgaaaaggctggtttaggagggagagattcagaggggtaagatggattgggtgttgaaaaggggaggttcaaaagagaacgaagagagagagaagaaagggataaagaggctagcgagtgacaagaagccgaattgagggcaggatgaatgatggaagagtataagtgtatatctgactaggaggaagagcggatgtgtatgatgacgaatacgaacaagatgtagtcaagaaatgatgaaggaagagggaaggagagcgtagtacaacgacaagacctgagaacggaagaagagaaaagaagaggaaaggtgcgctcgtaatcacacaagaacatagaacggctgggaagacagggatagagaaagaagaaacgaggatagataggagaaaaaagcatatacaggcgagcaacagcaatgctcgatcaaaccagataaacacagatgccggtcctccttctctctttggctagattttatttatttcgaaaatgtggttcaaatcaatccccctttacagcccagaccataaaccctaatgaaaaagaagaaaagaaaaagcaaacagaaaaaccgcgaaaaggaagccctggagacgtgaggtcactttgcaggactgacgagatcgtccatcatcaacagatccattccatcgtctccgtcaacatcctccccaacgtccatcggaaggctcaatcccaggtgcgatctcctctgtccgtaatcaccagggctgggtgcgcctcgaaccaggaattcgagaccgcctagtcctcggggactaggaagtccgttcgaggcagtcagcctggtgtttgtatttccgttctgggcagcttggagaaagccaggaggagcagccgagcttagattgaactttgcagacgttatacctcttcgctgagcaagattcaaattcgccagaccgagggatgacgtcaaaggggagcctccattgtaaggggatccatcttgtttattcgtgaggaacaacgatgtctgctgctgctggacaggtgggtacggctgagggtgaggatgaattggtggttggggctgaccaagaagaccggcgatcggggatgggtatccggaattgaaagtcgaatagggcgacctgggcgaagttgaggaggatgagatggtgtccggagtggttgccgcccgatgttgggaatttacccccccagcacccataaagctggcgaatgggtactgattccctccggatggagccatcggctgggaaggaggaagaggaggcagtggggcgaccatctttggcggaggcatcggcatgtttcgaaagaacggacctccccacccctgtggaggaagcggcgcagtgtcctccatgccatccgggtgaccgtcggcgtcgacgttgaaagaagtgtcaaggaacgaaaactcttcctcaagggaccatccgtcctggtcttgatcctggtgggtcgaggctgacatcgaggtcttagtctctcgataaaggtggtcgtcagcatgatatccagtttgccctctcggtctcgacacaaattcgtactcggcttcatcagcgtcccagttgttaggaaacgcggccggataagatgcgctcatggtgaactggtggttggaccaaacgggtacggaagaggaagagtacggatggtgatgatgggaaggcgagattttcggtccttccgaacaccgttcgcacacagggtcttctgaaagaggcacggatgaagaccggagcggtaagagctctgcacatttcgaacacggcagacaaacagtcggtactctgagaccagacgcggccgtggccgaggccgtcggagggatcttgatcgggctcgagagtgggaccgactggctgatatgactttcaaggtggaatgtggcgggcagggtagacgaaagcgaggtgagcggcctgatgggctgctggtcaaaccgcgccttctttttattggactgaggcaccttaaggacgacgtggttcgagtttgtgtttcccaacggaaatccaagagatgaaccgctcgagatggagtgtcgtttctgccctttcttagctctggcctgaaattcattgtcggccggaatagcaatctgactcatggagagttcgtctagtctgccgagcgaagcggacatgctcgacggaggaggggagtcctctgtggttcggggcggtgaggggaactcttgggtagagaatgccggagaagggagagaggaagacgcagtggtcgagatggaagccgagcgagaatgtcttgtatcctgtgctacgttcgcgtagggtgcatacccgatgaagctgttggaggaagtcatcgacgagtgtgcgctctgttgtctcggcttgagctccagcttggccggccgaccccgttggggagggtcttctttgggctgatgataaggatgaagaagtgtatgcgggttcagctaaacggtttttttttgcgcacaggacgtatgcgctgtcacaagccaggaagaaacagaaaagacacgcccagaacaaaacaaacatcaagattccaactaacctcggtagtggtagtggcggcggcggcagcttccctggaaacttttgcggcctcagcctttttccgaccaccgagttgagccagaggcctcattcgtccgtgggtctgaacgtaaagtccgcatgcattgctggagtaaaagaagcagaagagaatatgcttagcaaaaaatgttgttttccaattacactcgacgaaaacaacacgagcagacaatgcatgtataggtgtgttgttatattgctcttgaaatgagacccatcgaaaaaaaaaagctcaccagagcttttccttgttcaaccctgtccgccaaagactggtcatggtcttttcgtttaagtgaacaggatgaagcaagagagaagacaaagagaatgagggaaaacaactctcggcatgtcagcagggcaagaggatgacaagaggctccatggagagtaagagagaaaagattccggccggggacgaccaaagcaacgtcccttccctcgcgcgtcccggaatgtattctgggtccgtgtttggaaagggcgagcatagacaaaggaagagagaagaaaaagagggattacggacctcgtcaataccgcagtggttgcagttaccgggtgccagtcgtcttttctggacgggcattggacgaggctttggtgcaggaggaatgatgggatgcttggtgggaggggtgggtatgacgactggagagcacaacaggaaggtcaagagtgagcgaaaggaagaccaaacgagatagggttagaattcaagttcggggacggggatgctatcccgatgtgaggcggagaacaaagcgaggagcagcgataggaggagccgaaagccaagaagcaagaagctgtgacactcacacgaaggaaaagaaaagaaggagttgaagaaagaaggcaaagggaaaaggaaaaggaagaacaaaggaaagggaagagaaggatctcaaccgagaggagttgtgggtggttgggaggagaagagacaggaggaagagaagagacaggaggaagagaagagacaggaggaagagaaagagcaagacggcgaaaggaaggaaccgaaagaaaccataaggcaccaggcaccaggcacaaaagaagagggagagggagagggag

SEQ ID NO: 712 - DNA, 10501 bp, Xanthophyllomyces dendrorhous
gagagggaaaggagaaccaggtacaccgcacagttcgctcgcctcgcctgacgtctttggggccgaagcggtccgtttgaatgtatgtgtgggggagaagccaatcgatcggtcacgcagttgtccacaagaacgcgtcaatcacatcactcggcaccgacccgcgatctagtgccacacatgaggcgcagtcgacctcattccaggccttcgtttggtgtctgtgatcaaagagcacttgcgcctcgtcgcaatgtgctttctgtgtgtgtgtgtgtatcagactttgtatcgaacaaggtcaagtgcgcgttcattctttgtctctcctgtcttttgcccggtcctactgtatgcgctggcagttttggactccggttagtaaccatttggacctgtgtccctctgcggactgtggttttaaaacttcaattctaatggctgccccatgaacgttgaagcctcgtaaggttaaactcgccgatcgacctctgcccctttcatgtaagtatgtaagtttgtatctggtctatcatcggcgggtctgtctcatccttgttctcgttcctagtaccattatcgatacttctaatactgcttctattcaactcgttgggaacctctttggtatactcttatccaaatgggttgttgactatttgactgagtgcagtaccgatccagcgagaagaaaaataagagataagacacagagaccttaaaggaaaggaggggcaaataaatagaccgcccgtatacaaagtgcacgtcagtggagatgtttcctctgccctctttcttttttcattagtagtcacgacgaacgttgtgtccgcacacacgcgcacgcaccttcctgtttgcttcctttggttatcgggtagccagatattattatttatttctcatcatccatcatttctttggataagaatacccttattgtttattatcgctccgactctcaatctgataaccaatatcctcatgccgttttacactgtctactatccactgtttgttgcatattacctattctctacttctcttccgatttttctctcatcaactacacgtgtccttatggttcatttcatacagctcatttattcatttgattaaagaaagaggaacaaaaaagcaaaaaaaaagactttgttttccccgcgttcctctgtgttctcctctgttccgctctattcctccgtgttctcctttgttcctccgcccaaccgctttacaacttttaccaattagccctgaatctttcggacgacctcagcagtaacctcgtgggtctttgccgtcccggcctttccgtttgcgtcgtacaaatcctgagtgagcactctgccctccgccaagacctcatcgaccgccgtgtagatcctcgaggcttggtcggtgtaccccaagtgggagagcaacaaagcagcagatcggatggttgcaattggatttgccaacgcgagtccttcgatatcaggggcagaaccgtgtacgggctcacccatcacaaaatcgtctccggcgttcactgagggaacaagaccgagggaaccgacgagggcggcggctccatcagataaaatgtctccgtacaggtttggtgctactgccacatcgaaagcactattcaaatcagaggcaagaaggagcttttttatcagtctgaagaatgatcgatccatactcagccatctaatacatagcaaaaactcacgagggatctcggaacatcttgtagaccatgctgtcaaccagttgttcctccaatgtgatacccgcccacttttccttaccttcagccgagtcaaacactgctcggcaactctctctgaataatccatcactcaaactgaggacgttcgacttatggacgatagtcaccttggaaggtcccttgtggtgagacccaccagggtttccagctcgctcaagtcctcgaagtcgagcaacctcaaaggccattcgagcgatccgggaggacgctcgggtactgatctgtcggtctgcgatcacgtactttcctcgctgcagaggatccgcaggatccgcagcgtattccttctcagacttgatgtactgtgaacataagagtagacaccatgttgtccgtcagtttctgtacgcttctgaattcacaaaaatcctgaagtacagtatgtttaccaaacattcagtgttctctcggacgatgaccatgtctactggctttccgggcgcacccaagacagacttgacaggtcggatgttggcgtacaaatcaaggtgctttcggagagctacaatcggcgaggagtatccggctactcgagtagaaggagagctgtccaggaagggaacgaacgcgagttgatccagttgtcagcaaagtcgaacagaatgaataagaacgggccacgagtagaaagaacttcgagctcgaaaaactcacctgacggaaccaaacattccaccatcgcaagacttcatgatctcgatagtctcttgaggaagagcgtttcccgttttgagaaatgttccccaaccggcctcgagtgggacgaactcgggcctaggaatagacgagccgagggcaagaagaacagcctcagcggcgggcaagacctccttacctatgagattccaggtttccgttgcggtcccagagaaatggtgtcatctcttcatcagcagcttcatcgtaagtatgtaaaacacatcgagcgagctcaacaagtttgacacataccgattccatctggttcaacatatgttcagaaagaatgatcgttagttcgtcctcgcgtcatgtcaaaagaagaaaaatgtaggacatttgaggcaaataatgggtgagaagcagattatagaactcaccggcagggatcatcccgagtcggagggtagatcgagcgagagaagccatttatgtgttctttgttataagtagtttacgtgttgaaggggtgatggttcttttgtctgtctgtgatggaaggttgaggatgactcaaacaaatgaagaaaaaaaaagcggtagcctaaggttttcttcattggccgatccagtcttccggaagaatttttataaacgaatgcattccaaattgcgtatatctatgggtgaatacccaatataagatcttatcaagcaatacaatgtgataagttgctgctctgccgatataacatctcaccccgctaagcaggtcaaaattattatcaccaacgccttgggatggttcatctagatcaaacattgatccttcagacaatagtcatcccatgttgcctctatttccaagccttttgacccttctcctgtacccagcgcttgctttcgcatccccacaatttaattcttcctcggaagaaacgttttctgaaactttgaccatcaggccgttgtcagatggtaaagtcaacgctcgatttgagtttgtcactcttattaatcaaacctcttcaaacggttggtcccaagcttctacttgattcgacaaccaaatctgctatctgatatcgatggtcactctcatacaaatacgataggccacagtacactagcgccagcctttattctttcgttgttgaagaagcacgaggcccaggcgtttgagctagtattgacagcaggtgtttgggatcattccagatggggttatcctctttctgaagcaggaggaacaggagcagagctctgggcttggatgggagtttctgccaagtgagcctctctgtttaatctgttatttacttactcatgcttccatcatattcactcaactaaactgaatgttttcatttacgatggaatctttgttcagatcagattctcgacatgaagctcttacccaatcgctttccggtttgttctgcgcatcactaggccagtcactgaccaacggtttcaccactcgacctcatatacctcatctgacgtccgaatcaggtcagatcttttagcgattttctctcaaccttctgttctatcactctgtacctcaatctcacctttttaataaatggccactgtttcaggttctattccgtaccacacgacatcccctccctctggactatgcaccgagaatctcactcctttcgtcaagctgttaccttccaaaggtcattcaggaatatctggtcttttgaagagtcatcgagttctcgcaggtaattggcattcaatgtctgtcaaagctagcttgatgggtggtctcagcgatgtggccagatttggaccgagtattgagcatatcgagattcggatgggcttcgagatcgtttgggatcttataggaaggaatagagggaacgaacttcgaggtaagtataattcctctttctcttcatcagctgctttcaggtgatattgagatcaattggattggttcttgcctgctcctgctagaccttagctttcaaaagatctttcacgcatccttaccaagctcgttccctcctgtatcttcttccgagctcattcttcatctgccttctggggtagacgacaaggactacacaatcttacctcatgggtttcaaagagtagccgagcatggagtggacagtgtccgatgggacttgaagagtggtaagtgcgagagagccgtagacgagaaggaagctgagaaggtcgcttaccaagtttgatcgtatctgtgacgttgggggtctaattctttcctccagccgatggtacatttgatatcgaattcagatacaacgatgccagtgaatttgtctttcgtgagtcttctctctgtacctatcagtttgtattatatcatagaaagctgatcgctttgggctattcattcttataacaaacatgcgcgtacatcctcacagcttcgacttataaacctcctccactttcaatcgaacgttcagttctgggagccacccagatcgaaggtgctttcaggatcactattgcgaataatttggatgaacagaaagaggttttcttattagaggaatggccttggtgggtcggtggttggttaggcgaacgaacgatcactctagatggagttcccaaacgtgagttcccttcatcttcatatttccccataccaaagcaaacgatgacgtactgagaaattatttgagaaaatcatgaaaatcctcctataaaacgaagaggatattcttaggtcaatctcgtatacgccctccatcccgcacgatcaaccaaccaccttagtttcgcatctaattcttccacctcaaacgaccatcgagatcaattcacccttcattaaacagttccttcagtataacgagcatctccctgacgctagtcgtggtttcgaactatgcgccgcgatcttgtttccttcaaagccaccacgtttaccatctttattgccatcttgggagtcaccgccatcaccgacaaggatatatacggggaacgtgttgatcgatctcgctactccagatttctcgatgccatataatgtgattatcatgagttgtactttactcgctctactattcggaaggtacgtaactccttccccttccttctctctttctttgtcatttattgtcaaagaaggtgtacattatgactgaacaaagaatgccccatcatcttcgtgttctcgaaatcggggtctttgtctatcaacagtgttttcaacattctaactcgtaaactagtcgctatagattcagaacatcctcttctgaatccatcgacactcgacttgtctgatccgacgacgaagctagagaatagtaaggagaagggtgcgccatttagccacagcacgaacaagctcaaggaggatgtacagagtactctataacgatagtgctgtattgatatctatatggttgcagttcaaaggtcttcatgatgatcacatatattgtttcaattgattgagactatctcaagaggttgcagggagtgttgtttccccttctgtctctctccagtaccacgccagcatggcaagcacagcaacaaaaaaaagaaaagaaatctacaacatccgcctggccaacacaacgatcagcgccaggatgatggcgaggaagattgaatcaaaccataacggaggagtcaccggattgtcggagtttctagatggaacgatctctacaaccgtagctggcgttgttatcgaggccatcggtgtattctcagtgctgagcacatcggtttcgatcggttgaccaggagcgtctacgtcctgcaaggtggttgatggactagggggcgagataggatcgatagtttctttcggtgaagagacaataggtgcctgaacgacagccgatgactcaaccgactgaactaaaagaggggaaggacagggaatagattggtcggtcgaaactgtcgaattttggtttgacgatgaaggtgagccatccgcaggcaaactcgccaatgtactagaatcaggcaaaagatcctcattcgattcttcacatttcggacaacgccattttcgagatctatcatacagatagatcagaaggaggagaagtgaacgtttaatgatcagctcttgaaaggatcgagagccgcctctcctaaagacatccgaatgaacgcacaatttggctagtcgtcttctctcttcaactggatagtcgagagcaccaacggatcgaagagcttcccctttgtttccccagaaggaaatgaggccaacgatagctattagggcaaccagtcattcacaagagcatcacacttgttatgttaattcctattcttaacagagcaagtaacaagatgaaatctttggaagactggtcctgacctgtccgaactccccaagcaggttgccaggatcctgcatggaaggatgtcagaccatctatacaaatctgagtccgatatgcgagaaaagcgtgtatcaacaagcaaatggtcaaacacttattccgaaaggcattcatggatatagaatgtctacctttttaccgacttcaaatcttccattaggcgttaggatcatcatatcgggcgcggcgaaagggtacgatggctaaggtgacatcatgtcagcatctgggtcgtgaacagaaatttgaagatcaatcgaatttttcagttcctcaccggcagagatattctgatatgatagagacctgaacaaaagcatgtagacatgatatatttagcttgtgaatcaactcatctctatatagctgagtaggaaagaaaggcgatggaatctgacctccttcgaactcagtgtctgaagcccctcggatagtaccatgccattcctacggactcaagatcgtacagcgatcagtttaagtctaggttcatgtctataaaaatatcatgaacacacaaaaatgtcatcctttggataaacatgatcgagatcgttagtccatccgaagagaagtcacacagtatacagatgaagcagctcagatttggttagcccggaacgccagagttaagtcggttatttcatatatcagtcctgcactcacctctaacggagctgcagaatagtcagtagaaagatcctcggcaagctcccgagcttcttgcatgatccttttcacagctgtcgattgtgtatatgggcgtggtacgagttgagttcttatcgagctatattccttcacatgaatcatatattcacacacgttcaaatggaactacataccagaattctttttgttatgcgttgctgtagtagccatgatggtgatgatgatgacggtgatggtgatagagggacattgggatgatgtgtgctaactctagataatcgcttctgccgctacaacttccgagtttcggaattgtctcacatcatttcggtcagcaacgttgagccaactctcgttcttggtggagatccacttgcttcctttttcatccttctgatcatttcctctgtttgcttacttctctctctccctctcatgacgacaatgctcctcggtcgcgcaaaaaaggttctgctttcctacggtattgctaccactcttagtttgctcttcttctttgccttgtccccctattcaccaaacgaaattttctcaagaccattcaaccttccgtcggtcgccttcttgagccctcatgaccgtcccatcaaaagctcgcctaaatcagtggatgaagttgacatacatctattgattcctctttcggatgttccctctcttgagccggtgtcggtccgagccgagcccgcaccctactgtcggaccgtccttacatccttactacgaggctacacacctatcctactcgacctcggaaatcaaatgacatgggaagaaggcacgagtctcaaaatcaacgtcgtagcgtcctatcttgagagactagctgcagcgaagagcaaaaaggagcaaatggtgttaatgattgacggatgggatgtctggatgcagcttgggcccgaggaacttgttcgacgctatgtgagtgacctctctcttctctccatggtatggtattgtccggttctgatgcttagctcttaacacgtttgtgacgccgtatagtatgacagtaatcaaggaattattctaggtgcagataagatgtgctggcctgctccgcctgaccttccacaagcttgtaaggatgtacccacatcaccattcacagcagagctctatcaatcgagagaagcatctgcccgcggattcactcttcgtacgtacccttgttctctcttttcattgtcagtgataagcttcccttccaatcttttgcccttctcttcttctcattcctcttcactaaaatgctcttgcaaacttgatattgcgcaccctttcctcaagcttacacatcagaacagaaagcaatcagccaatcaccccctagatttcctaactctggtactctgctttccacctctactacactgtcttcactctatgaacactttgttacacatcctatcagtcctcatccgattgctcctggtttggcatccgttcctcccaatgatcaagaacgttttgtagagacgttctatacggatcacttgtcagctcaatggagaattgcaactgggttcgggctcaacgtggactatgcaacagagttctttgggacaactttgtatgccctttcggactatgtacttaatacgggttctgccgaaagcaccgaacgatggcctgttgacgaagagaaaaaagaggaagaagaaaggcaggacaaaatgagtctagagaaggcagaaatagctcatcaagggttgttttccaaccgaatcaccggtcaaacacctatcgccatgcacttcaacgggaaagaaggtaaggaagctgccaagatcatctggcgggagatggaatggatccaaaatcggactgtacgggagacgttcgaacagaaatctggagcgacaaagggggtctgggtaggagaggtcggaggcagatggcttgagtgggataaattgggttgtcaggggatttgggaaacaatctgaacccgtcgacggtggcttaattttagcgttttctcccttttttgtttagatactatattttgcatatgtttttctcttgttcacctagatttttctgctttacacttgttctgtatcttatactttgtcttattcgttcgtaaatatacgttgtctgctttattgtcctgtgcttctccattcgcaatcgttcgcttattcgttcttggaccattggatctcctcatgatccagtttgctttgtttggtatattgcttaaatttctttttttcacatccaatgatccacatagttcgtccttgttcaacatttcttcaatattaagagaagaagtaaacagaaaggtaatcaagccaaaaaacttatttgtgtatatgcgaggaacgaactcgaaaaatctacgttccccgcttctaatataaaagaagagagaatctaacatcaaccataccttctcctattcacaatcctgttctaagctcgttccaagattgttcttttattcccacttgtcaagcttcatcgttcccttctccatgaagttggtgtgcatcttgaacgcatttcggagcatatgaggctgatgagccattccctttgccaactgttgattgatgttttgtaagggtagatattgtgaggaaagaagcccaagcgtttttcgagatgcttagtttaagagtttgctcttgaatttatatgaagagaggtgatgaatagaactaacgcattcgtgaagagctcggtcgtagtactatttcaagattcaaatcggtgacattagaaagtgggtaaacatcaattcaatgatgatataaaaaaaaagtaagaataggcacatacgtcgtgaagctggtctctgtagtcagggtgagcacacttgttgatgatcaaaggcgctcgctctcgaggggaaagtccccgaagatcagccaatccttgttccgtcactgtttccccatcattaggacagattgaacaagtgatgtgagcacaaaagtagatagagacaggtttaccatttgaacttaccaatgacatcaagatcgtgctatgt

SEQ ID NO: 713 - DNA, 66296 bp, Xanthophyllomyces dendrorhous
gctatgtatatatcaacaggaagaacaaaccggcgaccgtgaaaccatcaggcaaggcttttcacctctgagggatagaatagaatgacaaagacttacctcggtctgatcgatatgcgaagcaaaaggaacgatgcaagagataccggtagggtccgtcttggtcgctcgtgccgaaggagagtgcatgattgactggacaaaaatcccaaagaaaaaagagaaagaacaccatcatcaacctcatcgcgcacgtccgcaaggtcgcaacgaagaagaagaagaagaaggaaaggcatacaagcttggcgtttctcaggaaatcggctgatccacccaatccgttaagcatcctggatcccagagcgttggtcgaattagcatgagcgtacatgtcaatctccaatggagtgttcatcgcgatgacaccgagccgtcgaatgatctcgggcgagttagcaacctattttggatcaaatgagaggaaagtagaggcggtcaatgcgtagtacttgtgcattgggaaggagagggaaagaggattacctgctgagatcgaagaagaagtcgatctttgtaagactcccagttggcatctgcgaaatatacaaaaacaagaatcagattctgtatcagcctgcaaaccaacagagctgtaaaaagtcaacaatcccacgtacaaaacttttcaaatccctcaggagagaatcgaatcgaggtagcggtggcaaactcgagctttccggaatcaaagaagtccaggaaggtatcctacgatatgaccaaatacagagaagaagccttcaatcaatctgttcactctcgttgctggacaacacgatgatcacgcggttgaagaacctacctggagaacctcagtccaaacagagatgttctcaaagtgagcgtcggcaagtctgtaaatcacaagtaaaatacgttctacaagttgagacttgaagttgtgtgaaaaagctctgtattggtcgactcaccctccgatgactgcaagatcacagcaggagtaaggaagagaaaggttgtcagtaggaggtcgcgcgccgagagagctaccagagatagcttgaggaaagacttaccagcattggcaatatttccaataccagattgaagaggcagcaggttcttgggcaatcgaccagcgtcgacctcggatccgaagaactcaatgatgtggttggcaattcccctcgacatctcatcctgaggggcgtttcgaccggtgttgtcggccttgtctgattctacaatagcgacgaccttctcggggtcgatagggattgagacctgtccgattcgatcggaaggccgaacgatcaggtaaggctgtcggtggggaggaaggaaggattgactgtagagtagaggttcaatagaattcaatcatcttgacatttgcataaataaggagaagcagagaataaaaaaccatacttgatatcgtgaagccccttgaacgaaggaagcctagtgttgacctcgatgatgatcttgtcggccatctgaatgatctcaggggtggctccaacagaagctcccgggacaatcgatccgtcttccaagatctcggtggcttcgataatagcatagtcgagtcggccgttaggcttatcctgtcgatttatttggaaatgattcaacgcgcatggttagaaaaagagaatcaaacattcggtacacgggtctttgcaagagcaatcaattcaaaagacgaaccttggtgtaccatccataggtcaagttctgggggaacatggaaagatgctgatccgcaactgtttatgatgaacacgtcaaccctcttcttttttcggacaagtgcgtccttctttccgccgttaagtaagaaaagaaaccggacttacatctgattttgccgttattgattcccttggcaatagcttttccgacttggtgagggtatcgcctatcaatcatgtcgagctgggcccacctatcctcagtctctggtccagtgctggcgccgacaaagagatcaaatttcatctttccctgaaggttgttggcctcgacgtgatcggcctatgtcacaacggcacgaatgaatatcgggagaacacggagtgagtcacgggttttgtgctagacgaagatggcgcgagaggcagaaaggaaacgtatgcgggcatcagctagacttaccaatatggtcggcgtgatcttggggtacccgacactgtccaggtttttcagaaccagatacatttcgttttccgagaagatgcgtatgagttcagtagattcgtacggcaatagcaaggagagaaataaaccaatgtatcctacccagtgaaacctatatgaagagaagatagagcgccatatcaaagatcagcaagagaagagaaagcagcagttgatacaaacatgtcggaagaaatgtattcaacacatgatgagggcatcatcgacataccagaccatccgagagcgtccccattcttgaacaagttgacgagctgctttgggtcagatacgaccttggagtgaagggacgtcctgagaattctttctttcaacaagtttgaaatcatgaccgagatgatgggataagtccttggacaagaagagaggaaggtgttggtggtagagagttgaaaagggaaggaagactgagaatgaaaaaaaaacaaaaagaaggcgctggaccggggttggtccgtcaatgggcatcatcgctagttggctgtattactttgggggtaagaatgcaccgcatcttacgtagccatatgcgccttggcgcgtaaccgccgtctgcatgttggcattcaaacgcacgtgtcggcggctagatggttacaacatgcggcaatttcttgtcccttccgtttccgctgataatcaatatgccttttggggacgaaggtgtcttgaggttagtctccaagtcccaagcggctatagatgtcggcctcaaaaaaatcacaatggttaggataggaaggatccgagcatagggcacaaacctgattggaaagcatctgaaaaaaccagttatagcgataaacgatattagctgtgagctgatcggtcatgaagatcttggtttccacttcacgattccatgacttgatactaaacgccaatatcgttttctttgagcgctctgtatataccaaggttttagaacagaacttgtagccatttggagcaatgtatgccatgactatgaaacacaggatttggaagatgtaagtagtgctgcgggtgcagtagatcatatatgtagtttagaaagtcatcatatcgaacattgtgagcgtggctacagaagatatgggagaaaaaggtacaagacacatggattgataggcttcaaaaagtgagtggatagtgattcgagggtcaacaatggccggggagcgacttggagttcgagatacaagcctcattcgatagatggaatggttcatgctataccctatcagctctcttgaatctattaagtgttcgagttcaactaaaagaaagcagtattctgtgtgagtcagccaacctgacccatatcaatatagcacacgagtgatgtttcttgacaaatgatgtttttggaagagggtgacaatcgatctaatctgatttctaggattgtcaaaggtaaagttgatcgattaagataagataatatcttaactagcctagtacttatgtgatattctagttattcatcttttgtaacggagtcttaactgaccgtcgtcacgcagagccagaaaaaaatatttaaggcaatcgttctgctagtcctgtgcttttctttcttcaattatcacgatcctcttcagccttgcccttgacgtctgttatcgaatagccgttctggtcaaggatatcggattcagaggggcaggtgttcttgaggcgtctcctcttttgggagacggcatcttttgttgggtgccgggtcggagaatgacaaggggctcttaatcacttaatggcagggaatcctacctgctgtcgagtttcatatgtcaccaacattcctttttgttaccgagtgtatatatcatgttatcttcgttgaacttgtataatttgagtcaatcacagaagtcttatgagtctcaaaaatatgagaaatgaggatgacgagacgatataaagatttatcgaaaaacgtgattatcgttgtttataacatcgactaatcggtgaccatggaagtcaaatccaagatcatcatcaatcttccaccccccttgtcgtcactgtgtgtatcttctgttggttttgaagcagtacgccttcgatgtccacccaggtcgccggtacaaattcggtctatacgtcaatatctgacaacacggacgagactactcttccaaatgtccccactgctatccaagccggtctgcttgaatacggtacggaaggactgaacggaaccgacggattggacactcaggtcgatggaccggacggacggagggtcagtatgtatgttgcggcgttcgaaggtgggttacagtttgatcttgatttccgatcttgcttcggtctacatgcggttctttgtgtccttgctcttctttgattgtcttatatctttcctcaaaaccgaagactgtcgcacggatatctccggtggcaacgttgctcgaacagacttcgctgaccatctgctggttgaattcaatatgaaacatagacatgttggaaaccgttctagctcaagaatcttatttgttctcttcgacggaattaaaaacattcgaacgatacaaattattgagttgtcagtcgttctgtttatgcagtgaacttcttggagttgtattcactaccaaacatcacttactgttccttctatctttacaacgatagatgacgcccgatatatccttgttcgattacttcttcgaatacccagagtccatcgagtggaacaccttgttcaatcatatacgaaagaacttggctctgggattccagctgctgtggatgaactatgtgtgcccttccaacgtgcactgcctaatccgatgttaccgcctccgactgctacttcatctgctctaaatccacctcctcttccttgttcctctgctattccttcaagtatagcttcgataaaagagaaggacagagttggcaatggatatgacaagggcaaggaaagagcgcgagaggaagacgtggtagtgattgatttgacggaggacgaagagatcgccgacccagagttagccagagcgatgagaatcagtctactctccaacacaattggtcacgcaactaatactcctactatcggttcttcctcttcctcctcccttttctacaatcagagcgacgacaactttctttcaagcgctcctgttacacctcaactttcagaatttctttctccctcaattcaggcggctctatctctggaaacccaagagctggacctctctcacttttgctcatctgctgatggactcgagactggtaaactcctcaggtgtttgagatttgatgaactaaaagacattgcaaggggcatgaacatttggaagaatggtttgactgtgggtaccgttttcttaatacatgaaacttgacagagaattctccaataacgactttctctctacaaatcagtacgatatgctagttcagcatcttctgtctatgacgaaaacacaatcagtccttcctttcttgtctactagttctcaaagtcttagaaaacctgctacgactgcgaacaaacgacctgcgctcaaacaagcaactttatcgtttggtggtgtttcggtccctcctcctcccctctctggtggtatagctagcatgaagagagaagacagcagagctagactattgaagtcaatcaaaaacgttatgggtagagcagtggtggttaatgatgatatcagaaaactctggaataggttaaatcttgtgttctatagaaggtttgttgaatccattccggtctcctctccttcgtttgatcatctcttctgtttttatatcctaactcttcttctcttgtaatgacgagcacagcacatccgcagcaccttcgatactccttccgcagatccttagtagagccaacagatggcattaccctaaatacatcccaacccgaacactctcacttttccctgatcgggcttctctggtctcatacgaacaagctctcctccttgaggttgaagtggacgatgctctaggtgaacaggaaactctgaacggcaggcaacctttttctaaatcggcaggaccgaacagtaagatcaattttggtggagcattgggaagaaaagaaggcgcgatggtggtgagagctatctgggaagttgtttgggacagatggaaggaatgtgtcaggtcggccaaggagagagatcaagaaacttgtggacccagagctatagcagataggtttcaacctggtccgttccgctccactctgtcctgttcgagattgtctcgtacttgaggcacgggagaatctaatatcttaacttaatcggcttatcaggtcatgttttgacgagaattatcgctaaaggcgctaatgctcttggggtgttacacgactacgacacagaatgtcgagttctcaaagcacttcttgaccaaaaagtgtggagaagaggaaaacgagggttcgtcccccttgtatcacgtcgtttctttctcaaatgatgcatcttcggtgtcttatcttcgagcccccttttccaatctagcgcttggtatgagagattggctctcgttctgatgacccactacaaaggtgatcaagaattggacaagaaggaacaagctctcgatgtctgtctagatggattggaagatgaagacactcacttaagtgtgtaaccacgtcgtttctatcgtctttctgctaaacccggaaggttcattgcttgttctgatcggatacataccttcccctcttttggataatcagtttaccgaccatctctcataagacgtctaaccagattagagaagcaactcaagattccagcgagggactgccatcgatgtgaaggagaactcaaagtatgcgaaaccgtcacacttggtgcacagagagtacgaaaggtagaaagtggattggatcacgaatcggatgaggacgacgaccttgaggatcagtccatagcacaggcgcgatataggtcacgctcgagatctaaatccaggtctagatcggtctcgatatcaagatcttttggaccccaatcaacaaagttggacaccaaagattcaggtgccagctcgagtgaggctaagaagccatcttggagcggcaaaagtttgtgggtaggaagaaatgagacagaggtaggggtcgaacaatgggtgctggaacagtgggaagataaaggctggaaagggtgattccatacatctgtgtttttcctttccgtgtttctatgcagaactatagttgacttctgtttgaggttgactgtaaacaaaataggttccattcagaaggttccatcatcactacgatctttggtcttctcttttgggacatatttttcgccgtcgtaccaggagcatttgagaccgcatttcagacggctccgctcgatctaggagaggatacgtttgcgctcggtgcgtccttccaccttcttcaatttgatattaaacactgatgcaaacactttctcatccacctgtaacttagctcgagcacctcttatatcggatcgtctgaacgagatagaacgtggaaacgccggagaaattctatcaagagtggacgatagagaaagagaacacgagacgatgtgtgctggtgtcagttggaattaccagaagcaggatttactagatatagtggacgttagtcatcttcgctgtatctttttgtgtgatagcgatgtagctaaaactttgatccggatgtttgctccgagtcgtgtcgtagtgtcttggtggtctcagcctatcgatcgtggtcagtattctctcctcgaactaagcatgttctctttcctcccttacgaaaatctcatgagtttcccttcgctaacagtgtcgaatgctttgtgaggagtatggccatcgaaccagtggagttccagatcttctgtatgtttcttttttgcatcgcacccataccacaccttcacagttgatcttttccgccctgaaaatattcttaattatcattattctgtcatcctctttgtcatggtgaagagtttggcacgtccctacactccaagccagattcatcgaagtgaaaggtccaggagatcaactttcatccactcaaaagatatggatagacgtcatgttgagtgcgggtattgatgttgaggtctgtcgagttgtggaaaaagcgcgaagtttcaagagagtcgttagtggggatatcggtgttgttcagactggtggagggggaagcacggacgagaagagaaaatcgaacgtgctgagcgaaactggggagactgatagagatattgaaaaggagagtgggagtatgagtggtgaaggagagatcaaaaagattaaggttcatcgagaatcaagtctagagagaagaaaaagtgacagtatggtgaagaaggaggttgttgaatatatatctattgatcattctgactgaacctatttttcttgatttgacacaatactcggattattgatgggataacttatgatatgcggaacaaaaagaagggcacctagatataagcctatgaaagagaacttgaacggttaacctctctttcgtcctccgtaaccccatttgtcgatcaagaactgagtcataaattcaaacaactctctatccagtgtatttacccccaaaaaacaagaataaagatgttcagtatggtttattgcgcatcccttgcttcgtgggctcctctgagaggaacacgatgaggagaaaaacatacctgtaggctcctccacgagagatcgaatgagcggaatcggtgaacatcctaaattgatactttctgactttgttcctagtaagcttctccaacaaagaagcagagttcgccaagtgaactaaggtagggttcagggcgtttgatcaagagacaagcagagcgtcagatacaagcccttcgccatgattgtccagtttaggacatagatttgactatagggacaagaaaaggaagaacccaccgttatcatctccacttccatgggcaagtagataatcgacgttctggaaaccagtcatattattgaccccgccagctgcatatccagcttggttctgctcaggagtgagcatatatcgttcggtgctgatatgagcagtgttgttttgggcaataagacgggatggtgtcagagcatatacacaaaagcggtttgggactatatctgctcaacttactaaacggaatcgtaatacctaaaccaaaaaagcagaagattagtgttcgtagataggcaacatccctgataaagaggcaggtacttacttccaatctgtcacgggagctacagagattccaagagaaatgacaccagagtcggcttcaatgacttttgcagtcaaatatcctccaaaactcctacgtaatcccatgatacaacctatctagtattagccaagaagggaagataagcagaaggaggagaaaaacgataagcgcaccatccccaaattccgactctccgtttgtcgacatagagcttcgtgcccgcccattgtcgagctgccgcaatttgatcgatagcttcgtacgtccccaactgtcctcgaattgggtctctgttgaacgtaaaccaagaccgtttctcttgaatgagcaaactgacacatgaataagatataaagagtccaaagtcgtacctgaatgcttttcctttaaagccagttcctcttccgtcgacgatgagaacgatgtactttaactcagtcgccaaatagtcggcccagccaactgcgaatcgagtgttgaccatctgagagactgggccgccataagctacatttctccagataggtgaatggtgaattgttgtaggttaactcgaggaaattttaagtataagaagacttacgagccaacaaaacagggtactttgtgcgtccagattcatccatgttgggcggtctgatttctttcacattaagctctaagctcaaatgaatagttgatcattcagcattatgacttcaatatgtaatgaggatcatagaaacaaagcatctatctcaccaaatccgtccgatagaatggtgtattgagaggaagatggaatgataaaccgattgagagtctcgttgagagctttgttatcttctagtaagtaatcaagctctacctcaacagaaaagtatacagaaacggaggctcaattatgaatctttgagtcaaacctatagctgatatgaaacaaatcgtgtagcgaaccttcaccgcttgtctgcctgattttttgccaaggaacatctggcccttcgtaactcaatacataaaagccagctttcggggagaatgaaacagtgtgatagcttggtcgagtcgagtccgttagcgcactgattaccgagttgaacgtgtcgtccgaggacacggtgagcggaagagtggcggagtagagatgtctttcagtagaggggttggcagcggtaaaataactgatgtgattttcagagaagattgtgttggttcaataattttcaatcacaatgtctgggctggctgacaaaggagactcacacaatacccaagtcttcgttgaatcctttgatttccccgtcaacctcccaattcccttcggttatccagacaggtttcgcggctgatgtgagtgggaagaaggcaatgtggttaaagccttctgaattggggatcacatctaggtaaccttgaccgtaaggaaccacatattggaactatggattgttcaaataggaacagaacgttgaagatagatgagctaacaatgtttttctttagtatttcgaggagaagatcatgagtgcgctaatttcaacaaagaaaacaactcacatgatcaagccatccttttccgccattcaaactcctgacgatgtttcctcggatcacaccttcttccgctagctttccaaacctatctccttgtccaatctcgaataagacaacgtttccgcttgccgcactccgatccgtctcttttataagaagttgggttttatttacccagaccaaatcgaatatgatctgatctgtcgacggcttctgatttggccaggcgagacgtcgaatactctgttggacgagtaaagtgagattggcatgggaagaagaggagatatcgatggccttagactcataatatgagagtgaaaaaacgtgtgcggtaaccaaagggtttgggtatctacaaagacaatcaatcttagtagtcagcaaaccggctaagtttgatctcggaagaatatagcttgattgtagactaatatagacaatgtaacttacccaggcttgggatacttcatgatcatttcttttgggtagggcttaatggtagacaaatcttcgtcgggatcatatatgggaaactcgtattcaggcacatctgtctcatcgaaccgcaggtagacgatttcctgtccagaaggtgagaatttgaatgcaaagtctgttccaaaaatctcttcttcgtagacccctagtgatacgatcaagaaagcattattggtccggctggaatgaagacctgatctagccaactcgatcaatacttacaatctggtactccgttgaacacagttgggcttccatccaatgtaactcggacgcttttcccgattccagttggagtgatatgcttctcaggaagaacatacagatcattcgcggatacataagcaaatccgtgaccaacagtagaccaacttgcataagcgacagtggcgttgagaacgagcgggaaggttttgtttgattcgaaggagtgaatgtagaatttggagtgtgaagagtgccgccattgcttttgtatcaacacagtgaaaaaagtttggatgtgagttgcaatcagtagttcaagcatgtattcctcagaagcttaccttcacacgatcggtttgaagagagaggtacttcaaatcgggcgaactaaacgattcaaccaagcggggtcaacgatgctcaatacaatgagtgatggtatgaagagcgatagatacagtttccagtcaacaaagttgatattgtttcccttctcgtccacaagcaaagttgaattaatcaatctgatttaaccggtcgacaggttgaaggggtgagtaaggctttcagttcaccatagtcaaatcaggggagagggaggaaaggtcaaatcacaatttcgtagagtttgcctgattgacattgtccaagaatatgtttccatcctcatcttgggtggcaatggttccatcctcagctgtgtgaaaagcgagatctcaatctgatcaggcgcgtccgaaagtaaaaatcgaggcgatgacacggaggaattgagaatattcggaccttccttgacccaggcgacattctttctctgaattgcgaaagtgccattagtgacatggtcgagcgtcaagtgcttcctaggtttcttaagtatgtgtgatagaggagtcgtccacgagctagcggcaaacgtgccgatcaggatggcgaagagaacgataaaagccaaacaaatccgtttcctagttcgagccggctagttcaggagtcatgataatttcgcatcattcggaacacacaaaagcaaggatcgttcgatttgaccagatttctgcaaaccaaaagacacagaagaacctactttactacccttaactaactcttgtcgagttgcccatagtgtatctgtttcatcctctccctctacttgttcgtcaagttgatcacgcccgtaatcaccgtcctccaatctgttttcctcttcgaatcggtccttttcttcaaattcttcatcagagctaggaagggacgagactgagtgggaccccagactgaagattggtggataaggtgggagaggtggttcggctggcatggatgatggtgttgtggatgtatggtcttcgagagtatgcacgcgttctcggctgaggccgtcttggttatttttgaatagttacattctaatcaaatccaatacataggcaagtcttactatgagaaatcaccaagaattccgaagccttcactgtcaggcagaccagaccatctacatatcatacctccaataatcccatacaattccactctagacctcatacatctgtgtactcaacatggaagatactgagagagtcgtgaggacatacatctcaactggcgcttcgcaagtgcctgtggagcttctccaacgtaagaacaattttaggtttcatcatcaaaactcacctgctctccgtcgacggcccaacccaaaccagatgatgcgacgatgacctcactgatcgtgcaaaatcttacaatggatctcttttcctcgggcacagttctcgatgacagctccgttagtcttctaggagttgttaaagcgttgggcgaatacttgacatcaccaaacgaggaactcagagtcagaggtacgcctggccaggaatgatcatggtcttcgatgccggcatgtacttccatacaacacaagttgattcaatcctcctactctttcagcccttggtctactctcaggtactttatccaagctttccccggcaaaaataaatcgtcaatccagtatgtcgagcttcttcatatgtatatgaatattcagtccgatcgagtactcggttcatgacgtctttctgttgtgtttgaaacggtgaagctcgtgtgctttccagtttctattgcgacaagctcgaagacctttacgtgatctctccggctcttcaagggttgtgtgttctgagctccttaccgacatttggctcgggggaaacagtccaagtctgtgaagcgtacgtaatttatcgtccaaaccgaatatctatacagttgttaagcaaccaagacataaagaatctgatgattcgaacgagctctctctcgaacttatttagaattttcgctcatatcaagatgaaatctctcatgcaagccgttcggttcctcgtattcaaagcaattgacattctcatggcgaaacaccgtgatggttagtctgctcttcatcgcactgttttctagctcagcatgtatgctgatcaaccgagatcattgtccaatctggttatcagctttgaaaaagatgggtagtccattcgtggccaaatattgtcagatcgccgacggtgaaaaagaccctagaaatttgttgttggcattttcgatagcaagagttatcctagttgaattcgagattgagcctcatgccgaggtaagttagtttcccttgataactaaggctacaactagaaaatttataactctttgagtcccattatgctttcaggaactgtttgatgtcacattctgttactttccaatcacctacaagccccctccgaatgatccatacggtatttcgtctgatgatcttcgaaactcccttcggttcgtatggcttcatgttttctcgaacggctcgccaacatcattcaactgattggcgctccgttctcatacccgttctgatttgacagatcatgcttatgtggaacacctctgttcgcaaagcatgcgatgcctcttcttttagacaagctaaccgcctcagggggtgatatgaaggtttgaccacattcctgtttgatactttcactcttattgtacacaacaggaatacctatgtatcaacagaaagcttattgtgtcttctcgtttctggtttgcagaaggatgtactacgaactttggcaagctgccttgtcacgtttgggcagggcaatgcggttggtcaggcgaatgaaatttgggaggccctcaaggttgaggtttgtctctttcccgagatcatcttcaactcgcatcctttgctaaaaactttaacatatctcttcattactctttcgtggatatcatcagattctattcacatccgatatcgagatggagactgaggctcttctcacactcgaggcatttttccgtactgtgtatccttcctcagatgacagaccgtcaggcatcgtcgctttcatcgtcgaacagtgcttgcaattgatatctgaaccggagaaaagtaaagctcaaccggcgacaagaatcctagcatcttgtttccacgtgtcttgtgtgtctgccccttccttatttcaaccgccttacttcttccccttctccttgttgaattgcgctcacaaattgcaatcgatatcattatagcgactctgggagtatatgcttactctcaggcggtgcctcagcttctctctcagttttacaagacagaagatctctctcagcgtggtccgattctcgaggcactaactcgcctcctctatggtgcccgagaactttatggatctccagattctggacgaacactcgacggggatcaagttcttcggtcgttcaaagatgaactcgtgggttgctttaccgcggggatcggaacaagccttttcaagagaccagcattggaaggattcatgcaaattgttcagattgagggatatctggacgaagaggaaactggattcgtagtgcagaagatcaacgatttgatcctggcgaaggaagcagaggacatacgtggtcccgcgttgattgggctgactgctatctctaaatcgacgcctaaagctgtgtctaacatcacccttcctctactattcaacaacttgaccaacaccgctccccctttcgaggatgatgaaggtcgagatcaataccgtcgaatcctctcctgtcttgttgtcctctgtgtggagcctgcgttgttttctatcttggttgatcaactgatggatagatttgaacgactctgctttcccagccaaggaccaacgttggaggatgatccgatggataaatcaatgatagagtgccgaggtgtttacgcatttgctctcttaaactgtctatggaaggtcatcaagtcgaaagtagcggaaggtcataccgatatacctgactaccaggaaaaaattttatacagcctgttcaggatctttattgtcgcttcggtagtcgagcaagaaggggagattgcgagaaatacaaaattgatagttgcggctgcacagttggaggagctgttagtgcaaacgctgaatattgagtgggttcattctccttccactatatgtctttcgacatcatcttgtttgatatgatatctgatcgtacctttgttaattccaaatcacagtcagcaatccgaatttgcgaaaaaagcatacgcagctttcttcgaagaagacccagctgctttgatgaaccgacctgtagattttcctctattaaccaagttcagccctatgaaggtttgcctcacatctaaactttttctgtgcatgaaactagatcgattgaaaactgacaattggaggttcacacaaccacagccggacgctccagaattccaaaagaacatggtcattcttctttcgtctgctgctattgcattaagacctcaggtttgtcatgtcaacgccagtttcatcctcaaaagtggcattgaatatacactgacatgctactctgctcttcaatgcaaccggtgtcttgcctgtcgtaaagtgtgcattacctatccatgacttctcgaactttgtttcatctgtacttgtttggtcacttaacactgcttcctctcaagctcaaagcaaatcgatgttccatctatttggacaaagcataaacaaattctgtgaccgtaggttttccatttgagcttcttctcctccctttccataattttcattgattgactcttatgttataactactcacgatttgcgcagagctcggaccgtttttcaaggacgccgttcctgaattttgggagacagaagtcgtcaacgtatctgcgcctgtgtcacgccggaatcgttccattcgaggatgggtttgggtaggctctagttgatcgcccaattgagaaaagcaaaatttaatatatcttggctgaaactaaagatctttttcgacagctttgccgatccctcttggttcgaagccatgaactcggatttaaatacctcgatcagttccttcgactgctgatggatgagactaatgaatccctcgcttgggaagcggccagagcgcttgctatcattgcagaaggcgatggagagggcgtattcacgaagcgaaatcatactatcattcgggtatgtgtctgaatcgtcttgaacatctctcagacctgatgtggcttctgagcaatactccttcaaatctttactatacgctgtagctgttgcataagcaaaagatcttcaactttgtcttgccaaagttggtgcagggttacactgatagcaaaggtatgggagcgttcctcttcctcttcggacagaccagacactggaaatgattggaatgtttgactcgccactatactttaaaacctgtcaactcttccccggaacttaggttcatctcaccaaagggtctttttggtggccttagcctctatcatcagaatcattcctcgatcactttgcgttgccgagttattcactgtttgtcgcttttacctcttctcttttctgcgtccgtcatgacattctcatttgtctcctccttctcatctttgacttgaaattctaaacaaccgtctgaatgaaacagctgtttcctctcctactacaaagtctggatcttcctgatccagaacttaaagcaaatgtgatggaaactatacttgagcttgctcaggtcgaagatcaagtcgcacaggacgcggtggagaaacaggcgggaaagattgtagagggcttattaagagctttagataaatccagaggaagtaacgaggtccgtcatttcgtcgtctatctatcttcagaaaaacttcttccatatattgatatcgagttgaactgtaatttatgggcttcgttcacaaatcttggccttgcatcctcttctcttccgtagcgctcgagatcggtagcattgatgacattggcagcgattccggatatcgtccgttatgatatccttcattcattcaagccgaacgttttgagggttctgggaactgcgttggatgacaagaggcgaaacgttcggaaggaggctgtcgattgcagagctagatggttagtgttttatttcaatcggtctagccatgctgtatcatagttttggaaacttaggtgtcctcgattgtttcttgtatgttttaggttcctgtaccatggatagatagtccttgtactctgaaacgatgaatgagattcagatttttctaactttctcaacgcgagctcaactatggccgactgcctacgctgtaggatgagcggaaacttcaaatttcaataagataacgtgaacagggctgcagtcgggtatctttcgaacataggatataaatattttgagaaaagtcggagatctatatatccaaactgatgtcagaaaaaagagcgatgaggatcagctgtccatacattctgactgtattgtccaaaggccaagaaagacatatctgagaattgtatcgtatatattaggcaacacagagacttactcaagcgtggaaagcaaaaagataatgtccgttgaagtatagggttcaaagtagctcaatcgttaaagtgctaagaaaatacgactgggtagcagggtctcgacggattggtgtcgacccttctgctcgcagcctgaacagttcgtgtattaaacacaccagacacggatcaatttactagaccaagttatataagaagacatagatgaggaaggaatgaagaggaaggaaacttacctggtgttgttactcgagtcaaaaattctgaaaataaacgcttggtgtctttatgggcgaatctaagatcattctcctctcgaatggatctgctagaaatttcacaccaatctcgagtgaggaagttgaagaagaagaagaagagaagtattcctgttcgagggaatcgccagaatcgcgctgatttgcaaaattgaaatatgcgttaggggcaggtgaaaggtttggatttgagtgaaaatgttagggttaggttggtatgcgcttacatttgaggaggctgatggatccttttgtctaccagataagatattgcgtcggatatggtttgtcgaagtttttcgggtatagctggtcgctgtgtttgatctggactagagatcagaacaacataccgaggcattagattggatatagaataacgataaaggtattgtaagaataataaacttgcctcatccgaagcttttcgaacgctgagagcagagagttttttccgaacactattctttagagagattggagatcctccgtcactctcccggagacttgaggtcggcgatgagtttgtagaggccgatgttggatgaaagaataatgaggtagagtgacttagggtaggactagtagtcttgagtacgacccagtttgatgagattggctttcctaacggcggcggcggcaaagcagagtccatctgtctttcgtcagattgtcctcgagatgcgatggcgtctcgagcagctttccaagctggagcggcacccgaaggaagggaagcaagagatgagctagcgtatgggggtgaagccgggctaacagggtcagatgcgctccttcggatgaacagagggttcatagtactaaagttttcgtccaaccggtcggatgaatctactgaataaggcgggttcgtgcccgaaacaagggcctgtgaggaattgtattttgaaggcaaggacggttggaggtttgacgcgtgtgcttgatccccctgttgtcctatatacgttttccttcgtctgggatggctggtgtctggaccaggctcagttacgtgatactcatgggcatcagtctttaactgagtgtccttttctggcccccgttttcgtcgagagtgcatgagaagagcttcttgctctctgtttaaaaactctttgcgtgccggccgaggcatcgggctgagtgttggtggactaactggctgcccagggtgaccagtcaaggacacatcgttcatggaaaaggaacgggaaaacatggcgtgaatccgtagaggagtcgtgaccgagctttttcccaaaggaggggtaggcttaccaggtgacgtggggcatgatgctgtctggacatgtacaagtggtgggagaacgggaagagggtatgtgagaggagacggcggtggaggcggagaagaagatgtggcctgtttgagggaccgattcgattttttaccaagtaaaagccgcatgtctatatgagtagaactggaagagaaggcgatgggatgaatacgagagagatggaagaacgatagaaagaaaggagtacagaaggaagaaggaaggatgaaaggagacgaaagcaaagcgatgaccacccttttatacgatcaggaatcttgtttacaggggaagaaaggaaagaagggccaacggaaaacacactcgatagctcgagtgcaatcagggataaggaacggccgacggtcaagacactctacgggacaggaagaatcacagttagggcacgctcaggaaccaagggtcaatacatttgttctagggataggaacaagccctgggccgtgttcattcgtcgatattttcatgcgactcctctctcattgtgcctcgagagttcaagaggatctacaggaacaaaagaaggttggcccattgttaggagagccgagtacggtcagtgcgcactcccaaagcttcaaagtcaaacaaggctgaactgatttcgcgcgcgaatgtcgtcggcactcagaattgagcaccaagccacagtgatcagacaaagggggagactactgcgccaatacgacctctgcacacgtcacgtggtttctgttgcacctatcgcttagtcatcttttctgaattagccgaattttccgctgcgcaatccaatgagctcatccctccattcgttctctctccccggtcgatcactccttctcttctcctcactcgtccgtgttcttgttcgtctcattctaaccctattcgagtatcacagacagacgaaagagattagagaataaaaggagacgaaacgaatagcaagagcaagctgcctgaatttcttttctgtatctgatggccagccgaatacctctctgtcggctcccgggtcggccctatcccggctctctctttaacccttacctcagcccttcgcttggtcgtcgccccgtgctgattctgcttgctaccagatcacttcctcataccacattgtcatcatcggaattatcatattccaaatcatgttatccttctcagaggcaactttcaacttcccttcctcttgcatacagaccgggcgtggcgcctgagattcaccggatgctacttaaacgccatccatcatctacccacacgaccacgaccacaacgaccgccaagaagctcagtcgaccgacactcatcctgctctgtcttacactctttttgctcacctcagcaacttcctacgagttctttcctgcctctagacacctcgctcaggccatctaccgatgctccagactgatgtttgccgtcgtgctggacgccatggactacaaacggacgtttgccagctcgttcgacacggatgacgagaagcaggaagcctacaaaggctgtcatctgcgaagcgcaaaacggatgctcgccgccttagaggcactagggggatgttatatcaagatcggacagcacttggctagctcaaatgttgtgcctgtgagtatcactttcatcattgtcggagtttttcatccatgctcatttcccttatgatgtttattttactcctttttactgtattcgcacttgtctgatgaaggttgagtggagctctactttgtccgtccttcaggatagatgtcccgttagtccaaccgacgaacttgaacgaatgatcttgaaagatactgggaaaccgagggacctgtttttctcagactggcagccaattccgattggtacagccagtatcgcccaagtacacctcgcaacagatagagagtctggaaagagagtagccgtcaaactgcagcatcctggacttgaagagttcctgaccgtagagtgagctttgtttggccttcttatcttttttttgtcctttgcgtttggctatgaacttcgttaacacgctctcctctgctcatgtatacttctttcccgttacttatgaagtatggctaccgtcaactttgctgtaaaatggattgatgctatctttccagactttcaactctcttggcttgccagagagatgaatgacgccctccctctagagatggacttccgtaagcactgtttcatcaatctagccctccctctcctgggtcatgttctggaaattctcatctgatactttcactcattcttataaaacactgtaggggtggaggcgaagaacgctcagcggacaatacaggatttcgaacacatcagcagatctgcgctctatatccctcgagtagagtggtgtgaaaaaagaattctcgtgatggaatgtacgtctgcgttaacattcgtttccatacttctcgtatcatcctaacgtgtaggctcttctcgaattcaatgtatacattttgagttagatatcgatggtgcgagagtggataatctggagtatctccgaaaacatcacatcgatcgaaaccaagtcgctaaagagctttctagggtgcgtatctccctctcgtaatatcagccttttcttacctctgtctgatgcatagttatgctctgttcatatatacgagttacagatcttttctcaaatgatatatttgaacggatgtacgcccttcttttcggtttcattgaggtcgagtccggacagcacttttaacttgatacataatttctcaacagtttttcatgcagaccctcatgaaggcaacggtaccctccttaagcttctcttgttctttttccgtggacgaatacccttgcttaacccatctttctctatatcggctgatgacactaaacagtattaattcgacccaggccgagtttatcgaagagcccttacaactttgaggtcgttctattggatcacggtctgtcacattgtcttttttcttcattatattttcttcgtatgactgatctttgctgtgagtctgaatcggttaggtcaatacttcgatatggacgatgagctccgaggtgcgctacaccccctttatctatatatatcatcgtcaatctccttccgttgtcttccagtctaatcgtatctccctttcttgcgcacttcacagtcaactacgcaaaattctggctaggtctcatggcggccaatactccagccacacaagcccttcgccggaaatatgctcttcgaatgggcgtcgattcagatctctatcccatcctcgaatcagccatcacaggtagagtaggcatgggtgctccgtcagaggaaattgagtttgacccaaacgctgttgacgaggatggtcgaccggctttgatgaggcagaaagcggggtctttgttggagatgaggtcagctagtgagattgagatggatcacatgcggaatgtgtgtttgcttttcatcttttaatcttttacttttgtctattattttttcttctttttgtaaagcacacaaatttacttcttgtatctctgaatttccaaaataggctgtcgtacagagggaaggactgctggctaatatcttcaaaatgttgcgttccgttcccagacggatcatcatggttctcaaagttaatgatcttactcgaaggtttgtctcgcttctcttatatcttcttttcaccggaatcattcgatgatagatttaatgatcgtttgtctcacacggtcaaatcaacttggtctggttggtagtctcgacaagtcattagcgactacgcatgatgctacacgtatctttttggaaagtcccttccccatcaacacgtctcattctctcttgtttgtactgacagcccagtttctgtttacacacctttcttttttttctgcataaaactctttgccattgaatctgttagattggagccaaattctgcgcccgagcagtctggaatcacgataaagctcagctctcccaacggttcctatcagaaggaatctcactatctctcattagttcatatctccaagcgttgtggagatttcatttctactacgaccgactagtgtttggagagatctgggcggacggaatagcttggaccaaaggaatctggggaagcaacagagtccagattgtttagtggctgagtggttggtagggtgtctaggaaggaggaaaatatttatgtaacatcaggtcgtatattctcatgttgtgtttgtttttgatacagagtcaattgatatggtggttatttatgtagtagcatcaagaatatagtgaatcaaaatcataagcaggcccgtgctcatctcctatgcgataaagattttcctccgccaccaactatataatccgaccgataagacgacagaagtattgtcagcaagaaattgaagagtcaagagaacaggaggtaacattcagtgaatgacctacatcctttgaaacctcctacttcctcttcggaatcactatccactaagatcaatttctttcggtttcctcccaacccaagaccgcttcccacccctgctcctgtccctatcggagcgcgagaaaccactctactggccggtgtgcgagctctggatctgtcgagttttatctgatctctcacagtgttctcctcttctcttccgtatccctctagttggttacgttgaacaatctgtggctcttcgtcatccgaactgagaacaatcggcttctggttcatagatccttctcgaattttagctcgctttgaaacatttggacgattatctgaaccttcgtcttcgtcattcgactcagagtaagcgcgaagtagtcgtttccgttgactgaggcgaggacccggcaaggattgagtcggatttgatatagaggtagataactgagtagagtagttatttgattcgggtattttgatcgacgactgtgattctttcgtcttgaggcttcctacaggtgttgttggagaagaattagaataggaaggaaacgatggtggcaaagatgattgtttgcgaatatgagagaaggagaacatactgatgcttggtatttgaacgccgacaagtttgatcggagctgagcgaacgacgtgttgcttaattaaatttaagaaaaaaagatggatgtcagaatgattattgcgcctagagtgatgaaagtgaggatacaaccttcttaaatttcttgaaattaggaacagctccataattagtttccggtctctcgactctcggatcttttctcaacaacggtttcactacgcagaccattgcaaacccattgatcttacatccttccattgggatttcctccttcggatcttcgtctcccaaattctgtctggcaagtttcaatttgttgaattctgcatccagtggatcaatctccgtgcccttcttacgcttggaaggcgcgatcaagaattccagatcgtcctccgccggacgcttctttctgacgacaccgtcatcttcgtcgtcattatctttctgaggaactatactaggtggcggcatctcgagaccagacggttttcgagacaaagaatatgatttcagattgcgcgccgatagaggagatggcccgtcaagatctgatggagatctcggtgcagattgacgttgcgagtcctttgtttcatcgtgcaccgttttaactgcgtctgtattcatcttgtcccctctcgtttgttgatataaccgctccttcatcctttcccggtcaagatgaattgcttcttgttctcgcccccgttcttgctcctttttcagccgaagtttccttttactctcctcgatgaaatcctcttcttcctcgtcgtcctcatcatctttcgtcgacatagggatatcaacgtgtttggctgattgtcgaattctgtcatatacttccctcggttttgaggactcttcaatgacaatcgatgggtcgtctacgtagctgtaggtttcttccggattacgccgagagggatcccggcgtattaatcgtctcgcgctctgaatatacatatcagcgattcataaaacaagattcgagctttgtgctagagaatgaacaatttgaaggttgacacatacgaaactagatccactgccttgagagtcagaagtaaacagtttgttgttaaagtcgggttcctcaagatcttttcttgttgtatccatcgaagatgatgcgcgagcagggtttggtggaggtatatcttcatctagtagggaggctaccaaatcgtccagtggagctctgtgcactggtcttcttcggaccaatggctgttattcacaaaggggatccatatgtatgacaaaatcatcgttaagattcattggacaaaaccctctcttatccgaaaaaggtgatgtataattttttacctttctgacagttccagaggacgaagcaacagcagtactggaaattgactctacatcttgagctggtgtgcgagctcttctcgtgttccctcggaagatctcagctttgagaccgctgtcctgtatatcagcctgcgttccctcatcccgatctacattatccactctacgcgtcaacttgctagaagaagatccagcttcgacagaagatggtgagaaagcacgtgcacgcatacggctagatggacttgtgttggagaaaggattggaaggttccatgctatcgccaacttgagaaggaagatattgtcctgaaaatcaaatcttggacgcctatgttgagcatctggacattctatatttgttcagagactgagtggtgagcactgacgcaaaggttgttcgtccgtccgaccaaatttgagcagaggaataacatctacttccaaaattgctcgaaaaacgtgtatctcgttgagccaaacgagaccgagcctagaaatgatgagtcaggaatacaaagggatccatgttagctgtgaaaggtatttcaataaggcgaagttgacaggatatcaagaaacgcatactcagtagcaactccctcgagatgtgtccatctggtttgtgttttgttcttctgcggatccaccaaatctttgtaacagtatagcagtaataaacccgatccttttgactcctcaggtagaaaattaccggtatatcgaaggaatctggcataccgatcatcagcgtcgtgtttggccttttccagaatcgttcggaagaaggtggtgtctgcaaacatctcgtggtttgagtcttgaatggagcatttagcgccgaaagtttctgtagctttcttcataatgaaagtcgagtttttgttctaaaacaacgccgataacaaatgatacagtcgtcagcaaacaacgagccatatacgtctggaaaatcatgagcgattggatgaaaatatgtacagcttcggaagctaccacgtagaaggtcagcccaccaaacaggcactctcgaccagattctttcggtctgatccttgctcttgagtctttccagccgctccatactggttgatccgagttgatcttaatctcgggtcggaaatcatcttcgtttggccaactggtttcaaaatccagctctgcagacgaccaaaatttctcttccccctcttgcccggcgtcacccgctccgacaatgtatcttatccattttggactgatgagttgaagttgatcaataacggattgtatgacgggcgctgaaaaccctgttatctggggtaagattgtatgggtttgagagtctgaagaagaccgatgagtcttgacgcctgaggaaggacgaagcagaccatttcaaagtcagaatgtattgggatactgctatcatgtgggttacactgacccatggaggctgccatgtgagaaaggcaactgagtcgatatcagtaatccattcggagtatatgcttgtatcaattctgtagcttgaacattgacactgagggctacataccaaggactgggatatatgatgcgaagcttctctggtcatcgaccatgttcgaggcattatgaagcacaataggcttccagtgtatgctgccaatgcatatataaccaccaaatgatttcatcttgtatcagcttccgatcagaaacaagcagacagttgttgatcgtgcaactgacttgattgcgaccccgtctggtttgttgattctgatttcatctccattcaggagctcaaactcccctccttctgtaataagctttccaggttgagatttcttggtcaggtagacagcaaacgtcttcggaggtccaccatgtctgacagagggcccttgtggttgcgcaactagcgtcagaggtggaatatacgacggatcggcctgtttcgatgtagcttgtgttgctttagtctcaagaagtatgtagccagttcccatgctcagcgaatgacaagactcacggcttgtgcctctgtatgctctccgactttgatagaaaagtgttcggaactggcgtatttagcagcgaaactgaggaggtgttcctttcctctacccgctttgtagatctgaccgggtttgagaagacgataggttacaccacaaagaggttctttagtgtcttgatctctaaatattccagaaacgatccacatctttcaacaagcgagcgaggtgatggccgtctatcagaaggcgtcgaggagatgagagcaggtgtaatgtaatgaactgaatgtcacgtgcatcaacttaaacgcgtccatgtcaaactttatataaaacgtaaaacatacgcgttatttgattcattcagatataaatcaccaaactcgatcagtggtgctgacgcggtagccagccgatagccgacgccggagcgggttttcatatctactctcgtctcggtctaccgttcaaccatctcgttctagttttctttatcttcagacaaccttttaccttgagatcagaagatcctttagtctatcatgtcatcattttttagacgctcgactccgccctcaactccttcttcttccttgacctcgatcactgctatcaagaccgtgctcccgacccctaccctcaaggtaacacctacgagaccggctctgcctgaaggcgagcatcttgagctctacaatcagctcctggcccatgtgtcaaaagctggatattctcttcctgtaggggagaacaagatggaactgagagcattggcaaagggggagaaaatgtggttgacagaggattgcttgttgaggtatcttagagctcaaaagtgggacttggcttgtgagtcccacgctcttttctctcatctcgatcggatactcttcgagaatgatcattgatattggtacttactatactcttgtttttctataattttatctagctgcaactaccaagcttgaagtcactttaatttggaggagagagaacggcctggctgatgacgatggaggtgagggagagggagggggcttgactgctgctcttattaaatcagaaggtcgatgcggaaaagagtaagatatacaaccgataaatcaacttcagagtcttcgtcactaaacattgattaatttcacttaaacagttattgcaatggtttgctttccccttcaaaacttctattgttatcaggttagatatcgattgtggttctgatggcagttgtattttctctcatgtcataggttgggacgaaactggacgacctcttcattatcaggtgccatctcgaaatgagagcaccgactccgcgctcaacgtcaagtattgtgtgtgggttatggagcgatcgatcgatttgatgccacccggcattgagaaacaggttctgctcgtgaagttagtcactagtattctgagattaatatccaagggctttctggttgactctttcttctgccatagttttgcaggaggaatgtctccccctccaatagcgactgtgcgagggtggatctcgatgctttcgcatcattatccggaacgaatgggtaaagctatcgccatcaatgtcccttgggtaaaacatttttcttattactagatagggtcaataggattgttaatctttctgctaatagtatgatcggctctacaatcattagattctcaacgctttctttaagatcatccttcctttgatcgacccgattacacgggccaagcttagtttcaacgaagctgctccttgggtcccagacgatcagcttgagaccgcttacggaggaaaatttgaattccagtatgatcaagagatttattctccggtttgttcatctagctcctgttgatttctgatgtacagccggttaaagcgtcgatcttgactcaacttatctttctttttgtgatcaaacagtcgttgacggctttgtgcgctgagagaagaaaatcataccgagctcgatgggaagctgatggtgctcgagtgggttctctcatgcttttcttgtaatctgttttgctctgaccactgatctccgtttacgtcgttctcataagatcggggccagtgaatgggttctcagaggaggggatgaactttttccacaggcccaatcggtagagcgtcaggagcctagtattggcaatgccgagactgatccgattgtcatccctcaaaaatagtaaagaagcttgatctgtacaaattgcgcaacctttcacagaattctagatagtaacttgaaagagaaagaaagagatagagacgttggtcgatataatatgtatctgtaaacaacaaacgcacgtgctgtatcacaaccaagctgtgcaacgttgtgacagaggagctcgtcattagccccatttgacagagccaacatcatcgccatctttgaacaaccttcttttccatcaacacacaaccaatctgaagccagcatgtccattccctcccttcctttagaggctatcatcaagacggccgaaaagtatccaaagccttcgtccgactactcatatggtaccgcaggtttccgagtaaagtaagtagttcaatatggacactaacctttttctctctagttgtgttcatcaggcacgaaaagtgataaaagattgagaaacaacatgttgacaagaaatttcgtgctgttcttgacagagcaaacttgcttccctgtgccttgttccgaactgctataatcgctgttctccggtcccagaagcttggtgggaaaaccattggtgtaatgatcaccgcgtcccataatcctgctcccgacaatggagtcaaattgattgatcctcgaggagagatgcttgaatctgcttgggaagcatatgcaactaccatctgcaatgcttcgtctccagagcacctcgtgaaatctctggagagtttgatcaaaaccctgaagattgacctgtctgtcaagccgtcagtcgtgtttggtagagatactcgaccttctggcaaagagctcgcccaagcattatgtgatggttttgaggccatgggtatttccaaagaggagattggatttgaacaggatgagtctgaggcttccgcagataaaggtatcatcactacacctatcttgcatcatatcgttagaagtatgaacacgagaggcaaaggcggacacgaagagtatggagtgccttcggtcaaaggctattatcagaagttagccgaggctttcaagaaattgactgttagttcatcttctgtgtgttctacatcgctctcgacttcgtcatcatgtgtactgacctgattactccgtgctcgattttcaggataacaaaaaagcactaccctatccgcttgtagtagattgtgctaatggtgtgggagccccttgtctcactgcttttatcgccactcttggagcgctcacgtctactcctgccgtcaccctccgcccaatttctaccaatatcgatgatgcttctttgttaaaccatgcgtctggcgccgactacgtcaagacaaaccagaaacttcctcctgttcttcttgttccctcgggcgaagcactcgaacgaggacgacttgcctgctcgttcgatggtgatgccgaccgaatcgtattctactatctggacgatgagacaggagcgttcaagcttttggatggggacaagcaggctggtcttgccgccggatttttggttgacttagttgaacaggccggactcaagcgggaggctaaggacggagatgatgaagatgaggatgagaagggaccaaaggaaggaggagtcaacgttggagtagtacagaccgcttacgccaacggaagctcgactaaatatctttccgaggtaaacttactgttactttcagtcgctatttattcatcgttcatcaagtgctgactcgttcttctctcctcaatgaaacagcgcctgccagttgcttgcgtgcctaccggtgtcaaacaccttcatcacgcggctgaacggtatgacattggtgtctatttcgaagctaatggacatggaactgttctgttctcgccttccttccttcacctcttgtccacttacagaccgcgaacacccgcccaagctaccgcgctttcgcatctccaaaatttgtctctattgatcaaccaaaccgttggagattccctgtctgatctcctactggcctgcacaattcttatccaccgaggctggggaccgagagagtgggatgcgtcgtatcttgacttgccaaaccgattggtaaaagtaagcgtacctgaccgaaacgcgttcactacaaaagacgcggagaggagactggtgacgcctgcgggcgtccaggctaaaatcgatcaagaggtgagaaaatatgagggtggacgagcgttcgtcaggccaagtggaacggaggattgcgtgagggtgtatgcagaggccgtcagcaggacccatgtcgaaggtgtgtcaagcagaaaaccttattctgttccttctgcatgtattgtgctggaaactgactcaaatgtttttttttgtccggctcttgggtcgttttctctccaaaagagcttgcatcccgagtatctcaaatcgttgaggaaagtgcaggcttgtgattaaaggtcttgcatatcaaacccttctattgtcatcattcttcattcgcctacactccttctctcttgcctgatcgtctatatcagtatcaggtcactttcatgtccataacccccactgctttctttaaatatctcaagataacaaaaaagaacatctacaatattcaaaaatattctgttcatctatagattgcctttccaagtgtcttgctctagattgtcttcgttttagactttgttacacttctgatgaattgcaatcaaatattcgtgtgattgtggagcgtggaagtaagaagaaagatagcagaactgcgcatcgatcattctcagaaatcatgatctttgaagttggaaccactgccgaagaagtcttgcagtctccgaccaccactgttattatttcaatcatatggcaaatgaacatcgtcaaaaatctcatttggttcgaacgcaagaaaaatcaaatggtgaaagaaaagaaaaggcttcttgctgtaccttgatcatccatcttttgtgctcaaccgcgccatcttcgacccagcgtttatggaaatcgtctatacatttttctctggcttcttcctcctctgctgttggcggattagactgaggaggtaaagtagatagcgcatctgatttttgctgatgatatgctatgttgttttgagtctgtgaagcacaaaaaataagaaaatggattttgatcaaagaaaagacaagttgataaaagtctatgcttcacagagaggaccggacttaaatttgaaaaataaactaacccagaatcgattgctccactcatccaaagcttccctctcccttcggtaaacccgctgaaggtgtgtctcatcgccttcagctgggaactcattctcggcataaaactggtctttgcgaggtaaaaacgctagaggaagagtctctcttgacaaagacgtcgcagggagattggaaaatgacgctggtggtgggggaggaggaggagctggtgttggtgttgggcgagaaattgagggctgtggtggaatcgacgtttgtttgtatcggataggacgaatatttgatatcggatccggcctgttgcatttcggcaatacgaaaagaatagtgtcgatgcagaacgagagacatttcttcggtacacatgttcgcgctaaaccttatgagagacaccaaatgagggaatgcaggagaggatgaacgtacgggcctacgagatccacatgaggcttgttgtagtcgacctggatttgagctctcttcgaccgaggcaacgatcgggctgctgtacccttggaaccaaagactttgagcaaaccacgaagaggcatgttgtctaagggtggacaatgattgagccgtatacgtttgattatctgatggtaagagtatgggtatgagtgagagtacgggtgcaagtatgagtgtgagtgcaagtatagaggttggcgatacaggccggtcgaaggatggacgttggtgggtaaaggatgtgaagatatatctccccgccttcaacaacgcaaccatcaccttcatcatcagcaatatcgatagtgcagcatcttcactatcgttctctcctctcaaacgcacgaatatttatacctttgaacgtatacgacgattggatcagttctcaagtgattgaacatgtcggccggaagggtccaaggatgggatcccatcctgtttgtaccttgctcctgtctggtcgcgtcttctggtagtttcagaagtgaccgtatattctgactttatcttttcatcatgggatactcatgaactctctcaacaaatagaataatatgtcaagtacgtcttccttccattcgcatacagttgtctttgatctatcgatatataagcttatctcgacggatatcctgttgtcggtttctatcagatcatctccctgcaatcccttcactacctcaccctagcactgttcctcccgccccttctctctgcttttacatctcctaactttctcattcatgaaggaggtcccgcaacggtgtccatcataatggattggcgtgagatcgctggtcaaccgactttcagcttgccagcctcgactccttcatcggccggatggatggacatgttcggaggcgcgtggagtggtggaaaacttgttggtgttggagctgcaggcagtgcaggtggtttatatgatgagagtgatggcagcaacgagtttgtgagggactgggttcatgaatgggatggacaagcagattcgaaaagaggttgggtgatagccggtgcctgggggatagcttcgtgtgttgagtaagtcatctgttcctctacatcttagaaaacataaatcggtattctctgaagactctctgtgatttcttggcctatgaaaaaaatatcgcttcaattgtatatgctgattgtgatgaaacaaacttttgtagcgttttgttcttgcatcacttcgttcgacgtccgacccatattctagatcacgcggcctcatttaccttcaaccacatcctcctcaccatatattactccgctcatttccctagttcaatctttttctggatcgtcatgacgacttgtaccgtcggaacgattgtttgggccgaacaggtctgtgtcgcccgagaaatgagagaaggaattggtgattggagcggaaatctcgatgtcgaacaacagcaggcgttcatgggtgatcgaaatcataggaacgagggggatgaggagttagagatgatcgggattggagaggacagaagatagaagatagaatgaagcatcttcgatgaagactttgtgatctagcagtgatctactgaggaaataattatctcttcacgagatgaatagatctaatcattaataccaacatgaaagcaaggggttatatgtcgcaataaataaaggtaaacggtaagagaacgaagatcaagacagtatgccgctgagcacactggtatcggaaatgacgaatgaggggtatggtaaaacggtaaatggcaataaacttgaatcccacagattatgagaacacactctaaagaatcgaaaccctcgatgaatctaaagggaaattctaaaacgtcgaaacgaagaatcggaacagaacaagacaaaataaaacaagacaatgccaatttctgaatcaaccatcaacgtgaatgctggtcgtctatccggctatggatgttttcctactactctgtctcctagcagaagatactcgtgaagctgtatctgcgctagtatgactactaaccacgtcgtcttcatcccctgaaggtactcgaatccttcccttcttggagcctgctgtgagtccactatccctccgtcgagtagccgttgaagaggaagacgaggtagaggctctaggagcaggagttatgatcttcaaccttctaatcgccccgtcgtggtcatcgtcttcctcatcataactatcacctccaacctcttgtgtatcaaccgatgtcgaactgtaccgtccagtatctctccttgcctctggcctcatttcctcataggccttgggttccctatcgtctatctcctcataatcatcctcatcttcgtcttcatcttcaggctcttcctcttcttcctcttcggaaaagctcattttcgcatgagatcctgaccctgttcgtccaattgtcatggtgttgtcgattggtggctttttgggcaacgaactcttccgtctgaccaggtcgtttcggggaacgacaagcgcaggatttttagcgtccatcgaggatagcagatcgtgctctacttcttgggaagatgctcggcttgatgaaggaaggatatttcgagatttgggcttagaagttgtatcgtctgctggtttcctcatttttctggtttttgataaaaagtggtaacgaagccgaagacaaaaatggaaaaaaggaaagtcatgggtgagaacctcagaggaacatagtgaacacaggtaaggacagaaacggcaaaacgtatacgtacgtcgtcaaactgggttctttatagtttacactctttcgttcccttcccctccttccttgaatctcttcagttgatttgctcgtcgtactccaacttgccgacctggagggtacagaggatatcgttgtcccggaaggtgcatcttccggaggaggtgtatatagagtgggtctcgataaggttgtatcttgtctaaattctgatatgtaagttgcaggcgatgcccttcgtcgcatccttctcctatcttcttctccttcctgatcttcatcgtctctgtatccaactccgatatcatccatatctactccggctacgaattcttcttcctcggccttcgactttcctttcaatttggatttttcgggaggagagtttcgatcaatgggaccgacgatgcctttccttagttgatcagccacgtccttcatcttcaccatcgatgaacctcccttcgattcggcttgacttgtgttgtaaattccattcagtttgatcggaccttcttcggcaacaacagtgtgagcggcggagatggtagacgaagaggaagaggcggatgtcgaatgtgagattagactgaaacctgtctttggattcggaggtttcatggagcccacgagagaggttttcgatttagacacagaagatctagaaatagttgtcgagttagaaggaagaaccggagcgcttgatgagccggctatagatggtacattagaggcgattaatggaagaacaagagactttgtggccgttgacggtggtttgatcatcttgctaacagaagaaccttcaaagggaggtgcagttaaagttgatttgagccgagaagtgtttgaatcagtgacgtttgaaaccggtgtcgattgtaagagagactgagaagttgatctacaattttctagtgatcctgatgacataccctttcggatggctaacgcaacgggtttagtcaaagtaggtctctgagtgagctccatcgggatagaaggcacaacagcccggccgatcgttgtttctacagtcttcttatcctcgtcctctggcgatatttcatcgaacagttcgacatcccccacgcgaactgttttctttatcatctccccattgagagcgttgagaaacctcgcttcatctaaaggctcttgcttgacctcaaccgtctcccattcacccagaacgtctcccttctcgagccctttggatttatgcgccgataattctgcagtagaccgagcctcagatcctcccgacgaggattgaaacgcgctttgtgaagtcgaatttgaaggaagtcctgattcagttctctgttgagttggattaggacctggaggaaggagaaatcccgaggaacgtctagccgctcgggaagaccgagattgagaacgagcaaggacagcggattgggtcggaggtgggttcagaggctggtacgcttcttgggaaagcgaacgagagctagaagatgaggcaatagatgatagcgaggttgaagaggatggaggttccacggtctgttgatttaacgccatgtacagggatctgatatgtacaccaaatcataacagtcattctcgatcagttaaatcacaaattaggaaagcctcgttatggcaagcggtttttgcagaaagtgtaccgacccaggttgcgcaaaatcttctgacggttcgtcttcctctttcaatgtgttgtcgatacctaccgggctcgccgaagctttgacggtcccttgcgggtttagtttcggctgccagtaagcaaacggttggtgaggtgacaagggagttggtaaagcggacctattgagcagaggcgaagtgctgctcggtggagaaggagcaacgtttgataagatttcgtctctcaatacggtaagagcgggtgcggagacgatcagagtagaaaggacatgaaggaggatctaaaagaacaaagacaagagagcgtgagcttgacagaacatctgcatccaagccaagcggtacgaagaagctggaatctgatttcgaacctttgcatcttcctctttgttcagaaaattctgcaagctgccgtttctgtcctgtttacttttgaactccacctttcgaagcctgccgacttcagcctctagtctgatatttcgttcactgagccgaatgacctcgtctctaagatcataaacttcattttcaagctcctttattttctgtcgatgggcaacgttgttgataacaacatcgttatgcttgagcgttatcccatgaagccgttctcgaagtcgttcgacctctaccgacgaaacatgtcataggaaagacaaggaagcagacacgtacgaagcgagaagggaccaataagcgatactggtgaaagcgcacaatgagtttattcatagaacagcgagacagaccaataagataccgcggtttctttgctcccacctttgaaggagatggcatgcctgtctaggtgatatagaaagagaggaagaagaacaagaacgacgaaacggtctggagaggatggctgagaggagagaaagaaggaaatcgcgttgttgatttcctgaagctgcgcgtcttcggcaactctgaaagctgatgatcttcaagactcctctcagcatctctgtgatccgacggtcatcccgccagaggcaaatctacgtctaaaagaacacaatacgctctatctttccatcaaaacgcgattattaattcgatcgggcatcactcatggcaagagtcgtatgttcgcgctctacccctctcctcgagcgcgtcggcttcctcgtgttctgacgcgtcagttgggctacggtgacgatcttacgttcaacaggttgacccagctagtcaagacaaagacgggtcattaaatagagctcgaaaccgtcttaccaaacaacgaaaaggatcagtatatgaggatgaacaagtcttgctgatcagtcaagcgtttcggcaatcaatgacccaagttgagcaaagaagaggaacggtcagtcgatcaatcttaaccttccttcatacggttgattagagatcgtttggccatcacacacatcgatgtctctctcgattcaattgatccgagggtacatcgaatgagctgacctctttctcattacatgtttttgcttctctcagcacatgcgaataccccgactgccggtcgggttcagcgcaaacattttccatggcgagcgatttacctttgtcggctcattcaacgatcaaccgcttgaaacagcaaagatgatggtggaactggtcggagggttcgttccacactttctttgtcaaggaaccgtctcggctggaacctcttctgactgattgaatctttacttgcggaatcctcaaatcaacgcgttgatgacctcgtcttgtttcgtttgttcaggcaagttgttgaattggacatgcaccccacccgtatcatcacaggaaggaatattcccaagaagacgtcagatagggtcaacagacttgtagattctcgtgaaggtatactctcacactcgctccgagattttatgttactcttcttcgagctatcacgcactagccgtgcagccaagtcaactgtcgagccagcaaatgaactagctcttgacaatggcgaacatgggaccgataaattatcggtatgtcattttgctggaccgttctgtttcgcatcgcatctgaagtgccttcactgtttcttctgcttatcatagtcaactcctaccgctttgaaggaagtgagtcctgagcgtatctcttcggtggctaaagattcatcaaatagaaattcgccgtctgtgcttgaacgacctgtaagaactaccctttaaacactttaccatgattatgtccgctgttgcgcttcaaagctcagcaaattttgatcgcacgtatatactgtctccgctgcgaattcatatccaggtcaaactctcaaaaccagttttttacgataagcattatcaaccttgggatatatatatagatgaagccattcctgagagtatcagagaccgcctagctcaacagattagtgtgagtaacgttggcccatattttcctatgtgtatgtgcgtcctctaaatcattcatccatctgaatatccttcccgctcctcatcaacaaacagacaagcggcggtcgattggtacctgcctctcaggccgatatcatactttttgatcctcatcacccaacacatccttcagggcctacaacaaccgatgggaatccggaagcaaatcttcgtccatggcactgggttttcttttgtttacaggagaaaaagctgctgaaaacatgtctgatggagagtcaagtcccggtttttgtcaaaaagaagaatgagactgaaccttatggcgatcaaggaggtatgctggcatgttggttagctgacaaagttccggagaggttgaagttggaaaaaatgattttagtcagtcagaatctatattgatagacgattctcttgttcttcctgcttgccctattgattcgttcaactgatcgttccgttcataacgtgtccttatagtcatatggaggtctcgtcactcgtcgtcgacagaatgcattcattttcatcattgaccctggttcagcggataaggaaacactggatatcattcacgtgtactctcatgatcgatctagatacgtgctctcatatgattgggtcacaacctgtgtagagttgggggagattgctcggttgccaatagaccaaccaagtcatactcctgttccagatggtcgctccaagtttgttcaatgtttctatcatattcatccctggatcaatgccaccttgcctaaacgtccgttcattacgaacaaccccttgtttagtagtcaccggttcacagcagaggatgatcgacatcttgtccaattcattgctcaagagctttttgaccaagaacgattacctaggcgaggtcaaagaataggggataaaggaaacaagctgtatcagctcctcgttagtacatccgtaagtccacactatcaatatattcgtatatcttgtttgggagaacgaggtcgagcaatgctgacacaagcatcctcagtacaaacctgaaaaacctagaccatgggcatttaatcacccttgggaaagttggaggacgcgttacaagaaccaagctcatctagggatggaacgcgctgttcagaagacgatcggacgtcttcagcaaggacttcctctcgagccttcgtcgtcgccctcgccctcgccttctgtgccttctgctgctccttcgattcaacaacgacctgcgtctgaccggtcaaacacgttgaggaaaggaaaaggtcgcgctgacgagaacttcgatgagtcgggaagttccgatcggtatgatgacgacgctgattatcaggatcgcgaagacagttcaagtggacgggctgacgaggttaactatccgccgtccataaggccaaggaagacaatctcagagatgatggctccttatcggcccagtcgacctgttcagagacttcctccagtgattagcgaacgaccggcaccttcatccccggctccttcgtcgcctttagagggtcctgcgagacagaaactcaagcatccattagcagcttctcaatatagctcttcctctactccacaaccaaaatcaactacaaaccatgaccctgagtctgaagccaaatcgatagaggatgaggaagaaggttttgaccgaattgcagtccaaagtcatctcgagctcacagacgaagatgatgtcgaaggcacattaggcgatcctaactttgaatttaattcggacctcaattttgaatcagagtccgcgcctgaataccctggagaatcaactcaacgcgtcaagcttctcatgaacactttccttgatgatcctgcatcagttgaaacaaatccgattggagcaagtcaggattcttcggtgtcttggatggcgaaacgcaaacgagaagactatggtgtcgcaggggaagaggaagaggaagaagggccggaaacatatcgtctcagattgcttcttagtgatcatctccgttcccacacccatatatctacacaaacgcaggatcgatcgccttcacctgatggaacaggatgggagtagtcatttttcttctgcctttttgttaatccattgtattgtagaatgtgattgcgacgatcgatgccctttgtatgtattgcccacttcgctatgaatctaagggtgactgatacttactctcgaaattttcgaagatcaacttcgcagaagatgatgaggatgacataacatacaccacggagttgaaactaaatccaatacaaaatagatacacaacagatacatgaacgaaagagaagcgtgatgcatacatatgataacgacaacggggcaaagaagatattttatcgaaagagtcttaggaaaaaagacgtttgaagacgtatcctaggttatgtacccaatacatgacccaagtgatgatcatctaaaagaaaagaacggcagaagcgagagaatcagatatggtttgcgcaaagaagcctcgagacataatgaagagtttgagagagaagtgtgattaagccgatgagccgagacaatcggaagaaggaagaatagaaacaatggttgagaagtgatgggagatgtatgtgatccatggccatagccaacgaacctcagaagggaagacagaagcacttgttttttggagtatgatagtataatccggaacagactagaaggtaaataaggaatagaaagccacaagaagggaaaagggaaaacgagatcaaaaagaccaatcacatacattccagaacgacaacgccactgtgccatcttctggtctccctagcgttttgagtgcacctccgtttcgtttgacggtaatcatgaaagtctttttaccagacgtgtctggcacactagttgacgaagtttcgtcggcgttgtaccaccacctaagtatctgaccttggatttcgtacctgccttccgaaatgtgaacttcaacgtccaattcaaaaggaggaagcctcctagtcgtttccttagcttggtttgaaaggaaagccgtcgagccagccaagtttgttctcggaccaaacgcacttccagacgaattggaagatgattcaaaaatagcaaaatcatcgaaatgcctctcgtttgtctttgggtcacattcagaagacattgacattccggacaccgactgagaactgcctgggataaaccgtcgatcggaggcgtaatgaacccaagggagatatatttctgtcggggcagtctgggacattatctcatgatcgtccatctcgactgtaagcttgaaagtggaagacttgatatcaaacgacacatccgtcggtacacccgtagtggctacaggatacggtcgactgaacgctccaacagcacgagcgccgtttatcaacaagtcgggagggaggagagatgactcgcgggactcaaacagagtgggctgactggcgggagaggccgaaaattcagacggtagggacaggctagaggtcgaaacagaaggaagatttgtcttagagaatgacggaatggcggaattgtaagggcgaatgtcacccttgataacaccgccttgattctgatacttgtcatacgcggcattcgtgtcatcagatgaccacaaagaaagatcctccaggttccagttgtccccccattcatgtgagctattcagacgaaggatttggtaagtaaaaggcatcatcaaacggagtcgaaccaccgttctgattccaacaagattgtatcactcacttatcaggcacataggtccagatagtatagttcaacacgttatttccatcggccgcattgagtgtggcatctagtgctttctgttgattcgagaaatcgcctttgccttccccatcaggaccatatccgtacgcttttttgttgtcgagatcatacgggataccacactctccgatccttcatgaatggtcaaagattagcgaccaatttagagttaacggaagtgtatggcaataatgaccagacgtacaacgtgggatattgtcccagcacatcaaatgtgtcctgtttcagaacaccaagctgctcttggaaactctttctgatgttgctttctccgatcttgattgcttgtaagattgtcttgtactgtcctcgcatcacacccaatgcgtccgcattaaaccaattccagtgtcgagtcctgttgtgaaataacgtcacagaaaatggttggaccagacatggtgacggaatgttagttcgtctttagtgtattcagcaccctacttgaagatgacaaaaccaaggcacgtacatcaacgtcaggccatcgtaccaatggcaactagcgcaggctcgccctgcgagatcctcttcgtccaacactggcggtcgatggaacactggaggctgcacgaaatggattgcctcgggatgagcctgacgaattctcttggcataatttgaccaagctggccgccaaaaatctgagatgaaggaaatctgtcgatgagggtttgaaggaatggcttggaagtaatcttttttgaaaagagtcgaggtcacgggatcccagacaccatgaagtgcccagactattatgtgggtgcaattgtgtaattcttgtgagcataacggaagaagacaaaggacatagagaagaacaagagaactgactgcacgacccaagggtccatcctggatctcttttccaaccccacttggacccgccgacttctgcggctgggtccagccagcaagtcacgccctgcgggtcaagcaaaaccgatccatcacgtttaggtcccatcgccgtgaatttctgtatcaaacaatgagggttgatataattaatgaaaacggtcagagatagttcaaaattcagactactgacccatgactcgacagtgacagcttctcccatcgccaatctcattccctgaaaagcagtgggcgttgggccaagtctatgagatccaagccgagcatcgcggtcagtctaccatggatgacatacaatatcctgaagcgagaaaacaaccgacttcaaagtctgtgacttcggaataacactgatatcttcatatcctataaggccctcactcggttcattgagagaatcccatccaacgacgcagacttcaagcagatcgcctgcatctttgatccgactggcaagcttgtagatggctgcctggtaatggctctgaagatagtcctggatgttttgtccgtcaatgatacagagaggagcaaagtctctgcctccgaagaagagagtaaatacagtctgagatacaaaacgataaacgttggtaccccaaatctagatataaggtacaaagatagcggttaacgtaatggtatcgaggtaactctatttatgaaggcaacataccatggcaggaagcttggctggatcgggattgtctgcatcagggtattcggcatgtatgaatgcagccgatgttttggtgaaattacgtggattgagcccgcaggcaattaaagtccagtatggtgcgcctgaaccacccgagaatcgagaccactaaatgcgtgagggattgcagaggaacaaagaggataagacgttaaaatcgaagagtcgagttaaagatattctagaaggaagggcacatacgcaatcctggtgagggtccatatagacctgcagcagtgatatattacaacaagagaaagaagtacagtgcttagtagattgtctgacagacatggcttgagacaggatgtgacgtacgagaaagccgtattctttgcactttcgtaagacttcgacagtgtagtccatgaattcttcatcatattttcccctatttgaacatggcaatcgtacattgagataagacattgatttcctataccagagagcgaaatcgacagggactggataagatgatacgatttgtacgtacggtccttcatgctcaatgctttcccaggtaacgacgtaacggagtacgttgaaaccccatcctcttaatcgagcaaggtgaatgtctgcactcccatcatccaacctaagtggttggccgacaaacgattctccgccgttctctgctttgtcccaaagatcatccaggcactgagacggctgggagagagggctcttgcttgctcccgagagattgattccccgtagaagaagatgtcgtccagcggtgtctgaagtatagaaagaagcaagttgataagacttctgtgggatatatacatatcaggcatgcggagccggaggtggagtaagttgatcaacaggagatagaactaacctctgaagaaagcagaagatgagtgaaggtaataatcggggatcggttccgaggtcactggcgagtgtgtggcaggaggagtcatcgatttcagagttctttctttctctattccaacagtgagcgagataaaaaagacaacgagacaaggagagcaggaggtgaaagtgagagatgtagaacaggaacaggatcaggaacaccgagataacattgagcaacggtaggtgggatgagtggttcgatcgtgtcacgtgaatacacaaaggctatgctcaatcgatgacgatttcccgttgcgcacgtgtattctatcaagaactttccaaaagacactcactttatcgcttctaggccacaccctcttgtacaacaacagccaactctttatctatttggtcaaatacttcgacttgttcctcccggatcgaattgtctcaaggccaattgacatttgaggctggtacggaaagatgaagttcgccaggtatctggtaaggttccatcctgatgaactcgaacgttcgatctacatgctgagagactaacccaccatcctgtgtatacgctctgccttctttttctttttctttgttttttttcttttgagacatcctaagcaagagaatctcacaccagaatggagaagagtgtgtttccgtaatattccttcattttttgcagtacagcccaaacctgactgtagtattgtctggcattatatccttgcttaggcatacatagattataaaggtctgaagaagataatcaaaactgtgaatccgaggagtccctcagccttccggagaaatgatagctcggactctgatgatgaagctcccgtgacggatgtctctagaccatcccagtctgcgacaaataccactactcaacctacgccgtcttccttctccgctaatgaaccgcaactaacgaagaaaacttctcgttcgagccatgaagaatctgaatcgggcagggaaaccgaagcagaagatgaggcagagggtgttcagcatattccactagacggcttacctcctcctcaactccaaggttcccctctcaggcagcctgcggcgtcgtctttttcgctggtgccaggcttcatgaagcctaccgggctcacaagcgagacatcagccaagagtccttccttacgagcctcgtacggcagttttaattctacgccatccagacatggctcaagacagaattcttcgcccagagtcgtttcactgcacccccaaatttcttctgagttagcttcagattcccaaccgtcttctgacaaagattcgtcgaacttatcgtcgacgggaggtggtcttgaacggctaacccccgcatcacttcttcatcgacccgtaccagagcgaccttcttcaactctacttgcccctacctcatcatctgtccaattccgttcgaatcttccctctccttcatttttcaaattgaaaccatcgcgtcaatcccccgcctcgaatccatcgcgcaccagtgcgagactgtctccactcttaccagaatctcaagtcaagtcctcgcccgtcacattcggaccgttgattcatgatctatctaaaaaaggagatatagcagcgcccatcattggtcaaaccgcccatgaagatgaatacgaagagatgccgcctaggacgggtgtattggggtatatgcgtagaaggacctcgaatgcaggtccgcccagtacaagatcgcctatggcaacattggatacgatcttgccaacactgttaccgcaggaaaagaatttttacgacgcaatcgagcgcgagctcaataaggttgaaacgtccgtatcctatttaaggtatattttttcgtcttgagcgggccacttgctgatatccatctttcgttgctctgtttgttacatcagattttactgctcgagagaagatgagatgaaggaacgagtgagcgtgatcaaggttcaaatgagagaattagccgaacatcgaaagatattttatgtaggtctcgtttctcatcaaggaatcacctccacctttcctctcatcatatagactaatgcttgtatcattcttggcgttgtcaaagcaataccatccgacctcaaaccatttacctgcagaatattttgggcgtgttctcaaaccgattgtcaacatccaccccgctctggccccttctaatttgactcaaaattctaacagatcctcatatccatccgccatcaatcatcttcgccagcaacaatccaatcaacaaaccaaccggggaatagctaagcaagctatctcttctggaaaagaagatgagcttatagatgaacacagacacaacaacgcaaagggacagttgagtgacccgacggatgcggagtatgatccagagttgtacaaaaagtataagcgaaagctgaagcttgctgttttggagtgctacaaaggttcgtccgatcgaacaggaacaagagtccctttacggtgagctgacatgaatgtgtgtttgtgcccaaacctcggatcaggcctagaggtattgaagaattataggttaatgagcatatgatcttagatttagagttcctcttttgaagcgtaactgaaagcccattacgttgaatcctttcttgtctctggtcaaacaatcaacagaatcctcaatgtcactggattccggaaggctctcaagaaatttgagaaagcttcgaagatcaaactcatggatgtttatacgaaggaacgaatccagaagcagcggttttctgtaggtcatctgtcctttccctctcggaaatgttgatacacatataaaaattgagacgtttctttgcatgtgtcatgttggggatttatctagcatgcggaaacggtggatgagatgatcgatgatatggagaacatgtatgctactcgatttggtcagttccctagtccgggtatttcttttctttacagttgtctgagtatcgctcaacttggtatgtctcattgttggaaatctgatggcagaaaacggaaatcggaagaacgccagacagcgtttgcgagtatcagcctctacaaaaacacatcatttcagcatgtatcggtccgggctctatatcggattcggtcttcctgctctcatcgatgggatcgtttccagtgagcatactactttctttccttgttcggggctcttccctgtttggttcgtttcttcttaaaagaaacaagaacgggtgcgattgattgaatacgaatctatctctacaggcttccacccatctgtccgacaggctgttcccgcgtggggtcctcttcttcaagtttacgcggccatgtatcttccagtattgttcgcgatgctattttacttgaatttgaccgtctggtcagattcgagaataaattatcaattcatattcgagtttgatttgagatctgtactaaattatagacagtacgtatgacccaactttgttattgttgaatcggctagccggatcactgatttatgttcttcatgcatggattatcagatatctagaggtctgtagctgcctatcctgaatagtgatactttccacgtttattcttttaactgacaggaagaacccgtgctcttttctagattcctgccttcttgttcttcatgctctcatagttcgttgattttctccttcgctaagcgaattctgttagattttgaaagaatcaaactcatcgttgtaaattggaacagtgctttctggtttacgttccatgaagtgggttcgcccaacatcgctccgacgacatggcctctggcctggctcgtattcacaatatgcttcttcgtcaatccaataaacattcttcatcggcccgctcgattctggttcatcaggtttgtctcttccaagtcaggctatgatccgctctggaaagtcttcgacgtactgactggaatgaaatttctgaagagctttgtggagagtttttactccgttttacagcagcgttgaattcgcagctttcttcttagccggtaaggttgcggttctttgtttgttttcgacgacgaagctcactagaaactgtttctttggtttggatgtattcagatgaattgaactcattgatctttacaatgtacaatatctggtccgtccctcttctttcatgatacttgactctatcgaactccattcctgatccaactttttttctcttgatataggttcctgggctgtgcacaaggaaacaactggaccaatgtctacgaccattgtgaacaatatgaatcctggatcccggcagtgctgtcttgcctcccacctttgttgcgattattgcaatgtattcagcgttggagggattcaggagtgaagatccatctgatcaacgcaagtcgctcatctatactcttggcttcttttttgattgaggatctgaactgttctgatctaacttcttggattatttcgaatcgtcaattgggtctccaggctggaaaatatttgtctaccatcgttacctatgtcttttactacatatggagatctcgaggtctgtacttgttgcttctctcttgattatttctaaagcttgattgagaaagaaaaattttcacgataatgacaggcaattccatcagagatgctttcttcccaatttggttcgtcgtcgcaaccgctggatcgatttatacaaccggttgggaccttttgatcgattggtcgcttcttagaccagaccgtgggttccttcggaaagacctgatttacaccggagcgaaaccgggctactatatagctattgtacgcctttttccatagtttctggctggagtattgccaggaaggagagatccagctaatcgttctcatgtgtttattccagattaccaatgtgatcgttcgattcatttggatagggtacatcccgccaggtggtatcagcttgaggctcagagcaccttgtcagttcatactctctccctcatcctggcttttgcgagaacgaatggacacttacatgaccaaggtgccttagtgttttaccttctggagatgttgagacgatttcaatggaactttttccgagtcgagaacgaagtaagtcaacctatccagctatgtcgacctcccaagtcctaatgaaagatttacttgattatatagatgctcggaaatgtggatcaataccgagtgactcgagagcttccactcccctacgatctttcgcgagaaccagattcatctgaaggagaagaggccgaacatacttccattctttcaccaagaatgaaaggaaagaggtcagtggggagtccgtctgttgcattgaggttgtcgaaacgaaagtcaagagggacttctgtcaatggggaacccgcggagaatgtttgatcaaggaagagaccaacgattcctcgtccctattctttcttcgatttattttatcgtttttcttttaagtttattctaaaatgttaaccatcttatatactcacatacgcatacatacatgcccacatgcacgcatacacacaactcttgactcatcgcctttcgcttgtctttcatcaatccactgttgtgttattcatgtacgacaaggtttcatacttatgctcatccatctctagctcacgcacttcctttctctcggtaatttgcgcgttcgagccccagtgctgccctcggggttatttgttgtgataaacgcgttataaaatagacgccatacattacatctcaagaatttcatccttgttcttcgttctttgatatgaccgcatcgcagactttctcttcctcgacacgacgcgcgctctcttgagttgctaagcgacttgtaaaggctggtacaattttatagaagattctcaagtacatgtcttgcttcctgtttgatcagatcccatccagcttggacatggtgcttttcagtagagggtgttcctatggcaaacctgatacaaaagacgttttctggtaggacggtttgctgttgttcacatttattccgagacaagaagggaagacgagtggtaaagcttgtcgttttagtctcttgattgcgaggtatcgaggagaaatacgtaagaacagaagaaaagatagtgggagaagaacgaacggttagaaggatctctctcctttcagaaagcctgtcatacaataacctgttgatcctgttcagatcattctcttccgtcacccctacaggcttcaacctgaacactactagcgccaacatctgtttcgctaccagttcccaaccttcctctttttcaatgaccgatcccaaatcttgggctagtttgactgatttccgaatgtgtgattggaatccctcaagcccgaaggaacgaagaacgaaccacagtttgagtgatcggaatcgacgtcccaaggagagggaagtgtttcgaagatcaagtacagatccggagtcgctttgctttgtgcgaagatattcaggagtgatatctagtgcgaagggcaagagatggcgatctttgacctatgaagggaggaaagagctcgttagcaaaggaaacatatataccgaaaaacgacttctcgggaggaaacgagaatagacttacccagagaccagtagcatcaaaatttgtctgagtcaagtgccgcacggagaacatatcagtcaagaggattgacacttggatttagattgataggagcactcacgaggccctatcggagggtgattgtaaataagtatgaggatggttcatcattgtgtttctccaatgcagcgtgaaacaaaatacagaagacatacgaacccatttgtggaagtttgaactccaagaatccgcatactgttttccatttgcgagtcagcaaagtcagaaggcagagaagacggaatggcgtacgattgatgctgccgacatacctggttgacctcgtctaatttcccgagtcctctgaattcaggacaggcataactcattcccgcccaagctgcatctatatggaaatgaacgcctgggtaatccttcactgtatcaacaacaaagaagtgagttataaagccgaacgactataagaataccaaacaagcaacgaggttcgccaagataggatatcagaatcaactgacaaacttggccgatctctccaatgtggtcaatagctcctgagctggtcgtcccgaccgttccgatgaccatgaacggaatctagaggtaaacatcagggggaaggtgagtgaagacatatcaagattaaatattgggaatggttaacgaacaaatccatttttgatatcttcctcaaaagcttttcggagattatcgcctcgaagggaaagatcattctctgagttgacctggacagctcggaagtgataccccaggatctttgccgccttcgaaccgatactgaattgttgtattcaagtcgatttgttttgagtataaagtctgtgcaaagacccaagaatagagataataatgtaagagcgaacctatgggtttgggtcgaaccatatattgtcaacttttggcttttcctctctctcaggacttgtttgatcgtcgccttcccaaggacgtcgtcgttatccaatttctcgatctgaacagctttctcagtcaggatctcgaagtaccgttctcttgcagcgacagcgacggtcaaacaagcttcactcgccgagccctaatttagtttcagtacgaaacagagcttaagaagaattatgtgcgggctagagaaggaagcaggtgaacggagtacaaaccatgataactccatgtccggttccaccctcggaagccacaaacttttgaggatttaacccaaacatccgtgcgccccaatccatcacgagaagctctagctctgtgcatgcgggtgagcaagcccaattgaaccccgggttggatactgagctagaataaagatcggcaaggatgccctcaaatgaagaattcgcaggaaagtaggcaaagaatgaggggtgttgctggtattgtgtgaatacgatatgagagttaaaggttgagagtcagtataaaccagaagctcgagagagcaaggaaaacctctaacttacccaatgggtaattcctaaggataacataaacgcaaagggtgagtctacccaagaagaaactcaaggaagaagtagtgagagagcataccaggcattatgatctgttggaattcatcggcaatcgtctgaaaggcttcccctttcttaggcacctcggaagcttcaaaagacacaaagaaagaattgaaggtatgagaaaccctcctctgagcaaagattcctacatggttgatacgagcataccggtctgtttgatgaggtagccaggttggacagcactgacaacgtctctgttctcgagtgaggcatagtaatcgcagattcggtctatcgcttgataaccggcttttcgaaagctgctctcagtgggatgatagtttaatattgtttttatattgttcagcagagactacggtcgatagatgttcatctgacacgtacgtttcgatatccatccttctctcttgcttgtgctgtgttgatacaagtatctcaaagtgggtgggtgtattttcggagagacgatggaaaaaaggctgatcggttaccttcatttcgggtctcgccgaacatctttatctagaaatcccagactgaccatccatcttttcgccgttcgtttcgcctctttcatccatcttgctctccctctctcttagatatctgacacaaacacaatgcgctccaaatcccccgttccttcgtgcttctccttcctacggtcctcttcgtccagagtacaatctcctgatccttcttccgttccatcctcgtcgccggtcgctagaagggcggtggatgaaaaggtaacggaggacgatgcattgccagcatactttgcagattccatgaatcttgattctgacgatggcttgaacgacagggtttgttttaggcctcattatctctcgttcgtgttcttcatgccagctgattcgtcattttactgtctttgaaggcgctcgaaacaatccaatcggctatcgatttctattcggccgacctccgagagatttcactctttatctcggaccaccccgaactgtcttaccacgagtttcttgctcacgaccatatcacgagctttttgtcaaaacaagggtttgatgtcaccaaatcctatgtgatacccaccgccttcaaagcttcgttcacgttgaacttcaagtctgggtccttggggaagaacggaagacacgtcgggttctgtagcgaatacgatgcgttacccggcattgggaatgcctgtgggcacaagtgagttagacctcttgaacaggagtattcgccctttgcaagggaaacatgtctcctttttctgtgtactcaagctgattggtttgtctacagcctgatcgcaatcggaggaatcgccgcgttgcttgctactcgagcagcgatgaaagcttatagaatttctggcacggtcactctatttggcacgccggccgaagaaggcggtggtggaaaaatcgagctcatcaaggcgggtgcgtttaaagatctggacgcctgtctgatggtccatccgaccgcaggagggaagaaaggtgaaaagggaacagcaatcatcacaggtactctggcggttcagcagttcaaagtacagtatttcggaaagaccgcccatgcagctctggccccttgggaaggcatcaacgctcttgatgccgctgtccaagcttacagctctatagccatgcttcgtcaacagttgaatccgtctgtcagagtgcatggtatcatcttacaaggcggtctcgttccaaatgtcatcccggatcacacgttaatgaagtggtgtgctcggacgcagtctgcgaaagaactcgacactctgatggccaagcttatcgattgtttcaagttaggccgacagatcttccgtcaagaggagacctttgagaagaagaagaaagttgctgacaataaggcttgtcgtatttacccttttgcagagccgccgccttgtcaactggttgctcgtacgagatcaagatggacgggcctgcgtatagtgagcttcgatgcaacctcccgctctctcaagcattcgcaaaagtactttccaaaatgtacgacatcccagtcaagatagatatcgaccggttcgaaggtgcttctacggactttggaaacatcacatacgaagttccggcgtgccatccggactataccattccttctagacttggtgatcagaaccatacaattggggtcagttctcagtgttgtatttgttcgatctgggtaatccactagctcgatgctgatgattttgagcacgcccattcacgttcagtttaccgaggcggctaggacgaaacaggctcatgaggatacgcttcggatgtcagctggcttggctggtgtcggcatccgagtgttggaagatgaagcgtttgcgaaagaggtgtgtctttttattgtctgctatcattgctctttagatcagtcagaccaactgatcgcatctcttttgcatctcaaactgcaggcaaaaacttggtttaacaataacactaagacttagagccttccttcccttgtttttttatttgcctatcctcttacgttggttgtatgcctatggctttgtcacaagtcaggattgaaataaacatatgatacaaaaagatatggaactgtggtcacgatcgaaagacaacaaaaaacgcagttagagttagtttcgagtaccataaagggtagacatgagaagagaggacgagaagtttaggtgtaggaaatcagaaggaaggcgaatgcgagtgtccacatggggtttatgcgctctcggacaattataaacatccattgtcttaatcactttaggaggaggtggtagaggaatggcagaacaagccagaatcggaaaagagcggactaacctgtgatccaagcaagtagacagctatcgatgatggtcgatgggaggtcggatggtgaatgaaaaacggacaagaaattcggtctgcgcttagcgaattcagaatgtcacgcacgtgacctgatgttcacgtgtccaaatttaaactccgacaaacttccatcgaaacacgtgaccgtgcgagcgtccaagtcgcctagccttctcttgggtttgttgactgcccagtttgctcactcgttctttgctcactcaccgttcttacccgcttgcttgctcttcttgctcgctcgcttgcttgcttgattctttgacagccagatccatttctgtgcttgcttgtccggtcagaaagacttcaaggtgtcctttggtctggttcggtcggatcaattgtatatacagcctcctcctgttgatcttctttcgagctcacattacgcatacgtccaactttcgttcatacatcggcatacactctcactctcgttccttctcatacacgcacctacacgcacttcaacatacgtataccctctctatggaggcacaggaacgtcactccccagagccaatcctcgaggagaccttcctgccacagccctcagacctccagctcggcagccatcatcctacccaccatcctcaccttgatccggatgacacgtcctcgtcgtccctactccatgaacttacatcagaacaagcagacctgctaaaggtccagcttcaacttcattcttaccaacaacagcggcttcatcttcatcaacaccttcaccatcaccaacatccacatcctttctcacttgatgacgacgaagacgacgaagaacacaatagatccccactcgaacaccatcatcatcatgaagacgttcttcgaatccatccgaacgataccgggatctctacccaagatcttgcacctacctctggtctccatcatctcgatttcggtcatccagtcgagtttgcagatggacaggggctccagattcactctcatcaaccgatatatgaggatccgaccggaggaccatatcatctgtcccaaccattcgatttatcatcctcatcgctctcgtttggacatgccgacctgaccgataacgttcattcccatcacagccatcagttatatccacctcatccagaccaccacctgtccgttcaaccggtcgcgtcatcttcgacatcatcgatcgaggatacccaaccgagcggaccgatcaagaagaagatcggtcgtccaggtcgcaagaaatctggagctatctcggtcgatcatgtctcaaacgtgtcgagcgaagagacgagtatgggcaccgccatcggccatgtcatgggtgcgagcgcaaaaattataaagcctactggtgggtctaccactgggccagggccgacaaagaggcttcgtacggttgctagtctaggagacgacatggaaaaaatcgagaaactcagagctcagggtagggagagacagaggcgaaagagagagcgagaccgagcgagagctgccggactatctgtagaggtatgtctctgatgtttctatccgtgactcggttgagagatcgaatctgagtgtgttcctttcttgttcctatcgatagccggaaaatacagcccccaagtctatctctggacaaaactttgaactcgaccgcgatcttgaatcaagtctgacgatgtctctataccatcctgtacaaagtgctccccattcttcccctccatccgattctacaaccgcgtctcttctggcgacgagccaaaacaatcaacctacccttgaatccggccttcctccaatagatcctcccccgatattcagacttcacgatcatgacgaccgacggcagacaacgaacggacagcccagtacacacctgcacataccccaaccctctcaccctgatccatctcccctgtcagcagacctagacccatgcacacacgctccggcacaagcacatcctaacaagattctcgatgaccaagggatgcttcaggggctggatgacttgagtcgttcaggaatacgagtgttagaagaacacatgtccgcaggtaacaaccggggagaactggtggacattcaacagtgtttggaacgggttcatacccagagaaataaagttgaggaacccaacaaggacgaagagcataccatacagtcaatggcacctgcgcaagtagcggacgcgcttggcggaggtattcgcctctccgttggaagtgatctagctctcacagacggtaaagcactcgatcgagtcgtaccgatcgagaaagttgacgaagagagaaaagatcgatgtcaggaggacggccggtctgcacagagcccaaaaatcgactcggctttgacattggatgagtgggatatctcgatcgaccttggtttggaccgtcatctctcatcgtcaccttcccgttcggatgagagtctgaacggaaatatacatccccaatctgatggatctgggaatcaaaacggaaatgggaatgaagatagtacacgcgtctaccatgcttcccttagggtaaaaggaacaaccattctaggaggacaggatggtctacacgtcgaagggcttcacgcacaagatggagatcacccggagggcttgttggagatgacaccttcgtcgtcgatcccgcttctgccatacttctgttccggttaacgctgtgtcttcttcttcgccgcttttttctcttgtttctgccagctccctttcttttgtttcatctcatggttccagtttactttctttactttgacgaacgaccaatgcctcgatttcatctgttgtgttctttcttatcaaccttactttgtatatctcaatttttcgcatgcctttgttgatttttcgtctctttgtttttctcttttcctttcgatttctatatccactgtttatctcattcttgtctcggattttgtttcccccatcccatgagatttctttttacctatgtaaactcttcatttctctttcttcttctattaattttgataacttgtgcattagtcatatcttatacatcatatacgtttcgcactacctcatccttcgtactctatcagacaatggcatccccttcttgatcgacctctatccgtttcttactgtagacggaacattgatcgaatctctatgatggtgatgaaagcaacaaggaaaccccgaaaggagagaaagagttcctacgagtgtatatgtatatttcctagaaagcgatttctggacgaatggaaatcaaacacaaagaacccgagaggtctagtcagaaaatgaagatttctttctcatcagaaaactgaaggacggaccatcgacttttgatctagttaaacagaatccctaagagttgttcatttgttcgtcagatataatttcagtcacattcaatccccgccttctaaaggctcatttcgaaagcagggagaggaggaaagaaggagaaacatcaaatgcgcgaaccgaggaaaactcacagggatgacccagtccttgcaaccacaacattgacctgcccagtcgaaattcccgatcttgctgccacatcgttcgttgggacagatgatctttccacctaactgacctgattcaaagatcggtttcatccagtccatctgatccaattgtcaatcaatgacaataattcgtatatgttttaggttagaaggtttgtacgaggggttaatagtttgactaaagtagaggaagaaagagaagggagagcgtacaggctctagaaagtatcctgaacaagccgagtttacgataatggctccaccacgaccatgtacattaccatgtccgttgacaaccgacggatgaagagctgcgccatcttcgttggtgatatcatttaaggagaaagatgaaggattgtctgaggtagagggttctgaaggtacggtcgagggatgaagcacatgttctcgtagagctaggacttttctatcctttccatcgttcgcccagacaccaaacgagttgatctcagaacaagcgccagtcgtgtgatgatgatgaagaagaagagagacagaccgacaactgctacatcgaagtcttcgtctttcaagcccggtaggactcgatagagagactgaggcgaaacatgttgtttcgggaggtgaaccgttaccgtcttcatccattgagacacacgcacacatcggattgactcaagatcagaccagctcgtgtgaaaaagcattgagctctgagcctacgcctgcccacccagctgcctatgcatgcaagacgagagagatgcaaagaagaaaagacggactcatcatgttctctacgattctctttctgaagaacgccctagtcgaccgatctttggctgatactttgtaccctcctttttgaaaaacatcgagctgactcaagaatgattctgacggtctttagtcccaaaatccaaagtaagagttttcgatcagacctctctcgccctttctatccacctgaccgagatcttgtctgaatgagagaagaggaagaggaacgaacagcgtgcaacttctctttgctttgacggcctctacagcctcatcaactgacagacctctgtttgccataaggtaagcagctgccactgtcgctgatctcgctatcaagagtgaagtccggcaaatcagaacaaggaacaatggataattcaggtgtttgttccgtatataggggcggctcagctcccttacccaactcacatggagcaaggatttccagaaaggaccaaagagagaacacatacacatcccagcttgacaatgaatcagcacgccctcccccttttctaatccattcttgacgaattgaactgcttctgggagaaaggagaggatatctgcttgaggtatatcatcgataggtatcgtcagtcggtcgatttccttcattcgttccagtcggtttcatttcgccccaattcatttcgatttaatctaatgtcagtccttccagctacaaaggagtgaatgaaaagaaccgaacgagacagacatcaggcagatcaacacttcctctcaatacgctcacgacgtgtctcactcgttctctcttcaacctctccgtatcggatgcggccataaggtttccgacccataggttctctatgacctcattcatatgttccgtcactagcacagctataggcggagaagacctagacaccgcctctggctctgactggacctcaggctcggtagaggagatagaatctaccattagtatttcggaaggaggatgttgtggagcaaatgaaaggtattcccgaaaagcctatctggcggcaagcgttccagagttatcttatcaattaatttccttgttctctcatgggcaaatcatcataatcattaggggaaatataggcagaggagatagactagaattacatgacagaagatgacactgccgggtcgaatagatttatacaaaacatggcctgcttaacagctctcggtcccgtaccaaacgaaatcgggggaaggtccgcaaaagattatgaccaacacagataacgaaagaacaggaagggtgaaagaacaatctaatctgacgacctcagaggttcatccgactcggtctcctctaatcggacgctccgagtattcctatctgcccttgagcttttcagaaatttgcttaaccctccgagacttgactcgactcgaccttctctggccttcatcacgaagcacgcagcggcgacgaggaaccaccagaagatgtaggccgagatcgaacatattgtgccgttgttgttccagccgacagcagcctgtgcaatcatagcccaaccgttcgttttgatctctctgtttgataggcatcacaaagaaggaagataagcaagtcagcggcagtatcgaacacaaggaagagagagggacgcacgggttgagccaatcctggtcgaagtgaaagacgtttcctcgaaggtcatatgatccaggtccactgcctgattcggcaagatcgcctccaaccttcctctcgaacgggtaggcctcaagacgagcgacaccggtagcaaagagacctgtttgtttcgaaatccatatgcaaaagttatgagaaaagatcggaaggggtatggtaacaagagaggaacccagatcgaacatacctcctccaacaaggaagagcaaacacgatgaaaagatgataaaggtgtgcatcccgacattttttgacgaggttgatcggtagagcatataaccgataataagcccaactaagatcccggacagaatcgagatcggaatcgtctctggctgagtcacagcggcctggattgtcgatgtttatgatagatgacatcagatcgagaagaggcacctagggaaagaagtagggcaaacactaacacctgcgacaaagataacaccttcaaggccctctcggaggagagttacgaacggaaggatcctatgtttacaggacatatcagaaggatgggttgagtttcaggaaaggagtttaatggttagaacatgactccaaggcttcaaactcaccagagagcccatcgacctcggttccaaccctttctctttccgctagtctccaaggcatcgacgttttcgaacgctttagcaagcttaattcgccatttgattcgggcgcggtcgaggcgaaggaaggacaggccggtaataaggatgaagatagaggagagcagggagaaaatgccttcccagagtgtctctgccaaggcaaacgtttcggcgagagtctcgaagaactgagaagagaaaagggatgagccgaaagaggacgttgagggaaaagagtggaaggcaacttacgatgagaataaacacaacaccgatgaagagagatagcaagaaaccagagaccacgccaagccagatctgtgagcatgaacagaaactccgaggagtttagtgacactgaactgatttgaattgagccgtagctatacgggaaaagctaccaaaaaaatattcaactgacctggaggtccatctttcgcttcaacgctttctctgctttacccatttctttgtcgtattcaacaacgttctcttcatcctctgatcttctcagtagagagaccgactctactgctctaccacgatgatcatctgcgtctggcccaaggccgtcatcggatgaagctctgggagagactgaggaaaggtcgtctgtcgatattgactctagcgaaggacgttgctttgttgcgcttgatggagtggataggatgagttgggtggtgaacgagagaagaaccgagacgatcaaagccgactcgatggtctaaaggtggaaaatcggtcaatgccgaaggaaagaaggatcgaagaggaaagaggaaaggtacatacctctcgaaggatgatgaaaaatatcgagggctagagagaggaagacccatgagtgttccagcaagaggaatgaaatcgatatattccaagaaggaaagagtaatcggtagggaaagcaagagagaaaggaatgagtacgtgtctacgtcttttgatctaaaagagagaagagaaagaaaaagacacaagaggagtagtcaacttaaggacacctacgttgaacaagccggtggatgacatatttggcctttttgagggaacaagagaagaagaacgagaagaagccaacaacaaggaagccaaagagaagcagagatgggtattgtgagaaggatacggaatagaaagaaataaagtcgctggaaggagaaaagagtatataagaaaaggggagcaggctcgagcgtgtgaaggaggggcaggctga

SEQ ID NO: 714 - DNA, 30842 bp, Xanthophyllomyces dendrorhous
ggatggtgggggggagggagtggaagaccagacaggtaccaggcaccaggcacggtcatttgggcacaggcacaggctctggagcacaggacatgcagtcgccatcaggcacaataatttctccgattgtccctgagcaatcaaatacaagatcggcccaatcagataaagccttctggttcgtccatccgcggctcagtttctgttagggttagctctgtcccggctccaacgtgtgtacgtcagttcgaccggaggcaactattgtactcaacataggtccttatgtgtggtcgctccgtttatccaaaggatatctgttcgttcgagttgtgttgagttgtcgaaataaacatgtcctgtctatgtagtgatctcggctgctctgtctagtacacaatcatgctcattcaatgttcacaggacatacacacagcggcctaattggacgcaagataccacatcaacaagacaagggccaagccaacggccccaccgacgacttcgccctggccacaaccaaggccaatcaaaccgagccagccataaccgaacgagagatctaacgcggcccccagctttgcctctgccacaatcctgatctcccaagcgagctttcctgaggtctgaactgggatcaccagtgaccgagccccgtcttcaccatcatcactttccttcccatcttccacatcgggacaaggaatcgctaacgtcagcaccaccggcacgtgatctgacagaccgagtgtcacaacagagctatatctctccggacggatcgctcgctcgtctcgaccgcgagaggcaaacaaaatccgatcggtgaacgccggtagtcgtttcggactgtacgccgctggattgccgatcactcgtttgtatgtcggtccaaattcacctagcggaacctcattaaacccgacgagactttttcccgtccgctggacgtcacccagttggtcatacaccgccagcccgccccaggaccgaccggctctgtcgagatcagccatcatctgtctgaacacgttgtccggtgggaaatccttcccctgggacgtgctcgacagacgatagttcagatctccaaacaaaaacacgtggttcgtcgtgttgaacgagcttcttggaaacttcttgccaggcgatctcgtatataccccactcgacacattcgaaggcaacgaaggaaatcgtagatgggtcgtcaatcgctcatagttcccgattcggctggccaccgccttggcgtttgcatgcggtgcaaagtgtgcgcatacaaacctatatcaatccttagttcccgtgagctttcctttgttcctttgcctacttcttttcgtttgattgcctacgacgcgccaagagaaatgaagaaaactcacgtcaggctctccaacggaagccccacctcgttcttttctacccttcttctcaaccagactctcccaccaacggctgccttgttccctaccaatccaccgagaaatccaagcgcgacagagcttgtagaaacctctcctacgatctttgctttctgaccatcagtagaggcataagcaccagaaaccgtccggtcgagtgcaaaaatccagagtccgacattaacgtgggcagacgaggagagcagagtgtagtgttcgttcgctggaacagatccctcgggcagtaatgaagacgcgtgttcggataggattgaagatactttcaagcccaataccgatagcagtggagcacttaagccagcatctaatcaacccattctcacatagctgattagtgtgccattccgcgagctaatgcaaacagtacgatacatcactcacacgccgaggccaagtcagttatcctgcaaagccaagaaccaaaaaacgcatacacacagagacaggattcttgagtgagacgcgctctgataattcaggttcgataagacacaagagagaagatacgaactcttgagcaccgataacgaccaaatctggcggcgattttgccgagaaatccgtcaaattgggtacaagccattctgtgaggtcctgtacaaggccatacagttacaacctcagtttccatgacgcttctttgcgtttccataatcagcccaccttgatcgtcgctttcgagccttggagcccaagattatatgttgtctggagacatgggaaaaaagaacaacagatcaaccaagtgatctctacacagtcaagacttgagagcgtacgaaccacaaatatattcaattctttattcatccttgattcggtcgagtgagagttggattgagcaaggtggcagggatagacagagacacagatggagagatgacgtttgggcgtcagcacacaacgtgtaaccatcaacataacccatattgacagggtcggtcgctgggacttgggcggatcggcttgggcgggacgggacgagaggcgcaacggatcgtcagctattggccatatttttccgtctttccacgacaaactctctcctcctcatctcttctttgctcctctccttctcttcttcaacttctttatactctttttgtcttcaaaatggccgtcggaaacgtaagtataggtgtcggccttgtcgtctttgtcgttctgttctcttttggagtttttctctctcctttctggccatttatacacatcctattgaccctcgatcctctcttttttcttgactcaacaaaatcaaactgtatacactttcttcttctctactccttcctcttctctctttctggccctcttttcttgacacagtccatctaccagaacctcttccagcgaaactcggtctacgtcaccgccatcttcctcactgccttttccttcagcgtcggattcgactctgccacctctgccttctacgataactggaacaagggtgtacgtgatccgtcttttctccttcttttcttccttgttagctctcttttcttgtctcgaggttgagagttattgagtacgagcaaaacggagtcaaagaagagcctttcttcgattggcagacaaaatggggtggatctcaaaccccattggatctttccgagaggaaatgcatcaccagtcatctagcgaatcatcggttcggagaaagagtatagagagaaggaacgcatgggcaaccggtcgtgatatatttgaactacccggttcaatcagaaatcgagaattcaatctctgtgttgagggatgacatccagtatcgagtcctcatcgactcgatcgatagaataaggatttccccaactagcccaacattcgtatcaactcttccacttttcctttcttcatccttcctcgccttcaatctctcttgctctcacaaccacgttcaaggaataattggtccttgacacaaagacggaaactgacgcgtctcttgcttcttcttcattgtcttccttcacaacaaacagaaacaatggaaggagtacgttccctcgttcatgcatatgttcatttctctttttctcaatcattcacgctgacctgcgacgtctcatccacctcgcttatccttggtttcccattttacctctagcatccgacacaagttcgtcgagtctggtgatgacgagtaaaaagctaagccaaatggcaaagccaagtgtcttgtggagaggagtgggcgagtggagtgtggggagttgggaagaaggccttcttgtcttttgatatgagagaggtgttttttcttcgtattttcttagaatgtctctattttttttttcttttcttattggaaacgagaactatgcgatctcagtctcagcacatcatcacctgtgagacgaagaaaacggaaagtgaggagaaagaataactgaaagaagaaagagactaaggtgaaagcatacgtactacgaaagaatgtgaatacagctttgtcttgaggtttgtccttcttggattttctctaggtgcattatttcttcatcatgtatttgtttcattttgcctcgtattcatccagtaaagcaggaaacgctcataaggatccagcaaatatatcaggaaggagagagagcagagaggatgatggttgaaagagggaatagatgaggaatgtacaaccaaatgagaggtagagtaggacaagaaaagccacgagaacagggagtaaggtgaaggtcgaccaagtttttcagcagaattaggtgataaaggcaaacgaaggaaatatccatctctactcgtcttctcggcgagctcgcttgcctttagccctacagttttaatccaatccaggttcagacggagaggtttgttcagccatctgtctcgtcaccggaagctcactgccggatagaccgaaaagagaggaaataagaatgaagagatctcacttttcgctcaactccaaaccacctcgtttgtttcccttctttgcatcatccaagaactgatccaatccgaacggatcgatagtcgccgtcgtatccttctcgaactgtaccggcccatcccttggagcagactctccgccgggtacactctctgttccttcgaatcgatggctcactccgagtgagaacctgtcgttctgaaggttcttcaccacaccatcctcggttccaccaccataagtctcctcgccggcggcttgtccagaggaagaaagcggtttatagatcgcggcggcagcggcagatccgtggaagagaggcttgtcatacagattgtacgcgtcgtcggatgcaaaggaaccagaaagggactctcggttgaaaagtcgggaatcaatcatcgtctccttgttcgcagacggtttggcgaggccaagagcaatcttttcagagatatctcggttctgctccctgtacacataaggaaagaaacacagcagacgtgacaaaaggaggttatcagaccaggcgttctggcaaagcaactagagatgacttacttagcaatcatcttcgctctctgttcgttacccatactctgcattctcatctctctctctctctcctgcttctgctcccttcgaagtttctccctgatcctgatctcttctgcgtcctcctcatcatcccctcctttgctcttctcgctgtcactatcactgtcactgtcactcccgctaccgctctcacttccatatccacccaacgcgccgcccattcccttctcgacagcctttgatggcaaagcgggcgtggcagcagtggtgataccagctcggtcgtctcgagcccgttgggcgagcaaccgaaggtgctcctccttcgcagccttttctttttgagcaagcttctgctgcataagcgaacgttggcgaacttcttctcgggcatgtcggtcggccacgaaaagagcctccgaaaacttggcaaagttgtcgttgatgtgaacctgttaatgaatgaaaatagaaagggatagatgggatgagtttataaaagcgagaaggtaccatatttgtgtatcagacgcgaccgcgaacgcatctacgtacatcctgaaggccacgaccgtcagcagccaatcttttgtcaagagggatggtgtatcctttgttgttcttccagttggaaatacaaggcgggatcatccaatccttctgctcctgagcggttgcctttctcgggggacttcgaagcacgggcggaggaggcgatggaggacctcgagggatcttctttgctttgaatcgagcaggctgaagaggatcctcgacgacctcagtcattttgatgattcgttggttcgcgttggaagatccctgctgggcaggagtgtaacggacgtaggacgtgtttccttgagagtcagcaacctatcaatgtatccgacccgacaaaccaagggacgtatcagcaccgtgtctcatataatcaatggaacttctgagtagtatgaaacggactcgggaaggctgggcagccttgatctttgtgttgctgagtttctccaaagcgagtctagtcctttcggctgtgttcataacttcctcctcggatggcctctctaacgaacggtcagtcgtagaaagatctgttctctgagcaataggcaccaggtctgattagacaaaacaaggttcacagaattttaagaggatcaaaaccaagacccgataggaagaagagcgcaaggaaaagtacatcagtcagcttcttcagtcattgcctcattcttcacacaaggtcaacccgaacggcatctcctgaaaaccaatgagatccaaacccatgaaaactactgacctttaaaagaagactggacgttctttccttctcgttggccttgctgagcgatggctccgtagttcacgtttccatccgagtcgacctgaagggcgagtgtgttgcccgagccacctttcttccgtccaagatcaagaggatactgagcaaccggacactctgggtaagcacctccatcagcaaaatcttcaggtcgtgacggcctccaaccacgacgtgatccgtaaggctttgcaggagttagaatcgtcagagctgaagaagatggctgatcggacgtgtcctcttcgtgaccataagtcggggtgggagcggacgagaagcgaggtgttggaagaaggcttgattgaggggggagaaaacaaagttgccaacgcacaccaagaagataggatgagaaaaaaggctcgacatggtcttgtgccacaccaacacgacccagaatcactcactttgctaaggccgccatgatgaagaaccagccggacgagcagaagagaaagtgaaggttggtggatgacaatcgatgaaggcgtaaagatactccttgtagctctctcacttaagctagttggttttgattcttttttgatttgtcaacttcaagatattgagtattacctaatccacatcatattccacctcaagatactcaaaagagtgtaagacggagggaacaggacagagagaccacaatgtctatctatttccatggatcggtacgactagaggaaaaaaatgatatatgtgttctatcccattcagagatttacataaaactccaatgactttattaacaatggtcccttctcttcttcctcccattggtattccagacctttgagcacagcattgcgctccttcagtcgaacttttcgaatcctcactgcaaagccggcagagatcggacggtgatcagatatgttgggctcgtatcgttggtctgtgtcagcaaataacagaggaacatatcagtgttggaaatattgactgaacccagtggatgctaccaatccgattagatcagatgcttacagtgcaagggttcgatgttagccggcaccctagatcgatagagaatccggtcgcacctggaagaggagatgagaagaacgctgagtattatacggaacacgaacagaagaaaactcaggtcggtatcacttaccaggctggaacctgtacgttacgtcaagtgcagagggaggatgagttgtcaatgtaggtcatgacggaaaaacaacagaaatagaagtacgtacccgttttttctcacttgtatcatactcgtcagagtttcgattatacttgtatgttggactgtttaacacagaaccatccatatcagtcggaccatagccacaacacagggaggagaaacaagtgaaagtgcgggagactaactcgaatgctacgggcggttccgagaacgtcctgagtctaaagttcggattcgtcttcatctcctttttcaactgatcatgttctaaaaggtatgctcgttctccgcatctcaagctagatatcacgttctctcttctaagatcgatccggtagttgagatcaccctgaaggaaacagatgtcatggtcgagcaccatcgagccatctcctccgctggcgtaagcgagctcgtctcggcctaaactggacatagggaaccgagattcttcgtcaagaatgctagcaagatcctggcaggagagaaatgcatatagcagagtggtaagcatagagcggcagagatctggaagatttatcttgattaatgaagaagacttacagcgtttcgagcagtcttctgattttgtcctgcagccaggtgacaattgatgaagcacatagaagaatcatccacgatgaacctggcaattatagctccctgtgttttggatatatgacagatacaaaccttcagcgcggtacaaaccgaacatggctaagcaaaagaaaagacaacagagacaaaccttgttaccaaacattccagccatccctctctttactgtggtgatcgcaatatctctcaggttgatcgtctctgcgtttttcacgaatatacaagtgaacagtccaacgaggttctgggtatggacaaccgtgtaaggtgactcggctggcatggctacttgaacggcttgaacgagcttatcataccacagccggtagcgctgagataccttctcggacatgtctccattcactttagatttactaaagagaagggattctgatagaatcacgatcagataaaccaggcagacaaatgagcgtgaggaaaagattcgaagggcacaagatcagaaaacagctctagactcactagcctggagtttcttatcttctagatcgatcaactcttgaaatccaaagatgatgatgtcaggcgaactctccgaagtcaacacagatgttaaaaacgatgcgttgtcggcgttggacgtcaactgagacggtttggaagcgtcgatgttccatgaacaagagagcacggtgagatctctgtacgaacagaattcggattctcgctctaagagacgactctctgagattacaaaacatttccgtgtgttagaaacatattcttcagacaaagaagagagcaatgaggcctaaatacctagccaatcaacagctaacaacccgtcccaagcatgtacacagtcgtctcttccccaagagtagacagttaagaaaccctatcggatgtggtttacagattttgttttataacaataaagagtatcagaatcagacacactggacgcaaaacccttcgaaatagaggagaaagagaaacagaatagacttacatcgtttatggaaccaatatctatgtcgaacccgagaatagggctctccctacgagaaaagggcacatagatcccataccacaattttggataaggtcaaccacgaatatcccttgcatagaaaaacagacagatagaaaaccggtcatcatcctctcatagtcaaaaacttacgaatgagctccccacaaattggtaactctccaagggaacgattgtacgtcataaatcgtgatcactcccttcctcgatcctgcccatagtctatctccaactcctatcaaagcgacgatcgccgtggtcgataccttgatgacagacaaacaggccgggttggttcctctcgaccaaacagagatttgaccgccttcgtgtccaaggtagacatattccgagagagcggggataatcgttccgcacaagacagcacccgaagctacattcgctgtagggagaactctcccgcctgttatggaggagctggcagtggtggcagagtcggttgaagaaccgaatggttcgtataccctgatagtcggtcgacgagcagacgtggcatcagaaaaatgatggctatgatgactgacggaattgtgtcgaccggggaggagggaaaggttcgaagaacctcctgttgaaacgagagacgacgtggatcccgtggaagaaccactcgagcctccgataggtccactcgacgtccatatctgatcgtccaagaggccaacgtatgtttgtctatctgcaagcctcaacgtttgactcgcgttgaacatgttgaattgcccgttctctttcatcttgaacaagtgtgacttgccggactcatctaccgtcaagattgattgtttgtgcttgacgatcgtcagaactggaccatgatgagcccctatcctgatctgcgtcgctatagatccccaaaggtccatctcccaaagatggccttccttgcttccacaccatagatagcgcgcgtcctcaccttctacagccgacggtcggaaacaaagggcagtgatctttgagtccttatgttttatctctagtcccatctccttttggtccatggagagaagcatcacataggatatcccctgctgagccgctcctctgacgtcgtacactttcagatgagaatggcccacggcgaccatacctgacgaacaagcaaacgccgtcggatgccccgagcctgaagaatgtttgatctgaaccggatgaggatgtagtaccgggggccttctgttcgacatggttggatctgggtactcgtccgcctttcgagaaaaagagtcggtgaccggaagtccggaaggagccgtgggcgtcgcttcatcatcttcattttcatcttcggaatcatcgccttcataaacgaacgatggatcggatagctgtgattttggagtgttagaataagctacttctgcagagggtccgacccggcgagttggtggcggcggtggtggtggtgggggatatgaagaggctagttctgaagttgaatgttgagtgtatggtgaagatgcggaggtgggtcctgtgaatggggaagcggttcgactggcaggccttgagtaggaagttcttggactatcccgtttgatcgtcaccgatctcatgggaggtggtggtggcggaacccaagaatcttcagttgaagacgcaatctcagattgaatcccagagccggataatgttctggacctggtaggtagagggggggcaatcgatacattcgtatagtcattaggagtagacgctatcggtcgcttagatgaaggtaaaggtggtggtggtggtggtggcgattgactcaagacttcctcgaggtctcccgctgaggaacttgtagaggaagcagagacaagagtggtagcccttctccttactggcaacggtggtttactctgcccttccaagctaacggtcgttgggacggaggatgatattgaggatgcagacgacggcgttcgggatggcaccggcggcttgtgtctggcaggcattattacctgaggggtaggagtggaagaggtctccaccgccgatgggtcaaacgtcggaggcaagggcggaattgagtaaggctcatcatccctgttaacgatagagctcgatattggacttctcgaccgaggtggtggaacaggcggtggaggttttaatgcagtcggaaagatgacttctgttcgagcagcagattgaccgccaggggagacctggttgatgggttgatcgtatgctgatgggggttgaagcttgattgcatgaacacctttagcgagcgatgaagagttgacgttcgatggctgtttgactgatgctgatgatggagggtttaattcagggctgagagatggtcggttcggaggaattggtggcggactcaaaagttctggctcgtcagtcaaacctcttgaggaagaatctagtgtatcgacgtttggaggtgaagctatcaacggagggacaatatggaatgatggtgagggtgatggcacgcgcgcaggtccaggtcgggcggacgtcgagacatttgtggaacctccgaactttgatctcaaagaagacacgctttgaaatccttcggtctcctcctctcccgactgtgtctctagttctgtctgtgcagagataggagacggagagatgacgaccattttagcaggcgcgaactgtgcgctctccactcccccagaggctagctttatcgtcggcacaagaggagaaggagcagaatttcctatactagtgtttattactggctttaccatcgtcgtcttcgttgggatgatgttttgtgagctagctgttggtttcgtggcttttgatggaaccggcggtgggatcttttttggtgtaggtatcggcgctgttcccaaagattgaccaagaggtcggccgacagaagttgaggtgaaatgttctgagggtgtggacggctggaatacagggagtggtgttctatcagaagatggtgcatatggaggtggtgatatctcggatgcgactgtcgtagcctttgaagacagattggacagggatgagggcacaggtgatccccgcggagaagtctgtgaagaatttgaatcagacaccgaagctgagttggatacctgatcgtccgagagtatcgttggatattcagacagaaccaacatcagtcctcttggagttggatgaatgttatgtgttcatagaagagaacagtagagggacaaaccgttcttcgtcccttcagacgatcatcgtcgtcatcatcatcagcatcattcacaacagctgttgaaggcctggtctccattttggcttcatcaatcatacccccaccgttcagaccggacctactaggcagtctactacctattcctttccctccatttgagggagttgtgatgggtgcactgcccgctttcgacatgttctcccatcttgatcgaagagaactgactggtgcggacgacggatctggtccttcttcaccctcatgtggatccatcccaagtattccccttcactgattcttggatttttctctttcgtattcaaataccacaaccctgtctgatgctttgctccgtgcttgtagactgttgaattcgaagaaagacagagcgaaaataaaagacgtgactttagaagagatgcaagaacagtaaaggcaaaggcggtaagaatgaagttagaagatcgctcacgttccaggctgacgtcagctcagaagaggtatgtcaccctgtcgagcaaggttacatgctgacaaatcaatccttttggggttacatgatcaagaagcccgcaattttttctctccttgacgcgaaggacttgcgatcgacacatttatgacgtgaaaaccccggtttcgtgtcctctgttttagacgtttgtctcacgccagctctgtggtctgtgtctcaaccaatataaggtgaaacagtttaacgctagtggagaagacagtccaaggagtgtggatatatggaggaggatggatgaatttcgttttgctctctctccctctcaaaagagtttttagtagatcagctccaactcttgaaggcagaggcgtttttcttctgagaacatggcattggatacatggatctgtgcattcgcactcgttcaggcagaggaagaataggcaaggaaataagaggaagaagaaaggtcgaagaagagaaaaatagcaaggaaaaagtcgaatagatgagggggaaagaaggaaggaaacgaagatgaaacgaatcctgtctaaatctaaggttagacacaccgatagcggagctaaaggtcgagataaaagtatcccaagaagagaagagaaggcttgtccaagatactggacaagacaagattaagctagtagtatgagagcagaagaatatcatagagtgaatcagttgtccgaaagttcaggcaaagatgaacaagtcgagctcggacgtttcgagggacacgggggggaggccctcgagtagaagagaagtccaccgtcggatgaagcaaacacacaacggaggaaatggacaacgaaaggacaggaacgagatgagagaagaaaaggtgaaagagagagcagttcaagatatgtaatgtcggggtaatgctggggatttgactaagcatagatctatataggagaagaagtaaagaggggggatataccgaatccaaaaaaagttcctagggtaatatatacaataaaagtaatcacaaaacgagagtcgaaacgaaaagaacgtaagagatgaagacatcagagcgcatataacgaggagtaagtcaatatgagaaaagaaaggaagtaaaagagggaggacgctagattcagcttatcgcctggaagcagcgtttcgggtgagcccttttcgtgccgttccggcaccagcaacgataggagcatcgccggccttcttcacacacgatttgttgtcccgaccgattgagtatccctggagactcgggaagacagatggtgatgttgttggtaagaaagcctctcgaacgtatcaaagggacaggggaaaggatagacaaacctcgacacaggaagcaaccacacatcgtccctcctcacatccgacctggtcaacgtgagagatagccgagcaatcttgcctgtgaccacgagaagaacaaagaggaaaagatgtgcatcagtttattgttaacaaggtgatgaacagcatatcgaatagtggcttgaatggtaaacagacataccctgtacccatagtgacacagccaccacagctcttgagctcggtctttggctcgatacactcaaacccgacgctgaaccagttggccagcgtcttgagctttgtgtcgctcaccgtcttctccccagcggccaagttcgggcaggcgagcggagactctgccgagcaaaggaactgactaaagttttgattctttgcctgcatcggtttctgcttcggtgaccgcttacccatccgacgtgacggggcaggagctcggggaaccacgacaggaccgacaggagtagcgtctgtcgaggccagcttgttcaaaccggcagctggcttgtgaaccggctgggcgaggacgagactgggagcaagagcgagcagaaggcaggccaaagaaaggacggtgatcttagagtagaacatctcggagaggaagaataggctggataggtgggtggatgaatgtagatctgaaaaagagattaattgggcaaagtcgcaaggaaaggaaaggaggacgcgtaaggagggaacaggctgtctgaaaagaaaggacgggtgctgaagagcttatgggagatgaacgaggacgaggacgagaaggagaaaggaaaggaaaggatgaatgtattggatgtgtatggtatgcgttggctctgtatgtttttatgtggatggatgcgaaagagaagagaagaagaagagagcgagaacaagagccatagccacaatcgatcctatcgagtaagcttttgggtctaaaaagaaaaacatgaggatggttacgcgtgtggattcgggctacgcgtaccgagcctgacatggctgtcgtcttggccttgttcggccgagcctgacgctggcccgagtgcaagtagaagagagcctaatgtttttctttttcgtttgctctttcgctggatgtgctgcggatagatcaaggcacaacgcgcagtgctcccggtccctggcgggtcaaggtctgtgccttatcgatccgctttgaccttttttttgcccctgtttcctcccccccaacaggcacgcacgcacgcatgcacctcctcctaacgctcagacctcctcccctcatcgtcctcgtcccgctcaccgacttctttgtttctgtctcttccaccttgcaatcccatctctaggtgtccatcctcgttctttcttctttctcctctctctcttcacggtagagaacgatggcacccttgacggcagtttggcgtcggttgccgacggcgacatctctcctcatcggaattctcgtcgggcttctgtttgccaacgtacgttttttctttcttttttttgtatatatcttattctgttctttagccatcttgttgtcgtctcatcgcaagtcaaatcgacagactgtatgcgtatgaacaacgctcacctatctcttccgttctcttcgtgccggtctcatcatcggcatcttcttctttggcgtctttgtcttcgggatcttcctctctgcttgtatccgttcgggctggcccttcgacccatccttcgctttctttcgatctgatagatcttctcttctcgacaggtatgcccttcatgtttcctctctgctttccgggtgataccaggcaagccacgtgatcccctctttgaataaagctgatcccattgctgtctctcacacacacaaaatacccttggtacctgcctccttgaccggcatgtcactgactcgaaacttaccaccatactcacatcttcggtcctaaaaggctccagctgcagaatcttggtcaggagctcgttcgaattctcgtccgaatccaggatctggtagagcgcctgcccgtaatcaacctagccttcctacactcgatcagcgacatcgagtccttgagcttctttctactctctctccccatcacactacgcagtgcacgcggcacgctcaacctatctacgtcgctcaggccctcaagcggtacgagcctttgtttgtgaagaaaaagtcttggaacagggttggtggctggctgtccggttggggagcgaagcctgtcaagcccacggggggtgagtacggcctgtcttccaaccgacagtatgataaggatgatgatgaaagcgggaggtcatatgtcaagcgagatctctctggtcaaaagcacaagtactttttcgcaatcaacttgtacaattcgttcgacgtcattcccgacatttttgcgactttgtttagagtggccgccatccttggttaccacaatgtatatgtgtcaatctacgagaacggttcgaccgatcagaccaaggcactcctcaagatctttgatgctctagccggcacagctggactccgagtcgaaattcgatcgtccatgcgaacgagaggaaagtttaaccaccgaatcgagtacttggctgaggttcgaaacgccgcgctcgtcccgcttcacgagctcagagagaacaacgatgaaaagtttgactcgatcgtgttcatgaatgatatccttccctgtgtggatgatttactggagctgatctggcagagtagacgacagaacgccggtatcacgtgtgcgtcagactacatgttccacgaggatatcggagcccccgtcttttacgacaactgggttgcccgagatatcaacggaaccgctttggagaacgagccgttcgagtcggtcttccaccataccgattcggcctaccgattccagaatcacctgcctctccaggtccagtcgtgctggaacggaatcgccatcatggatcctgcccctctctacatgatgccccctgtgaaatttagaatggcaaatctggactcgaacgagtgtagtgcttcagaatgttcgctcatctgtaacgattacaccaacgccggttatggtcgaattttgatggttcctcgagtgaagctcgcctacgacaacaaagtataccctattattcatcctgatcgacgaaacctgacagctatccgaggatacaagcgattgggaggtctaccagacgatcctcatacggatccacaggacagaacgtggtacggaccccacgaccgacttttcacacaggaggagacggatttgattcagtttgagaagaaccccgagtacgtctggtgttggggttgggatggagcaggagatctcgatggaccggatgtcgacccgatctgggaaaagatggaagactactcgttcacggaaaaggctgtcaccatcaagcacgatcgatcgttcaagatgtgatcgggcgtctgacttgtcgattggaaggtttagggatgagacgggttggtctcttaaaataggaggcaaggtgaaatatgaataggttggatgatatgaaaagagggccttatctgccaaatatgttttctttctattccgtgtttccttttctctgcttcttttttcttcttcttctcatcttccattacattgttcttaactgagagcttccttcccatcatcttcctacacttcctcataattttaacttcgtcttttcatctcgtcataatctcccatatccatctcggacgtcatcctctctattttccatcccatcaatcacccatttgcgtgttctgttgcgtatcacctcttttcagcctttcttcttccttttttttggttttcctctgatccgaatgtctagaatttgggcctgcttgcgttttctttatcaatttcctcgaactgtatccggattagccactttctctggcttgtttgcctggcgcaagaggagattgtaaagtgggatttggtgggaaacacatgtctagcgatcatacgagggtaacgacgtatactaacaggaggagaaaacaaaatgtgcaatggttcgggaggaagaaaagtatcagaagaagaaaaagaaaaagggaagggcagtgacatcatttaatagaattcaaataacaatgatgaaagagaatggcaggttagctcagaccgctgcttcttactcctgctcggtcacctggttaagggcggcgaagctgagaggagtgaaagcgtatccaccggccatataatgctttccgtttgcctcgacccagtgaagtcggagggcgtgcaagaaggcagagagaccttccataatgcaaagaatgacgagagtgagggtgaaccaaacggcaaacataaacaccaagaacaaggtcgctccggcgccggtcgatttagcgtctgccgggaaggcgttctccagcgtcatctggtagagaacctcggagagctgggcgtgagcgagcgacaaagcccacagtcgaaggtaagaagctgtgttggagatacatccaagacagaactcgatggtgtgaatgacttggtggatgatgatctccccggcatcatgaccgtgctcttcctcctcctgcatctgctcagccatagcatgaccattaccttcctcctcctcttcctgctcaatcgactctctgggctccgctccatcaccagctgatcggttggagatactttgatatccctcgtccttaggcttcttctgttccttgagcaaaaggtaaggcttcaagcacagcatccacggcacacacaccagagccaacaggagtaagaacacctgaaggggaccctggtacgcgaagagctgctcggagggatccaagttacccggcgagaggaacatgtagataagcatgttgagcagaccagggggggagttcattccaggctgagtccagtcggtggcccatttgtagatgatgcagatcacgagatatccaaagatggacatcatgaacaagacttggggaacaaactcggcgtagatactgatataatcctcgaaatgaaggtggttgggaacttgaagacagatggcaaaggtcatctagaaaaataaaaaaggcggtcggttagtcaaatggtctttgttgaatgagaaagatcagagaccacgaaagaaaaaactcacgtggataactccaaggatgatactcatcttcatcttgtatgagttagtgaacaccaacgcgttatcggttccgtgccaagcagggtccaatccgaagggatacacgcccgtttggattgcctcaatagtgccgtttcctttgggccactcccagccggactgccagatggtcattgacttggagaagatgtcgttgtacatcagaccagtgaacatggagaagactcccatcaaaagaatgatgtatcggccactatgatttcaggtaaaggggtagcagcagtggtcagatcgggtttacatcttccaacgcaccggcatcaaagactcacaagaagaaggtttcgaaaatctctcccaacccagcctttgagagtttcctctcgttaagaaccatgaacagcccaacgaggaaggcaaggaaaccgtgtccaagatctccaaacatgacagcgaacaagaaagggaacgtggtcacagtgaaaagaccggggttgacctcttgataagtggccacaccatacgagtcaatgatggtctggaaagcctcggtgaagggtgacgttcgatggaaagtaggaggcttctggtgagttcgaagctcatacaagattccagggactgaagtgttggcggtttcctatcaaaatcagaggaaaggcgaatatggtaagctcgagtgcgttcagattgtttgctcaaaagaagaagggacgaaccgcagcccttcgcaacgctagctggatagcggtgatgtctctggtaggacaccaaccttcggcaaccaaagtctgctttctggagtctcggctcatcaagttcatcgtctgatagactgccttctccttctggacagcatccttccaggcgttcagtccctcggcaatcttgctcaactcaacccgtctggtctgacttgtgttccaaacgaccgtgttgagatcttccagtctgccttcaacctccctcagtgcgttgttccttagatcagggttagagtcaacagggtacagagttccacccatactctctgcaacctttcggatcttggtcaagagctcggatccgtgggcgaagatgatgaaaacgttctttcgggtttcttccgaggtaatcggatcgacaaagagctggtcgatctcggcgtagttcatgtaaagatttcctcgaaggactcgccagaggattcgctcaaaggtcgccatacgggctcgatcgatcgttccggatacgaactccagatcataaccgtatccaccagcaacaccttgcgagacctcattgggatggaagtcagaagatgatcggtggagcaaaggggcggtaccctcgtcgttttcgaaagaggaacgaatctccggctgtcgaccttcagcctgaagtatccaaacaagaagatcgccacagtgtgtttgatgtcagctccatcgatcgccacgcaagatgggaggttaatatcaactgatagaatggacgaacgttttggaaaaagacagcggtttcccggagaacgcacttggcctcctccaactctcgttgcttcttgaccaaagcttcccacgagctgttcatctgagccaaccggccttcgtgctcctgcagcttgagatcgagctcatcgatggcctgggggcctcgaggcccaactgtagtgaagggaggaatggatgctagggagggaacatggataggaggttgggagacggtatcgatttgattactgaacagtcggagccgtcgatccatctcgtccagtcgacgaacgtcaccgacaaaagatcgctggaacgcgttgacctcagggttgagctagatttgaatcgaaaaagagagcatatgagctttccaaagactctcagttgcagagacatagtcaaacttgcggtaaaactctcttaaagcgtccaccaaaggccactctgtttcgtgaaaaatcatcacggattggagcgaagccgaaatagctcgactcacatccttaaactgtacgtttcccatttctcctagctcactgagagtatcgtgtaaaacctatatgggaagcattagaccggagagtgggtttataagcttcattcttcatggctggtgtgatcgacgagaaaagaagaaaagaaaaagaaagagatggcaaacgcacctctccagggataaagagctggatgagggacatctcttccgatcctgtagagtgtcacacccaaacacaaccatccgggtcagccaaaaagagtcaacagacacagaccaagaccctgagacgaacggaagagagaagggtattgagtcgccatgttgagaggtgcccaaaagtgtttagatgctctatgtgtgggtaagtggagagaagaggtagccgcattgaaagtctctgtcagatcgcccgcacggcaaagttcgtgggaccggccctattactgttagggttaacgtcaccttactagccatttgactgttaatggtagaaggcctgccttgatatcttaagtatagatacggtaaacagcgagcaagaaccacagcagtgatcagatgagaagagaagcaaggagacatgaatcgattcgaagtttgacgaggagaaacaatgagaaagactaacaacgagcaggctagccggatgacacctaagggtattcggtttacgtgcgctcagctgtttcagtatatgatctctgatacgatttaataggaactaagtcagcatgttttaacggtgtgatccaagttcgctgaatgaccagaacacagaaagatgatctatctctctctcaggtgatggtctgcccactccaagcaacggacggatcgacgcgtcatttacctgcagacgcgtctgacctgctcggacgcgtcgagacgcagagtagcccgggttctcttcctcctcatacctcgccttcttttatcttctcctctgctgacttctaatacctaaattgaacagctggctcatcaggcgaaccaaatccttcttggaatgggctcccagggctcccagggaccatgtgatccgttcaatttcagctctcagagctcgtcctttgaacgcgccctcgccgctcttcctttgtcccctccgactctaccaccggccaagcggacatcttcctcaaccagcgtgccgaccgatccatcgtctcctagtcctgttcttcctccttgctttcctgttcgatcagccgctcctttgccgctgttgaaaccagctggcccggtgctgacgtcaaaacggccactgaacaagttagaggagtatgagctcaaggcctacgctcccagtagatttggagaggtcggagactacatgaagaacaaacggatgaagctacagttacagaacagagagatcgctcagactaggcaggatggagtgcctcagatctttaaaggtctggctatatatgtaagtcattcgatctgtaattatttgcacctgcttctcgacatacgttgatctgatgccgtttgaaccataccagattaatggctatgtccagccttctcttcaagagctcagagatatgtttctctctcatgggggagagtatcacgcctatttagataagtacgtttgtcatacacttctgacatgtatcacgttaccctagtcacttagtgcgagagctgacagtcgtttctatctcagaaagagcttagtgacccatatcgttgcgaccaatctgacgcctgccaaggtacgcgtagtttcggctttattctcatcagcaatctatatatgctgacgagcggcatgagaacaaccacattcgcaacagatcaaagagtttcaacaccggaaagtcgtgacacccagttggatcgttgaatcgactcaggctggaaaactgtttgtctattcctgtagcgtctgccagccaaaatttgttgtaatggacggacgagagcattcacagctaacataaatcatcatacgtaacctatctagacttccttggtcgaattatcgctggaggcctgtacccctagcaacatctacgtctaactcccgacctactcaaccaagccaactgactactcaacggagtattcgatccttttctggtcaatactacgagccagtcaaacaacccctcaaaccgctgataactgagccatctcttatgtctccatcgcctgattctatcactgcaaacttatccgctaaacacaccctcacagttctcaaaaaacaatcttcgtcctcgttaaatcgcagctcatcctctttgatattggcgaagacggatatcagtcctcctcggacgactccctcctctttcgtaagaaaagagaagacaagggtgtctcaggaaatcatacgacccgtaacggacctggaggttgaggaggagttgcttgtcatggattctttcgagcattctagagactcacaagaggagcacgccaaggaaggagactcacttaagggaaaggggaagaatctacgacgcaagaaggagaaagggaagaaaaagaaacgcgctgatcctttctcttcctcttcttcatcctcatcctcagcttcggatgaagaagctgacaagagaacgaagagaagcatgagtcaccgtctttcgtcccagcgggttcgtctggagatgactgctagaagtcttactcgctctcagagagccgccgtccaaccaaacccatacgatgatgactttctagatcagcccacatctaaattaaaaccttcatctcgcccgacagtggctgaccggtctttacgtctttatcaatcattatcaaccgatcgcctccctctggatatgccccaaacctccctggtgaagacgcgtgaccagcccacctctactcgtgatcgagctagagaccagaatcgttcccaactttcaccacgcacaactctcgaattaagcaatgatgatcctcttcttctggtgccttccaataagacatcgatatcaactcagccaaagacctatcgctctctcaagactgcgcgtataccgtctactctcataattccctcagatcctcgtcctacgagtctcaaagagaactctaaaacaaccagtagagagaggtcagagcgggaggagggaaaggcaaagagaaaaaagaggacgaggagagtcagatttgaagatgaagtggatataggtatgaagcggacagatctcacgggggcccttaagtcaccaccaccactcttgcaatcaacacctttaggggcgacaaagtcccggtgcttagaggatcttgagattgagaaggaggaaaggagggctctcatgatgttagacaagatgagaaggatcgagtcagaccttatctctgaagagaaacagaacgatgggcgggcagtctcttctttcaaagcttcatcgacttctctccctactttagtttctccctcccctctctcccatacttctcatgctgagcagtccacggttccttcccggacttcgatagaatccactgaatctccagcccaacttccaactactcaccctcagcctgttctggtcggaatcgctcccgccgagaaggtagtgtcgataagtcacgttgataccctgaaatctcccaagagtgcgcttgtagtcaattccatgactagatatgccttgcatgaggagcatcctcaggcaagagagttaatgcaagattcagcgtggagaagagggcatacagctcagagcgaaacatttttggaaggatactatgggaaatccaggtttgttctacagggtttctcttcctaatatgtcttttgttgtgctaacgaaaaaatggatatgccatcatctaaaggctccatcatctttctaattggaaagctgaattgaaagttcttgtcgctcaggcccggtgtgactctcgctcgctccccgtttcgcgagttttagctcctcattctttggccgattcttttcttcctcgacctgcttctctcactacctctgtcaagcgatccggaagaggagagaggatcatcatgcattgcgactttgacgctttctttgtttctgtcggtttggcgggagaggagaggaaggcgttgagaggtagaccagtggtggtctgtcattcgctgacaggtggaagacagagtacaagtgagattgcgagtcctagctacgaggctagggcgtttggaataaaagctgggatgaggtttgtatctcttttctatctcagctcattcacggtctaagtattaactattgtgacgtatctctcgactcaaaatgactcttgtagtcttggacaggccaaaaggttgtgtcctgaagtgaagagtattccttacgagtttgagaaatacaaatctacctcgtctgtaccatgttcctctctgtttacatgctcacttcttatctcagtttaactaatgctagcggtatgtgatcctaccgcgcacttggtccggttagtctaaaattctacaccatacttctatcttacgccgacagtttcttccaagcggtatcgatcgacgaagccctgatggaagtgacctctcgggtcaatgatcttgctaagaatggcactgagagggctggaagagaattggctgaaagaattagagaagatattaggcaagctactggttgtgaaggttggcctttcgattttttcctaccggagagtgcctgtcctcatcttacacttcatcttgcttttctacatatcaaatatagtctcgatcggggtagcttctaacacgctattggcccggctagctactcgaagagctaagcctgcaggatcctttcatctgatccaggacagagtatcagagtttatggagagtcttgtgagcgttctatcatcaaagttctctatacccgaaagagtataaccgatcgtcctcttcaaacaggatgttgccgatctatgggggattggtagagaaaccaagctcaaggtagcatatcttttctcttcgttctactagatacagtaatttatatctacggtctgacgttacatatcctttcctttcttcacagatcgaagctgctttcaaaacgacccgagttggagaactcttgaagaagcgcctcggagaatttcagcatattctgggtcccaaaacaggagagaccgtgtacaacgcctgtcgaggaattgactcgaagcctttgaaggaagaatcagaaagaagaagtgtcagcgccgaagttaatgtatgtctcgtatttcaatctttctaggttatctttgttgacaaacaaatcgttcactctgtctttgtttagtacggcgttcgatttgagaagaattcccaagcagaagactttttgcagaacttatcggtagaagtctcaaacaggatgaagaaagttgatcgggctggacggatgataacactgaagatcatgaagagagctgaaggagccccggttgaggcgcccaaggtaagcttattcttatagctcgtagctttaaggtggctaccattttttctcaaccacctatcatttgcttgttacggggtgcagtttatgggtcatggaaaatgcgacgtcgtgaacaagagcaaagaactagtgggttctagaggaggcgcgacggacgaccctgtcgccattggaaaagccgctgtcactttgctaaagctgatggacataccagcatctgaacttcggggcattggaattgtaagcatacttaatgaatagtttaagactgcattgattcgcagctttatcatactgaatatgctgtccgtctgtaaagatgattacgaagcttgaggacccagtagtcatttcaaatctcaagaaggctggtcaaaccactttaactttccaaaagccagacgttgcctcagtaccaaagtcggcgcaaacttctatcctaccaccaccatcaccaccaacttctgcggctcccgccgtagttgctcctcccgttgacctaccgacctgtctggatcagtcgatcctggatgttgcccttgtagactcttctacatcagctcctaccaatgcagatcgtcaatcgatccatgcgatactcacaaatactccacgaaccacgaagaaaccctcccctccacctggaacccctctgaatttgctcccagcgtactctcaagtcgataaagaaacccttgcacaactcccttcatctatgatccgagagctttatcctcagtggcagtctacgcaatcgaagccgtcatactctcagcctaatgatgtgcctagtccatctattcagcttgtagattctccaccacccctcaggaatccatctcccgtcaaaaaatcgcgtgtagacgtctctcatattgccaagcagcttcgaccttcaaagaaatctcctatgcggaaccctcctgcttgcttcgcgccgcctgtagcaggacgatctttacctgctatagaatcgctccaagcgaatgcgtctagaaagcttgcgcccaaagggtctctagaggagattactcaactggccgaactactaggttgggatctgaatttcatcaagtccttgcctccggctgacctgaaagaaattttggatgaagggaggaggcaacgcgatgttcgagatcgattggtcagaaaaggatcaggcgacaaatccaacccgacttcagccttcccaccccgcgtcacttctcttacgccagaaaaagccttgcacgatagaccgggtaaccaattgatcacaatgatacctacgagatcgatggcgacgatgtcgagggacaaccatacgactgatcgatggaaaggcgatccaccagcaccgattcttgggaagaagaataaactagacccggaggttctagcccaaggccaatcgattgattgtctgcgcgagatcatctcgtcttgggtagatactgagggagcgactgggccttcgcttccaggcgttcagatggtaggtgattttgtggtggcttgtgtgaagacgaagggaaaaggtcataaagagcgagcgaggaaactgttgagttggtgggagtatgagctgaccgagcggtggcccgagaataaattctcgatgagccaggatacatatcgcaatgaagaggaggaagaggagggtaggctgaaaggcgcaggagcactttggtggggggcgctgaaggcatgtctaaaaagactgaatgaggtccattatttacccgccttgggctgctcgctgtctctctcgaaataaacaatttgtacataacgtctcactccatacaaacacacctacaccctcaaacattgcatagttgttgtacagtttttcttttacgtcatactcatctggatttgtttgcatcaggtatctggatccatagcgatcaatgtcttcttttccgttacttatatatgttatacttgttcatcattcgcgtacttatggacaggcgaagatacaagaggtgaagttgaggatatgtaattctgcctcgctcttgaaagcgacggcatgacattgtggaaagaagtaaacaacccggacttctttctcaaatttcaaaacttgtcgattcacaatgtacacttgctgctgagaacgttgttttgagatttatggaaacatagaatattgattgtttcttttttacattttgagttttttcttagttgacggaaacgagcttgacctcgaagtggagagtcgagttcttggggatcccgggaagggccttgtttccgtaagcgagggcagcacttgagatgaaaagcacgtagaagataggaaaattgtatgattagatatcagttcgaacaagatacaaaagatagagacgagtgaacaagatgaacgtacgggatggtaagctttcgctctccaccaatggccataccggcaacaccctggtcccaacccttgatgacctctcctcggccgaggttgaagacgaactagaggtaaacgaaaagaaggacatcgtaagcaccaaaacgaggtggaaacagttgcagatgtatagatgaaagaaacatacaggctttccgttggtattgctgtcaaagacctttccgtttccgagcttaccgatgtatcgcataccgaccttcttgccggacttggcgacaacaccgtttccgagcttggaatcctcgacaaccaatccgttggggtgagtgatgggtccctacgagtagtagaaaatgagtttaaggactgtcagtaaaagtccttgccttgtccgtcttgacgatcgatcagctgtcggctgtatctactgaccttcttagcggccttcttctcggcaggagcagccttcttctcctcgaccttgggggcgggagcagcggccttcttctcctcgacgggcgcggcggcagcagctccagactcggtcttgagcttcttagcctgcttcttcttctcggtcttggtcataggggcctcagtggcggcgggggcggtgagctcggcgacggcggcagatcgcttggcggacttcttctcggggatctcagtgatgctggcggtagactcgtcggccatctcgtcctaataatcgagtgacaaatgtatagtcagaacatgttcagacacagatcttctcataagagactcacatccatatcctcctcatcgctccagtcctctccctcagggtcagagtctgcatggatagaattgagatgtgattagcattgcctccgcaactttcggtagacacaggctatcacgtacaatcatcgtactcggagtccgagtcagggtcctggttggcatcaggctcctggtcgaggtagtttccagaaaggtgaacgacgctggttgacgacacgtgtaatggttgttaagctatataggatgatgcacatttagtggatgagccagaaacttacttctgtccagtgacggtgatgatgatctcatcctcctcggtgaaggtgaggttaagggtggactgctcagtctacgagagcgcagtaccaagggatcgtcgagcgagtagctgttagtcttgtatctctacaggagacgtgcttcccgcactgctcgcctaaaactagttcaaacaaggaaagacggacctttccggcggtcaagctggtaagaacaacggtcctgctgggaagctccttgagctcctcctcctcctcctcctcctcttcctcgtcagactcttcgtcaaagtccggtcgtcggagagccttctcgggaacgatctcgtgggtgagcttgacaacggatcgtccggtcgggtcggcaagatcctcaccgagagcggcgttggtgatgacgaagtctcggggaacgatgcagtggaactcctttccctgtggcggccaaagaagtgaagggcgtgggatggttcatcagcttggtccatacaaaattttgaacgaacaaatgcaagtctaaacgaacaggctcgataatggcggacctaaggagcacaaagacacgtccaattgaggattataaacgtcagcacggcagcattcctttctaccaagcgcaaacgccccaagctggacactcaccaaacggcgatcttgataggggacatggctctatagactgggatgaatgaaggtgagtgtgaacgaaagaaacgagggtgtggttgattgaagtggccaaaaaagttgaaagaaaatattaaggaaggaaaaagaacgaggacttattaaatcaaatataaaattcaaatactcaagtttatctaagtac

SEQ ID NO: 715 - DNA, 12519 bp, Xanthophyllomyces dendrorhous
gttgctctactcgttctctccgtccatctttcgtccagttgactatcatctacaagcatctctatctttcattgtctttgtgtgtgtctttgccatggtatgtctgctggtttggtggttgggtgcttgggaagagctggatcatgtcggctgatctggttgggtccatcgggtttatacaggccaacgctcttcgtccttatttgtccgccgttaggtcaacgctcacagccgctcttaccttggagaactttggatcccaggtatgtgtttcagttgtcatggccgttcgtcttgttttggctgtcgaggaaacggcaactgatgtaagcggtctcatccggtcataccaatcttgtccaggtggtggagagacataatgttcccgagatcgaggctcggttcgtatccatctctccttcatccgccagtctaacctcagcctgatctgttgtcgtgctccttggtttgtccgtatctgcagaacatcttcggaagtcgttctgacccctctgacaataactcgatcggaatctgagaaagtgttgatcgagccttcggtcaactccatccgactctcgatcaagatcaagcaggcagacgacattgagcgaattctatgtcataaattcacccggttcatgacccagcgagcagaaagctttatcatccttagaaggaagcctatacccgtatgtccttcgcaatcgtgtctcctagatatcagtcatggaccctggctatttgagccccactggtggctcaacggcgataaggatctcatttaccatacaccttcagccctagattcctctttccaagacccactctgattctaacgcgatgatccaacattctcttgtccttgcatctcgcgtaaactataacagggctatgatatctccttcctgatcaccaacgctcattctgaaactatgctcaagcacaagctagtagacttcattattcagttcgttctctccttctttcgcgtcatacctcgagctgcgcttggatcttgtatcgtgtcgacatccatgttcacgttgatacctctttcttggttggtctctagatttatggaggaggtggacaaagaaatctcggagatgaagctcagtctgaacgcccgtgcacgtatcaccgccgagtcatatctttcaaccgtaagccacacttgtcatctcgttatctatcagatgaggcgaccctgaaaaaattcgacgactacttgggtcgatagtactgttaaatgtttaaaccagattcaccatcttctcccatcccctcaaggtccttcatggttgcctgttatacttttttctcttcacgttcatgacatgacatgacattcttcttcaatatttggtttccgagcttgtcatccttcttttcgtgactccatgtagaacaaaagaacgcgtctattctcggtttcaacatctatacaactcaaagatgcctgaaccgacgcgtctggtcgttctgtatcggggcgaacgatcaaccccttcaattggtagacaagactttcccttgaacgatcaggtggacgagtcggattgggtcaagtctcgctaaaggttggcccgacctagaaactgtgtccacacgtcgtcagtttcgtgcagaaagagaaaagcgagaacaagcggaaggaacgaaggacggaagacatcagagcgcaacccattagattagtccgacgaaactacaagaaaaaaaaagagcttcccatacgtagacttacggtgtgtcgaaaacaaatgacggaacgaaatcggttgagtgtccagcatgaggtaacccgttccctgagcgtctttaggatgtacaaccctcaaagaaattccacctttgttgagacagatcgattgattccattagttaggaaagctgtgtatccttgggaaaaaaaaagaggagaatgcgatttcttaccaggtaaacggtttggatctttgaggcgtaacatgatggcgaacagagggaaacggttcaacaatgcgagacagatgccgatcatcgcctgggcggctagcactgctgatcgcatctgagaactcagtatcgtatgagaaccgagggtagaagagtagcaagacgttgagaaactgcgagtcaacaagtgcaacaatagcaatgatatcgcgaaggacaactcagcaggctcaccaatgagaaacatagataataagccagaacagtcggaaacaagaatagggaaagagtaaaaagcacggtgcccaagaggagttgatcgattgaataatcaaacgaatcaagtcgattccggagcacattcttccttttacctagctcgaacagttagcatacatttcttcagcaagaccacagagcacaaaaatccactaggaacataaacaggagggaggagaaggaaaacttgaagagaatgaaattaacctcacctctgaagacatcgaacagcccacctaaaatattcttcattcctccaaatataaccgtagccaatcgataggtcacgtaaagatggaccatgcttagacttaacaaatcggataaaacggccagcattgctgtcaacccccctccccaaatgcctatcgagcctagaacgaatatcgtctgggatagataatttgaaatgactttcaacacaactgcagacgatacatacaaaagagagatcgacctgtaagtatgaacagaagcctattttacgaagacaaggtcattgcggaagtatcactgactgtgatcccatttagagatgataaaggagaaagtggatgcgaagaagagggataggtccgtgttgagtttgaatcctagaggccaactgttaagccattccatggctgattttgggagttctacagtatatttctgattggaacgacacgaaccgagacattgtcaatcatcgattaggaggatcaccgatatagggttggcgtacttttaaaaacttaagagctaatgtgcccagatagttttcgttttcacacaagatggatccaatagtccacccaaagatgaaatcgttcaggacaagccagatgatattataaaagctgtatagaagacaacgtacgcattccagagaaaggcaaaacagtaagtgaaaaggatcatggataaaatgaatctatcccaggacgaactttatgtatcgtgatctgtcataaacgttattgagttctggacgatgctcatgtgtcggcgcttgagagtgaaggagggcgatggctgaggctcggtgactaatctggtcaactacaaagagaaaaccagaaggtgttgaaaatgaaaacgttcgaacatgtcccaaaatcatagctatggcctcacctgttgtagacatcccctttatgtaagaggggacagccgaaacggagcttaggcaaattgactgaagagctctcgaacacagagaaacgctggatggtattgttatccgaggcgcgtaaaagttatgtcgcctcttagatgtaggtcgaccaaatgtgttgatctgaatcacagaacagaacaaacccaaaagtatcagtgttttcagtttaatcgaaaatgttttgaacaatcacaacagtatagactgaccacttcaagaacttggcccgtaccaccatcacttctaagcggcgatattctatcccgaccaaaaggtattcctacatcaagagggaaaagagagtacagatgatgcgattgataatctacaggtctgtacaagactacaggatgaattttcatcaaagacgttggttccatcgggtaaccagcttcgttgacgattagcactaggtctgtatttggttccagagcggcggtcgaaagaacggcgacgccgatcaggtcgtcttttgacacatcatctgaggacagggagcagacatgtgtcacaaccaagtgacctgaaggtgttctacaccctctaagaccatactggatgcctggtaggatccttggaggggggtacggatagaagagcatgaccgatagtgcgaagaagaagagcgacgttcgaaaggtggactttaggatgaattgataagataagcattggcgagtcacgtgtcatcgccatacccgcccacagcccagtgacgtttataataaaagcccgttcatccaagaggaaggcaagtttgaccatccgaataatcatcgaatgcaacactctttacttacccgattgaacctttcaacaagatcgtacaagcagatatatagcattactcgagccatgtccaatttccctcaaccctcagcggagcgaaccaacgaattgaaggatgccatcaaggaggttgaggacgatgtcaaggcaatcaacgataaggtcaatcgaaatatcatgaagaagctaatagtttttgacaacattcgctgaaacgtatcgtctgttcttcctcaaattcatcaccgaatggaaaaatatcgcaggcactacttgtagctgtttcgaaagtacgttgtcaaacaaatttttgattaagcaggaccctgatgctcatgatccactatctactaacacagctcaagccctcctcggacatcatggccctctataataacggttaccgtcactttggggaaaactacatccaagagttgtccgacaaggctaaagaggtgatcattctgcgaagggtttatcgatagtacggcgttgatagtaatacttctccttctcgatttatcagttgcctacagacatccactggcattttattggatctttgcagagcaacaaaggtgcgttcgtccttaactttatgatgccaggatttcaaagctaatcgagaagttcctattttcctcttctcttccatagtcaaatttgctactggtacgttgatattcgtggcgatttttgctcccgtgtaatcatgactcacacagagcgcctcgccacggcaacagccatcccgaatcttttcgttcttgagaccctggattctatcaagaaggcagacttgatcgaaaagtctttgtctgctgaaaattcgccccgatcttcccctttgaacgtatatatccaaatcaacacatcaggcgaggacaacaaatctggggtcgctccactatcaaaagcatcctctacagagtcaagagaaccgaaggaagccgtcgagcttgccatgcacatcatcaagtcttgccctcacattcatattcttggtctgatgaccataggttcctgggatgcctcgcacactaaggacgagaccaatccagacttcgttagactcgtcgaaacccgtgaacaattggtggctgaactgaagaaggctcaggttgagaaagataaagtaggcagaccgggagaggattggagattggaattgagcatgggtatgagtgctgacttcaagggagcgttgcaagcaggaagcgatagtgtgagagtgggaactaggtacgttctttccttggctgtaatctctgtattctgcgtcttattggtattgacgttggatataaatttttgctcctcacctttcctcgacttatagtatttttggtgcacgaccacctaaacgaagcgacggaagtcacatggtataagacgaccgtcgagctaccaatagacagtttatgtccaacttgagaggcttcctgtaaacgatcgaggatgcacgtagtatatatatctagggaagggtgttcaagatctgatcgaagaagcgccgtgcgttcctctcaacctcgggttgtacactgtacaagacgctcaattagacgtgtcttgatcggtcacattgctgcaccttccgtatgaacgatctcggttgattttaagagtggaaagcctgtttccttgcagtcctgtaagacctcatacttcgactctgtcagtcattctggagtgttttcttcgaccttcttcatctacattcaaagagtggcgaagaagaaaagaagagacagggtacaggaagttagcaccacgcaggagattcaagaggaaagaacgattcgagacctcaatcaacggaaaacgataccaacctgatacaaccgatcgagagaccagtccgttccctctggcacgtagtcaatctcggaccgagggaatgcccagtcgagaaagtatagaaacaggtgctgaactgagaaaatgatgaccatgaaccagccaaagaccttaccagtgtcgagaagtcttcaaatcaagtgtgtaaggtaagattattgatcaaacgaattctgggagaatttgtcgagcaggatgaaagaacggacctccacattcgatcccatgtacttcttatgaaagtatcttctaggatccctatataaacgtgctcggttcgttcagcaacctcgtcccaagagtacatctttctgactcggtcgtgcgctccgaacgggtcgtatgcgcctgctcggattcggtgaatcgcagatgagagtgcgcgaacaacgtctagttgaaaccccatcgaaattgaggagcagcggaagagaccgagaccgagaccgagaaacaggacttttcaggaaacaggaaggttgaaaggaaaccaatgataacattaatgatacaatgcataccgtcttcatttggttcggcaaaacagatcatatcttcgggcaatatttctggtacaccacccacccgggtcgatacgacgagcaagccggtcgcggctgcttcgatgatggctatcccaaatgcttctgtaagggacgtgttgagaaagatttgtcctttacagagtatctattgtgtttacaatgtagaagagagtcaagggttgtggttgaaggtagatagtcacaacaagcgatgaaacccaacagttaaagaaggggaagaagggagaggacgtaccgaccgaacgtctctcgatttgacgtgacctataagctcgatccgatcctgcaaaaggtgcttctccctcatctgctcgagttctaccatcttgggaccatctccacctaacatgtatcgagcgcaagccaaaaaaaacaacaacaatcatatacagtaagcgtttgtaccctcttgtaagtgaatacagcaagacgatagagggatattttacctatgacaaatcggacttctggaaagtcccgacaaatatgtggtgccgaagcgacgagcagatcgactccctttcgataaacgagcctagagatgaccactatcgtgactgtattgaccatacttatctcttagtctcttcactagaaacaataccaaaatagacaaaaaaataatcacgaaactcactgtagtcgggatcagcagacgacggcgagggaataaaacgggatggaacaaccgcattggggatgacatgagtgacaattgggtctagatcagcgcggagaaccgtgttctctcgtctagaaatcaaacaacatgggtatacccaaagtccgagagaaaatgatgggcgcgaacgtgaacattcactatcactcaaaataacgattgaactgcagaagaaggaccaatctcaccctgtatgactgacacagataactccatccacgtttctcagtgctgctctcagcaatttattcgtcaaaattcctacagcatctccaaagccgaagagactgtgatccgttaagacggttctcacacctaacataggtgcatgcatgatcccctcgtgcgccatagaactgagtgagccatgcccatggacgagatcaattctttctcggagaaggatgttcctcaagtagggtaaaaaaagcataaaattggggagagttgccgacgaagagattgttggaagagggagatgatagaccttgagaccagggaggaggtaccggatgccgattcgatccggcggatgatgatgcgtgatcactataacctaagaatcgaggtatccgaggcaaaagagaatatcgattgggttgcttttcaagtgcctttccatcaagcaaaatccctacagagtgctccctgattttatcagagacgatctcatgatgcaaacttactgtatggcctcttctgaatagcccgacggcaagcatgtatatgtgattctcgacgccgcctaccgacggatgaaagaaatccgagatcatcctacataagaaaacgagtaaagttcaactcgacgttgcgagtgctgaaatagaacgatacaatgcacgcacgctattcgataagaacggattcccttgtctctccgtggcttttcgtactgcgctagcgatgtccctccatctgaggccatgaccagagcaaaggtgaaagcagacgatgagggctgctgatggccggtcgaataagaggaagtagacggagggatggatgatcaactgtgggtcacgtgtttacacagctctgcaaccccgccacataatttctcaaagctcgttctcaccttcaacaatcactactgataaatccataccaaccatccaagtgctctcgacagctacctaagtcagatactcactcaattacacatacacaactatggccgagcaaggagattttaatgcgcccgttcagattgccgagtatgacaaggagaaaatcactatcgttcgtttgacctggctcttctcctgaagttctgcttacgaaagtatcttttcctttgcacaggtgactgatctaagctcgtttttattccttcttactaccttttgctcccctggaacctcgattctccacccctcctgcactcatgtgacggattgatcggttgggataactttgacatattaccctcgcgtgggctgtccaactagcttcccggtgcttccgccgacctctcggctgctaccttcaacatcagagacgaggaccacaccctaggaaacgccttaagatggatggtcatgaagaagtatgttcacgatccttgttcttctcaggccgggcctgctctatatgcctcttcttttttgatcgtagggcgtgctgagatattcctaacatctttctcattgtctgttggttcaatcagccccgacgttcagttctgtggatacaggttcgacctccttttccttctctctgtcatgtcctatcaccggattccatcattgcagaaatatcttagctgacactcaatacaactcttctcgcgactccttcttcaaacagcatgcctcacccgtcagaggcgaagtttcaccttcgaatccagatgtatggtacgtgccgcgtcttactagctcatcctcaaaccagtcgtgtttggtcctcctaacagaaactcatctctctctctctttcctgttttatcatatttcaccgcatcatgtagacaacaagtccgcagtgacgtgtctgctcacagcgctttctgacttgcgcaacttgttgaataccgtcaaggctggctaccaagactccctcgagtacgtcaaactctccttaccattgaacggatggtttgagcctaacgaacacgaaattctccttccttctcacttttttcttccttcaggaccgactcaataaaacgagttcaggatgttaatgttcgggccgaggtagaagacgtccttcgatcccacgccgaggctgttggtggtggaatggaaatcgattcatgatttaatttttcttctataaatccccaatgttctgtattcctacgcacgccttgttcgagttagctaagagaggagggccatcacatattattgtcgtggttgatgagcatttctacacaggctttatgcaacatcgacaacgccaacaacaacgatgttggaaaaaaaaacatttattattcttattgatctgtttcttgcgatttttggcttccgtttttctcgagtcggtctagtaccaacacctcagtagtcttccctaacccaggccacgatttcgttccgccttccaatttaacgcctggcggaggtcgtctgcccgatagcgtttgatgaacccagccggaagatgataatggggacaaatccgagaacgggggaggcagacgctagtttcggttgaatcaacaccatcaatatcaatatatcaagaccgaattcgatgcatctgttgatgaaagacttaccgacttgacgccctcgtattcaccttcccaaccgctcacttcccgaacgaccttgtttgatccaaacagatggaacaccctgacgtctctcaccctgaaaagaactccgtcaaccctcaagaaatgacgcaaaagtacaaacaaacaagtcggcatgaccctctgtttaaacatgagagcgacaggacacaggataacaagaaataggtaattagatagacgcgttcgttttcaacgttcgactgatgatctgacgtaccacacgcgccgagagagttgatgttccgttgtcatccaattcgctctcgaatagtgggatttcgtcgtagtacagaataggatccggtctactgagtagttccagatcaatgacctcgccggacgaagcgggtcgccaagctatcgaggttgacagcgacggtgaagacggtgatgatgacgtcgagctggtagagcaagagccattatggagggtagaatacgtccagtcgaagggtttgacaggtacagtgggtagcggagtctcgggggacaatggagaaggtcctgtagatctgtctcgttcgacgaattttcccaatcaaatgagtacaaacaatacagaaatcagcccagactggtcgtgatcttgatatacgtggcagatagactgacctagtctttccccattcatcggcatgcttgactctgactcctcctccttgttcatcccaccctgctccgaccttgaccttactcaaggcagggagtgcctgaaatgtataggtgaacccagaaggctcatgacgcaaggtcagatgattatcggcaaacgtcatttcaggaagtggaattgatagatgggtcgctgctctgtttgttgtttcgatatagatatcctcgaacaagttagtcagggcttacatcttgaagcgcggtgagatagaaaggtgcgatatgatcaggctgaagggattgtacaagaggacgagatacatactcgtcaatctggagggcattcatgatatgagtactgcaacaagtgatctcccagccgtcgatggtgatcgatctagtcggcggatgagcgcctggtgtaggctcttgaaccttgtagggaggaatctttcctggaaagttggagctcaacgaagaatgcatactgaacgagtgcttaatgatgattgtcgtgttctatgaagcgttggtctgaacgatgagattgatcaaagcaggctatttcgatggcatttaatgaacgcacgtgatggtcacggttggatgtgtaacctctctcctgtttgaagcgttcacctgatagactgactcagttagatcaacatatatagatatcaattaagctaggtatcaaatccaaagcgctcccaatctaatctacatggaggttgaacagaacggctagaagtctgctcagaaattatatcgagatcgactacgggaatcatcgatggcctgaaaagccaaagtttggtacggagaacagaatatatgtcagcgcgtgagatggtctcgtacgtttcgttttcgagacaaacagagaacagaacaatgagtcagcactaaccggccgtgagcgcactggaatgggaagagcgttgtcgacagttggtgtaacagacgtgtggtctgagcggtcgtcagagggtcgttgaacatgattgcgcctgttttgaagaccaaccaattcaaaagtccagcagaaaggtaagctatccgaagagaatagggcccgaacagggtagacaaccgaaatctacatacctcgacaagccttcgagtttattaaatctagcaacactcgaggacagaacctcatcgccttcatccacctctgcccagcaatcccgatatcttcgtcgccatcgttgttctcactagtaggcgcggcaatagcaaactctggatcgaaattgtctaaatcaggccagccgtctactccgtccactttcgacttggctaagaactctttgacaagttcggtcagctctaccgggccctcggctaaagactttctgcccagtagtcgacctgctacaatcttgggcacggccagcacgttgacctgaaaaaatgcttcgtctccttctccttccacctctttcgtaggagagtgagagagcccaagatgtattccccatcgactcaatgcttgaacaaatttcggattcgttagaagaaggaggtattcgtttcgggtgaggagaatgaaagatggttctaatggtcgatgaagcgcaaccccctttgagtcagatgaatcgacatcgagacctgccgacccagcgaggaagccctcgcctaattcttttagaaatcgttcgacccggatccgctcgtctgccgcatgttggtctatcagaacaagcatttccttttgctctcttgttgccgatagcggatttgttgacgagcctgatctcaagacgcatgctaggaatttttcgtctacttgcgagatgatagaggcttcgcagagactttccctcgaaagatgagcaggtaagtcatgttt

SEQ ID NO: 716 - DNA, 6256 bp, Xanthophyllomyces dendrorhous
gtagaggttggtctcgagacaaaataggaagctccacctgcggaacaaaagcctcgttacgagatgcaaatgttgctagaagaacaagaagggtcagatatcccgtggcaagatttttcgatggatcaatcgtgtgaaacagcatcggcaggacagtgactcacgattcgaccaaccctttttcgtttcgatgaaaccagttttcagacgagtcagctcaaccagagcattattaacttatcttgagtagagagcaaatcacaacaaaagtggagcaaataaaacaaactttcaaaacctgtgaaagccatgacggcaactgtttgctgttgcaattcaccacctcgtggtgatcacactctttccgagacccttgggcaccggatatctttggaccattcgcaacttgttcaggactggctatctctacaagcttagatgaggtagctagcatgttcaagcactcaatggcaggattgatagacggggcctcgcatatccaagttccagtcttgtagacgaacgaatcctattttgtattgagaaaaggaatgcgaggtcagtatgtcataactgtagtatgcctataatcagaaccaaagtgcttacttccttgaccgttcttttatctgtcacctcgctgcgagctctcttccttacggagggtgattttgagcgctctcttgagctgaaattaggtttttgaacgctcgactcatattcggcacccctgcttcttttaaatggcacaatcccagacggttttgaatatataggaggtgattgtacaggatcagtcaacaaacttggcctgcttgcttgaagacaaagcccatgcttttccaggaaagagtttactagttcgagaagaagcgctataatcgacgattcgtcctgtcggacatgtgatcagatgtttggtattaatatctgtgatctcggagatccataccagagaaagcaaaactcacctcgaactggactacagttttggaaggctccatgttgacgtcaatcatgttgggtggtaatgtgatgctcaaaacatacacagccttgcgctccatctttcgtatattcatcttgttcgaacctgatggaaggcaaagtgttcagtcgatgaagaactagacgatattggattctattcagaatcgaaagcaagacataacaaaactgacttctaggggaaaacatacccaattcaagctctggttgaagctgtatttgtagttcaagtggaaatcaatcatatgcctaacaaaagaggtggtggtgaaccgaggccttacagatcgcgcaaacccactctgttcgaatcgatcttcaacagccctgtgcagatctgaccatgatagggcgtaattatttacaactgaattaaatcgatgctccggacggtcagagttcagttctggctaacatgagcagatgtatcagcttacatatgtattgttgcgcctgactcaaatcgaatcagaagaggatgagatattgttgaccattgttatatgagtctgaaatatgataaagagaaagagagtgagctcactcgactgtgagctccgttttgagagatgaatccttcaatcttaatgtcttgtttggagacttgtagaggagtcacagactaaattatatgtgcgtcgtatactgatattgagtgccatatccaaagaactcaaataagaggtgcggaggacaaactcttatcatggccacaccgtggatttgtccgaacctagagatcattgtagatgtctataccatggaagggatgaaagtcagaggacaattgaaagagatatcgttcagagtttgcttgcgcacggctctcacagataaagctatcgagatgacatactttcgagacactccacattcttcctccctccttgatctgttccttttcaagatcatatagagagaagctaatatgaggaaataacagagacgccatctccacaacctttttgcaagccaggagcatgctggcagatgagggcgtggacgtccggcggatgggaagctgaacacatatcgcatacggaaccaagttagtatatcttgcatacactgaaggctagcaaaaaagagaataatcgaattctgagagaatctgtaaccacagtacgacaaacaaacaatcgggctttacattgaaaaaaagatctttgatcgtgacgatagttcctgatcttaagagacttctgccagatgggccaaattgaatcggttgactgccctgtagaagttcacaagccgtgtcaggtcagactctcttcagactctgtctactcaaagacgtatctctcatgatcactcagagtcaggtattcaggctagcacagaccttgatggaaaacgaccaagtatctttcgatcccactgccctggaaacaacttctagacggctgactgccgccagcgagctcagtgcttcgcctctgtagccatatttcccctcgcccaactctctggtctctggttcactcttagacgtcatgtatctatgtccatcccggagccgttcgatcccctgcctggaaatgccagtaccatcatcttcgacacggaggagccatcgggagagacttaggtagatagacaggtgcctggatttagcatcgagactgttctgaatgagctcagacagagcctgaggaagggtgggaacgatagtctgagaacggagatggttggccagcgaagaagggagtggcttgatgtgtcggtcagacatcagggtagagagaagtttgtgagacagatggttgcttgagtcctaagccggtgttagctaaaacagactatcggctttggccgtgagaggtagagtgaagataaaccggaaggcgccaagtcgacaagaaacataaaggatttatctatagcccggcagagtactaggtatgatctgcagatgtctccaaccagatcaaagcatgctcttgagcataaatgggatgaacagtggtgacgagaagagagattgtcactagatggagctcgtttcgaaagcactacttataatatggctttgttacagatcatagttaccctggttacacgtgctacagaatcgagttgacatctttatcgaccgttggcacttctattctctcgacagactttcatcccatcccctcctctcttccttagtctttcatctccatccctttgccacattcattatggcatcaatgttccaacgtgatcccagagctggtcagtagatcttttgtttgtttcgggtgtttctgtcctttgggcgtgagccggtagaagctttagcttacacccagtaccttttttctctttttttcccctaactgggatttcttctttgattgtaggtctcttccttggtggagagcgagtctctggagaagaagttcgaaaccagaacggttcgtgttgattgttgtctcggcttatgctgctcttttctgcataatgtgacgtatcagatgagaagctgacgcctttgcttgaggaattctcctgatgacaatagtcctggctgctcaaaccatctccaacatcgtcaagtcgtcgctaggacctgtcggtctcgataaggtaagattcgatatcctttgttggactatatcaggtacaagcaggccgcttctgctctcgaaggattcttatcaagtttgatctcactttatgatgaaacatgtagatgatggtcgacaacattggtgtaagctcttgtttttcttctctcactcgcaacctcccttgccttcagtgggctgatctcattgtatgctgtatacctccatcttcttcttcttccgctttctccaggatgttaccattaccaacgatggagctactattctcaagcttcttgaagtcacccacccagctgttagccattttctttctactttctctcagccaagtcgcatcctgactgaattctttcttctcttacacaaccaatgtctaggcccgaattctagtttctttggctcaacagcaggacaaggaggttggagatggaactacttctgtcgttcttctagctgctgaattgcttcgacgagcaaatgatttggtcaagaacaagattcacccgacaactgtgattaccggataccggttcgtatttttctcttgcttgctcagcatcgaccaccaaactcatgaaacatacctgatgacatacaaacgaccgattctgatttttgataaactactaaatagattggcctgtaaggaggcttgcaagtacatgctcgagcagatgtctactcccgtaagcaagcttggcaaggactgcctgatcaacatcgccaaaacatccatgtcctccaagattatccacgcgttcgtcatatcttctcctatactcagacgtgatccagcagggtcgtgtaaatatcatgtcaaaacacctaacgaatcttcggcttccctttggcatatacgtcttgtctatcatccagcgacgatgatttctttgcccccttagcagttgatgctatcctggctgtcaagacggtcaaccctagaggagagaccaagtaccccgtcaaggccgtcaacgttctcaaggcccacggaaagagtgccagggaatctatcgctgtcaagggttacgctttgaactgcactgtcgcttcgcagggtatgcgctcttttcttactacttttacttcaagtctgcttggtcctgattattttgtctctgtgtctcccctttctttctctcagccatgaagacgcgaattgttggagccaagattgcttgcttagatatgaacttgacgaaacagcgaatgcaccttggcgttcatattactattgacgatcctaaccagcttgaagagatccgacgcaggtacgaactcttggtcatcttagctcatttgtgtatccttttcattcaaaatcttacttgtttttcaatactttgttgttcgctgtagagaatctgagatcactctggagaaagtccgaaagatccttgcatcaggcgcgaacgtcatcttaaccaccaagggaatcgatgatttgtgcctcaaagagttcgttgaggctggcgcaatggcagttcgaagatgtcgaaaggaggaccttcgaagaattgctaaagcctctggagcgactcttatctcctccatggctaacctggacggagacgaaacgttcgagaaggagtacctgggttacgccgaggaggttgttcaggagagaatttcggatgacgagttgattttggtcaagggaactaaggtcgtcaacagctcaagtatcatcttgagaggtgccaacggtacgtgtcgctacatcttcttctgtgccacgatcgaatcgctatcgtgctgaaagagtaattctcttgaatcgggcagactacatgttggacgagatggagcgagctctgcacgactcgctatcaatcatcaagcgaaccctcgagagcggagccgtcgttcctggaggaggagctgttgaagccgcactctcgatctacctcgagaactttgctacaacccttggctctcgagagcagctcgctatcgctgagtttgccgccgccctgcttgtcatccccaagaccctttctgtcaacgccgccaaggactcgaccgacctggtcgccaagctccgagcctaccataacgcagcccagacggcttctattggagatcctaagaaggctctcgctaactacggtcttgatttgatgaagggtgaagttagggataacctgaaggctggaatcttggaacctactatctctaaggttagaagtttgaagagtgcgttggaggctgccacgagcttgttgaggattgatgatggtgcgtccactctcctcttgttctcaatgtctctgatcaggtgtactactatcatggttgctaacctctctcgtgtttgcatttcaacgaaccgttctacagccatccaggtggcgcccgagcagaaggcagaagatcctcacggaggtcactaaaggagcaaagaaatatctgtaaacgttgaactcaagatagatgaaaacaaaatcttcaattactccctttcactttcttcggggggggggtttttcattcaggctttcctttctccttgttcttgtctctaacttgaactacgggacaaatatacatctatcagttccacgcttgtcttgggtacgtaaagcgaccgaaaggatatttagagaaaatcgagaaaataagatagaagagaagggaaggagattggggaactagagacggatggagaatag

SEQ ID NO: 717 - DNA, 5572 bp, Xanthophyllomyces dendrorhous
gatggagaataggatacaatatagcgctcaattgagacctcaaaatttcctctttaaacggtggcgcagatgttttccgctttctgtaaagcctccaccctgtttgatgtaatcgaatcggagagagaaaagaaaaggaaaccccgcggcgaacagtttagcgtatgttcgtcgcagacgacgaagggattggaaaagacgaaataaacttacatcttgacacactctcttctgcgctgaacgacaaactcggactccttcatcaaatcgctaagcacgtcgggcttgtacagctgtcgaaattcggacaggaagtcatcagtatcagtttccacaaactgctcgtcgcttctgcatattgctaccactgtgttgcagaaatgagactaacctgctctagaaggactcgctgcaagttatccttggattgctggaccaatgtgtaagtgatagatttctacaaagtatgcgatatttctttagtcagtgaccaaacttcctcagacaatcttatgtcttattcttaaattggaaagaatccccggacgagtagagaagatgaactcaccggcaccatatcgatcatctcccgcttaacgatgttgaagtaagagtgaatgaggagctctattcaaacaaatggaggtaaacaagatcagatttacgcatacgagtgaatattctgaagaagagtacatactaataacttccgtctccatagtctctcgatcgctaagtgcagtctgaggtcgaataaccggcggaggctaagagggaggacccagtaaaaccaaggcaacactcagttcctttctaacccaatcaacaaggtattgctctagcaacaaagataactcacagtgtccatgacagagacccccttcttctttggcgcactcttagaaccagcggggaagaaactgctgaagaagctcggctcctcctttttgatatcaacctcaagatccttgttgttgttgagcgaggccgcagtgatcttctttggatcaaccttctccacaggcttgttggcgttcattcgatctgtcacaagggacatagccttcaaagttgattcagaaagttaggaacaggcgactttaacagtttgtaaccaccactatttgcacgtctatagctgtaacgattacaaaccttgtgaccgttgaggaagtcagggtgggtggtgttgacgtagcaagcctgcattctacaatgttgcaagagaaaaacgagatattggttaaccaatgcccctgcctaaaagctgatcgattgctctgaacagttccggtgcgcatcggacgtactggaccatatcggtcaccaacttggtagtgggaaccatagaatcccggaagaactggataacggtcgcgttgaactggtccttgagagcaggatatcgcttgaaagcttgctataaacgcagcagattggagtgaagagatgcattagcacaggtaaaagaggatatattcaactgagcgtttcctccttgcccaagacaggggtgctcaaaagaggttgactcacaatcttcgtgaggatttgacccaggatccgaatcaactcgtcgtacaccaactgacagcatttaagactgggctcttctagtcgcttgatctgctgtttcacaatgacctcgaacgcagcagtgcccacgaacaacgaaggagtggatccctgtagaacgaatgatcaaagacatatcaaagaaggaaggggtttatcaactggaaatatgagagggctggcaggggtgattgagagttgcaatactaacggaagagttgtaaaggattgttcgtatgtcgccatccttcacctggtcgaacggatcgatagacttaacaccctggttgaacagctcgtgataaacaaaactgatacgagctcctccagaaagctcgtttacattcagatcgttcgatcctccgtcgatgattgttcggaactcggagcagaactcagtaatgacagacaaaacaacgtttccctgtagagcattgataatgtttgaaacaggaccagaacagaagcgcgttaaaaaagataagcgaacgggaacaagaaaatctgaaaagaacacaggacataccccagattgctctcccataggacctccaagggaggctaactcagtctgataccgagaaagctgagcagcaattcgagcctttgtatccggcaaagtcgctttgatgtggtgcataagaagctgaatacgccattcagaaggagattatttcagctaacttgtccacagaagctatacgaatacattcaacgcaccgtgttcagccgtctggccaagtaaggagttccacagtactgagccttgttcttatagctctgatggttctcgaagaaatttcgctcggcctctagtgcggcagagatagcagtcttttgatcgatatctcgctgtcctcggtttacaacagggacgtaacccagtcggaggggaatgattcgcccagccaggatatcaaccacatcagttccttggtccctgcggacgagaaagcaaaaatgtttcattagtttattaagagaaaccttgggttgcgctgcgttcggagactcacatcagatcaactttggttaggacaccaatggtcctggttccatcgggatcgacacttcgagccaactgaagaccatcagagttagccaaatctgtgttggcaccggtgactgcaaggatgacagcgttaggcttggaaatgaacttgaggagcatgtctctgatctgcttctcgatatcccggggttggtctccaacaggaacctgaataacgttgtagaaaatggatatacgcgctcagcattcccactagagtgcgagatgatggaatcagcagcaacaacagataacaaaccttggtaagaccaggaagatcgaccaacgtcaatgtgagcacgttaggagagtaaatcctcaagttgatggggtttggcgagatacctgtgaaaacaacatagaacatcagatcgctcattcagtagaaatgtggcaagttgtgacagatcttgcctcgttcgatacatggtatgtgtgaatagaaggttcaatgtactgaccagcgttctttccggtgtgcctctcagtgtctctgacgatctcatcacgaatctttgaaaaatcgtggaacttctctcctggcaaatgcaagaactctccccactcatccgggttgttctggtttaactgttgatgctctgcgccctcggcaggggcaggcgtgttgttagctcctagcgaggcgttggagggtcggtttatgagttgaaggatctgagaggagatgacgattagcgatgatccaagcgtagaaagtcacattttgagaaacttacgagaggtcgtcgagtcacaataccctgagagtagtacagatggatcagatgttgttgacctatcgatagaagcaggtatcacgcttcagacttacagttcctctaacgattatcaaagacaatatgagaacaagacggtaagcacccaaggatcgactgacatctcatttcaaagacggatctcagggaaaactcaccgaggtaagaaatcacgtccgacaatgttctgagattaaaagcgagggatgaaagagggatcgtcgagcatgttgtcagaaggaactgtatgatttgacagggtggcagtcgaaccacagcctcgactattaatcctggttccaacacatacctccaaaaccgaggactttccgctgtttgaaccggaagaacattacaagatcaatacgggagcgaggtcgttgagaggtggataagagagcatatgtttcagacaacgcttacctggattgggaaccgatgaccgcgatctgcggcaaatcctacttgaccaacaatcacatagccctcatggtgagctctccttgtgcgaacgaccaaggatcacaatggcaaagagctcggatgaacatactatcgggttggtgactccaatggaagcaaacacgtcttgaagctattgaattcattacagtatcgatggttgagagtgaacaacaagcaagtcgaagagatggtgttggaagaggggaggcgagtgaacgattcaacgatgacccaatgggtgatgtcagacctctcaatcaagatacaacgcagaagagaaacacagatcacgaaccttgttaacgaggttgatgagctgcttgtccatcttgtgtgattatatgtgttcgtatgaaagacagagaagaaagagaggctcaaagaagtatggaaagaaggtgggtgttagggctaggaatgaaaacgtctagatctggcccatctcattcatcaccgcctaccgtcatcctttttctcgtactcctacttttcacaaccacctggccatgtcaatcttttctctctgggttatcaacaaagcaggtggtctcatctacgacaagacattcactcgtatgttcgctcgttggcttctcgtttttttttgtttctctccttgtggaagagcaccgtctgatagacagattcccctatcaatccttctctctcttgtttctagccggtctcgcgtctgtctctcaaaacgatctgttggttctcgccggaacattacatggtattcatgccatcaccgctaagctctctcccgtagatggacctgcagaaggcttggagatcatccagggcgatggtgtcaagatggtcgtcatgttgacgttgaccggtacgcctagaatcactgctgatatcgctcttctttggctgaatgtgtattctgctcacgcaaacattcccgacatatgtacaggcacaaagtttgtcttgcttctccacccatcatttccaacacctccgccgcctcacccttcttcgcctgcaaagatactcctacaaaagatctacgaagcctattctgatgcggtgatgaagaacccgtttcatacgccggagatgccgatacgaagtaacgacgcgttcgacggcagggttgaaagtctgatccgtgcagcgatctcccaaacaagtggaacgagtgcctagagggagagaaaaagagtgttcatctgcgccataaagacagaatgaggtctgtctgtatgcatatatgtgatatttcgtttcttatctttctgtttcttgttcttagacctgcagaggtcatcggcgtggtataatatattacaaaatcacgaccagaagagataggtatacaaacagccaaagatcgttcgaacagatgcctcaacagaaatcaactcgagcttgtcggcacagaaaggaaacaaaatcagagaagtaagagagatgtacactagagtcagaaagggaacctccatattctggacgacatcacgtcacagtctgcaagctctcgtttcgttcgtgcccgtttgtccggacaaataccgaatgcgtatggatcaccgactcggccgtcgatgtacctaacgcccagagactcgatatatcgagtccaatcggagacgagaacgtttccttgattgatcaaacatatgagcagatatgtgagcccagagtgagctgtagagatggaaagactctacgccaaaaaaaaaaaaaaaaa

SEQ ID NO: 718 - DNA, 14753 bp, Xanthophyllomyces dendrorhous
aaaaaaaaaaaaaaaagaactagaaaatacgcgagaaaagaacggaggatggcgacttaccggatctgtcagagaagaagattgcagtagtccttcgagctcattgatctcttccttgatggctcgcttagaaaagtctctaaattcattgatgacgcccatcgtgattttcttgagacgacgaagaattgtatgaaccacggaagtcaggaccccatggggcattattcatcattgctttgatatacaaacccgatagagaagacttccgagaaagaggaaaagtaagaactaaccttgaatttcgaatcaatcttctgaacagcgtcaatcgtcagaccgctcggaacggcctcagttgcactcatgttcccaccactagcgagtcctgcattggctccggttactcctccgcttccattacttcctagacttgatgctccccagccagcaccgatgttcccccaagcgttcgccaagttgaactctgtgtttgacaaaggaggttccgaaggcgctgtccctctttcggaatcacggttggcaaggtattgatcgatagactcggccaaaggaagaggaaggtccggagtgattgaagtccaggaaggagaagattgatttgggaaaagtaggataaagagcttccgatatacgcctatcagggtatcgaaaaatgtctgcaaaacttggaagtaatctggcacaaagggctttcgaagagaagaatcattgaggagaacgatcatcagccgaccaacacaaacaaagtaatttcggacgattgtgagaaacctaatgagactaagcgcgcccactcacaaagctagaggtaattagaagagattccccaatggtatctacacctggtcccgctcctggtccgccgacatcacctgttcccgccccagacgtcccggaaccgaccgacggtctcttccccgttctcgacgtcgtcttgaacatgcttcgcatctttacaccagtccctataccagccgcttccgaagcagcggctccgacgcctcctttgccttctgtgaacgcctcgtactcgtccagaaccttgagtagagctttggtataatccatcagggaaggaatatcaagaagaggggaaagagacatcccaagaaggaagaaggagtatggtctattacgcatagcatatatatcagtcactctgaatgtgacggcaggacactaaattgattgtacatgactgcatacctggtcttgaaagcctgagggtcaatagaggtctcaagatctcggatgttgacatacatggtgtcacaccaatacatccgcctgattaaaaccaaagaagcatcgagtttaaaacgatctggtctttctgttatccggcgagcaaactaaagatatgtacgacatatgttagaagacgaacccttgatgaccagactttaacagatcccatgtccctagccttttcttgatcatttcctccaacgccaacttgacacttgattgcccatttgttcctgttggagcgtttgaaagcgatgaaaacgggccgttcaggaatacgctggttgaatttattgtaccagcccctgtagttgaggatgaaggagcactctctgagaagatagagtacgtgtctgaattatccaccaggtctggccgacggttcgagctggtctgtgttgagttatgggatggcaaagaactggaatgagaggaagactgagaggagttatttgattttacaggaggcggaggtgttttaaacgcttgagtcaacaagttggaactataagcagagacacgacagcagcaatagcagaagagggagtcagatataagagcatatcatcatacaaaacaaaagacaacgggaggaaacaaacgccgaagactttctcctgggaaccagacgagacccctggcctgaagaatgtattgaattcggcatttggtttgactcttctgttggctttccacactatccttccagaagagatccttgtttggccttggtctcaatgtagttgtgtgtttccggatgagagggtgtgagcgggtgagcggttgagtcgcttagtcatcatggttcctaatcacgtgtcattacccaacggagaagtccgatggctgtagtcacacaaggctgtgcactgatccttaaccctaacctccgaaatggcctcatccggtcgtgccgtctcgacgaattctgttgagcgcttttacagttccaccttgaccacttttctttggacgaccacatcatcaaacatgggctctgctacttcttctcccgctcctgcttccaagcctgccgctcttcctagcaatccgagtctgatcactgaactaaacccggaaggactcaagccgttcgtttagatttcctctctgaacactctcgtttgctatttgaggacacgtagaaaatcaatcgtttgctcgtgctgacgtatggacctttgaccgggtgttctatgtgtgaccatgtcgatccgatgatacaggtgctgcgcttgcccggataccaaatcagctcgagaccagtgtttcatgggatcggaaaagcctgagatcgagtgcaagcagttggttgaggcccacattgcgtgtatgaaagggtgcgttcgttgtcgttgtctttgtcatcaagtctctattctcgatttatgatgtaataaccatccggactgggtatcaatttctcttcttgatgtccttgatctcttgggcaatttttttttacagttacggcttcaaggtttagatgtttagataataatgacatcgaagagtttgtgccggactattcatttacgatcgttccccgcttgttgcattcgcgatctgcctatttgcaccattgaccaattctgctgatggacctgtgagccatttgcgcgctgaacacaatggaaagacatatatctattcgattctagacctctccttctccctgaacagtggcgaaattcagagtttccatccttcccttgcctttcgtctccttctgcaacaaatcggtcaacactcggaattgtccgggatcgatgagcagaatctgtgagagagtaaggagaacgatcgtcacagacaagatatattcagctcaacttgctccttgaatgacactgatgtacatgataggtttcatgaatggatatttgaggaaaaaaaaagagtgaagaacaaaactcaccacctcccattcgtccgatccaaactcatcctcctcaacctcttcagcagcgctaacaatttgttcctttagcctcttcccatccttcgtaggcatcgtgattctgacacgcattcgggctcgctgaatcggtaatgtcgagtttgcctgcaaaatcttgatgcattccaaagccttttttatttttattttaatgaaatttgattgtgccagcgattgatatgtcaacacgttttcactagacagagaaactacgcccgctggagcaagagtcgaaagattgcaagaaagataaaactgggacgaacctgactcttggcgctcttgtcagctttcacactgaatccaacctcacccatagctttctcaatcattgatacactgtacggcctctgcgtcgatggatccacacatttttccgctatctgagtggcgatatctttgtaaagattttggttgttatgcgaacgttccttctctcctacttggagttcacctttcattagaatctatggaagagcgatgggacgcgttcaataagtggtcttccagagaggaaacggaaacagacgcgtcgtgaagaaaagttactactgacttctttgagacattcctcttggtcagtcttgccgaaagccttcataagctcgtctgtcttggcagcctggcctttcgtcacattggtaaagaccctttcaatctggacgacctcatccatgtctttctccaccccggctctccactcctgaactttgttcttgtaacatgcgatctgaaagagaaaaagatgatgcaccggtaagcctgtgcaagaacgtattgaagactatgggtgttggtgtatgtgactctaaccacagacgaacctcgaatcgtttgccacctttcttgagtctgacgatggatacgttcgtgagcctgtattcccaaaaagagagggtcaaacgatgatgaatatcggagtcatctgataaaagggaataagcccggtcgaccctacttgatctgggttccaggctgatttattttactcatctgatacagaagacgatctaataaagtcgagtcgggttgagagttgagtttcgataggtgatacagaatttctctgagagaccagattgatgatgctctaggacttggaatccaacttagctaagcaagccttcgcgtaaccacagtacactgtaaatcgtttctcgaccttctttctccactttgctctctccgttgccttctctcttgacccattcactcttctctctcagcccactctgcgaaggatttctaaaagaaagatacgatgtcgcaacccaacaaaacactctacataaataacatcaagttcgtcgttccgaaccgattggtctccttatgatcctggccggatagcagaaagctataatttttcttgtactgatctaactttgcatcttaacatctttctttctttcgtggttcttccaacgaatccgtccggttcatagtgataagatcaaaaagccaggtatgtctatctcacctggccgcgtctcgtttatcattctaggctggtgggtcatcgagaatgacggtaagctaacctacacgtgctacctttttcttccaaaacagagcttcgacatcagttgtaccagcttttcagcccgtacggacggatcattgacatcactgccttgaaggttcgtcctttagtcatctctatttgttctagtggttctcagataccataggagagaacgatgggtgtatatcctgagatgtcgcgtcaaagctaggcatctgacgctgcgatctatggaacgatttctttttgatcgatagacttcaaagacacgcggccaggctttcgtagcattcgtggatcaggtggcagcgacaaccgcgttgcgatctttgggtggagagaccttttatggaaagcctttggttagtcttcttgtgtttgtctggcggctcataagagttatgtcgttgtcaaagttcgagctgtaaagactaaacgctcgtgtattattctcttcctttaaacaaaaaaaaaaatggacaatctcatgccatccctactcgccccggaccgacctgttctttctacttgatccctatctttacgtctgtgaccaccgtctctaattatggctgaatacgatgaaacagaaaatcgcgtacgcaaagtctgtctcaaacgcgctcctgcctccgtcagattcgaccgccccgccggcgagcaaggtcgtcatttcaaacgctcagagagaggctgatgacctgaaacgagcgagagaagaggaagacacgattgcggagaggaagcgaagtaaacctgatccggatgctgaggaggatggagacatggccgtggatgacggagatggtgagttctgttctattttgtgtagtgtgtttttacacgcatgatggctgatttccttcttctcgatttcttggtcggcgtcctcacgaatatttagaacctggacctcgccctagttaaacccgttcacgtttctgctcaataaaacacttttctcatccctattttcctactcgatatcccctgtagaaggcacgatccatgtactacttgcttttacttgtcttttgctgtacgccgaacgttgagtgagatcgagatcgtcgacagaacaagaagcaagagaggcctgagaagcaagagagagagagaatgctttctattactgtggtcttcagacatgtagagaccaaacagctccatcgagagcgttctctactccaagtacaccaagactcataaacctatatccgatgactgtgtctcacagttggttcaaccaactttatgatgagactccactgacgttttgcttttgggtttgtgcataacgagagaaacaagatgacggtcgcgccagcgggatggacactctatcaccgatctagtcgggtaggtatgtccaattcttttttaacaatagagaacgagcctgctccgaaaggtgattgatatttatataaagaaacaagagaaggccacgtgccctatattgcgctttcttcatcaggcttggggtaaacccgatagagccggtgggatctcgtgcctctgcttgtttttcttgtaaagaccttggtctgaggtcatttgcatcagttatacatctatccatcatcgtcattcaccacagaagcgggacttgtcatccattacttggaaaccgatcttttcttcctcgacagaacaggatttcttggatatcgaggaggactcttgcttttctccttcattcacgattctttctcgatcgccatctctcagggatcatttccttcttcttttgtttcttgtgggcaactagaccatgccttgggctgatgatccttgtgagtcttgtatttaatcgacatctgaagtgatgcgaagtgcggctgatcgtgtatgcatgtgtgtatgtgtgtgttttggatgaaactacgcacgatacagcaaagacgataaatcatgatttatatgtgtctctattcccgctgacggaaaaagagcttcgcgtcgtacgtttgctttcatcttattttggattgcacagcccttggtatgatagacaccgctggacatgtacttgaatcgagctgagcgcgttctcttttgtaccgaccgacacagaccgtagcaaagtgtgaccggccgttgacattatttcggacatgtacatcgagtcaatcgccgatgttggaagattgggaggtaactcaacgatgtgaaaaggtgttggaagatctccgggcatgttccgaacgagtactggcagaggccaaaaagaagaaaagtgtgggcgcgttgggagaggaacggttcatgatgaaaggtgactttagtggaggtgtctaagtgtaggagaaaccaaaagaaagaaagaaagaaagaaaacggggagtctgtttggaccacccagagtgaagggggtttaatgacgaggaaaactaaagttcgacgtgagttttgatttgatttgatctgatcgttctgttgcagatgtagacccaattgctaaagttggttcctctttgttagtcgtgatgattggcgcgcaagatctagagcttcaccagacctttcccatcgtgatacgatgatacccctatgttgttctaccttacccaacctaactttcaagcatactcaccttgcctatgacttcctattagaacctacctggtctttcctcctcccctctccttatctctctagagctatctattcatccatctttgtattccctttttgatcatttattcgggactccttttgtgtatgtataagatacgggaaaagcagatcggaggagatgatgaactagagttaattaatcgatcaatctacggccacaatctgatttgctttgaatggttcagggagaacagagtttgacgagtcttctgacgggctaggttcttatcgtccgctttgtaaaatggatacagtaaaagacgcaagagagaaagaaactagcgctgatcacttcggcgaggcggtgtcagcaacgacggctacattcggaggaaacttcctgagtgttccttcacgtgtacgagaagaggcagcgtagaatagagcaaagaacctagccggaagacgaaagccaaaaaaagggactaggaacagaaaccggcacaggcacaggaacgagaaaagaactctaaggaagtcctatgaaaagccttatctcttccggacgaatctctttggaaccgagtcgaccctttggatttcagggtggtctacgtttagagcctagggatagtgacgttcacttctgtcaggctgatcccagacccaagcgggtcatacatcagcctcagctaaagatgtcccggtacctaccatagtctcgaaagtggtcgaaaaacggactatcctggctgtgcaaaatgatcgagatcaagatcatgtggagactccacatctctcagcagccacacgccaaaaagcccagactatcgctgacgacgtcaactctcctatcgacattggagcgttctatcaagttataaagactcgctcgttttcccgtgcttctcactttttttcttcccttccttaaagatatatacacattcacagatcgagaaaccattatccactctctttataacagaaagaacaaacaagacaacactctaaacactttctaaacatgtctgccttcgttcgatccaccgtgtctgccgcgtcgaccacccgatctgttatctccacatcggcatctactcccgctcgatacgtcgtcccagcctgtacttgtatgtgctcgagttccgtctttcgcttacaatatgtttcagagaatgtcttcctgactctttgttctctctctctcttcctcggatacaaacagccggagcaaacgctcctgtctgccgatcattcaccatgtcgtccccccggttgactcgagctagtgtcggacacagtgggatccacaagtgtgtgacaaagactcactacaacccatcgatcgcttctggctgcctcggtgagtgggctaagtaaagttcaatcaacgtgagtttcttctctcctttcacatctgctcctagatatcgcgttgccggtcaacaagcttatcttacggtgtccgttgttttaatattcagcctatgcatattgttctcttcaattacgcaccccactctggcgctagtcgctagccgctagctttgtatctatagacttcctcatgctgccatcccaataggttcagaactcatttgtatcatcccatacctcagccttgccatgcatcgaagccatctcactggccatgctatgattgtcattatcaaatgtattttttcccagatataaatccaacgttgtttcattgtgatagattgcttatcaagagaaagaaagggaatataatgtacaaggcagatacagctatctgggatagattgtcaattagtgaaggctaggagtgcaaattgttttgtcatagtgagcaaaaggtgtattgagctaagaatgaagggaatgtcagccagaggccaaagtccccgtgggacaagttgtgctgacataatgggtggtatgggtttgagatgaaagaagcaagcaagaaagaaagaaggaaagaaatgcacagaccaagaggctaagattgaacaaatagctctcctccttttttttcttcatctcgcccaatgcgaataatgtccgggcatgcccgcttcgcatttctgacaatctggcttaggacccatcgagaacatatttggactcctcggcggtggcggttgtaacggtcttctctccactgtcggcggttgatcgaacgtgagactcgaagtcgggtacggaagatgagcgagcgggtttgaccgggggtcaaccaacgcgctatcgatggcttgcttgtaagcggctgatgaatgggaaccgaaacttgatgaactaccaggcagggccacacgagatgataaccggggtgagtgatgtggggttgacgccggtgtaccagacatgtacaacgacggaggcttttggtttaaaattattatcattatttttaatttttgaacaaggggtcacataatatacgcatatacctcgggtcagtcgggctcgtcaaaacgtgatggtctgcactttattttcgtcgtatacggaaaggaaagggaaaaaaagggaaaaaaaagaggactcacgagtgaaccacctcggtgagcgttccagttgtgtgactccaagcttgaagatacgtccatcttgtttccttcgcctgctccactcccgcctgcgctcaagctgtccatactcatgaacgaatcactcccgttggctaaacttgagccgatggcaggggcaaaagatgtgttatactgctgccgtccacgactgtcgtatcctccgatcggtccgatcgaaatctcatccgggtatgattgaggggacgatagtcggagggaagatgcagactgaacaaacgaccgttccgaattgggcgtcgttggcacatgtggtcgtttctagggttcgtgagaatgaaaatgaaaatgtttcagtcgataacacagagatctcagctttgtacactctcactagactatcactcacaggactaggctggtttagatcaaactcttcagcctcatacaaaggagaaaccggtctggaccgtttgtttgaaaactgatgggctagctgtggcctaggatgatatatcgatgaggcggcggcagcgccggaaggaaacgtagggtctacactcgccgtcgacgacatctgcggccacaactctgcggccacacttggacttgggtcgacttgcatctctctccggtcgggtcaatctatatgaacgagcaggaagagcgtgggtgagaacgtatgccagtcaatgtcaagcaggaaaacccaataatgggttaagaaaactggggattcgtccaaataaatctagtaatgtttagactgaaacagcaaagaaaaatccgggggacaaaggggttagggttaccaagatggctactgactacgcgtaacatccgcagcaagcgccgcagcaaattacacgcgaccacgcgacgcgttccgatcatcccgtcagatcgttgaccgaaagttctatgtcccctttctcggcctgctagagtttcttcaaaccctcggttactgtagctggagcttgttctatgctccctctcatccgtcctttcgttcttgttccattcgctcgtcagtctgttcgttcgtccgttcgttcagttcgttcgcgttcgccagctaggtcgaaattttcttcttaagaaaggtacgtccacttcagaggctgcctgtagaattctccttagctgatcgttgtcgttcaatcgatcgcccttcctcattcttctctctgttgtaaaaagctcgagcaaaaaaaagaaaaccaaacaggcccagtcgatccatcctggctcgactctgagcgttggaaacacttacatcaggcccagaagataaacctcaagtgtaagtctcattcaagatcatgcttaacgaggtgtaaacatgtgggcctgaccaaagatatcaaccatccaaacggtcttctccgatttctatcctgcccagtccgacatgatccgtcagactctttctcccctcgacaacgggtactctgcttatggccatccggtcgccggtcctagtcggtcgaatcaacacctatacccccagcctagggaccatatcgaaccagggatggagtacctgacctctccgttcaacactcgtgatccctctgcatcaaacaacaccatctcgttcaaccagtcggcgaacaccacatcgacaaactcattatccgtggcaagagtgttgttggaatccccaaacaaaggaagcctgtcgacgtttcaagcaccggcagaacatcctgtaccaaacattctactaggaccggtccatgaggaaggtcgcagatgggattatccgaatgcttcggaaaccggacagagtccttcaacagaaacgctctcgggcacatggggttcagggccaaccgagtggccgtatgggagcattcggaaagagagaggaagaggaaggaacgcggtcatcagggaagagtatcagagtatcgatcctcagatgctcagtgcacctccttctcacctcaggccccatccttccaacctaggtccgcactctccatctcattcactacaatccctaccttcgccaccggctccacctcccactcagctgtctacacactcctggcagcagagaccaccttcccatgctcaaacccatactcaggctcgcacttccggccatcgaaagtccatttccgagtcctactatacaaacgttcatcctcctgctacgccagtgtcctatatggcacccaccttgtcccaacacaaccttcctccgctctcgccctctcctcgtccgttaccatatcaggctacggactgtccatccccgatcgctcatcatcccggatgggatgacgctctagataatttcctagcttacggaccagccgagggtcgaccgatcgatatacccaccccgccagtcaaatctaattcgtccgtttccttcaacgaggtcaaactcggacatccctatatagctcatgggattctctttggcacagagggcacaccctcgttagaatctcattccgatctctcgcctgacttttcccagccgtctcgatctcagcctggcactcctggttctttcactcaactatacgcgctcgaccagatggtttctacctctcagcaaccggccccgttggtatctcctaccccatcttcgttctcctaccaacctcactatcagttcagaccgtctcaaccgtacgaccctgccatgatggacaactattccttatctaccagcctggttctccaacctttatatccaacctctccacctgtcgaaacatacccagtacctcttccccctgcggccgacttcaagacccacaggcggatcatgtcaacagactctgactactcgactccatattcccaaacaccagtcctggatgagcccacctcgcctgcaaaacccgagttcgagcgagctcttcctgttgttggagagctagaagaaagagacgattacgcgctgaatgacttggtgaatcaagtccatttaatctcttactctggatcttcttcccggccttcttctccttttcgtgtacaaacacaacgacagcagccttcagcgtctctctttcatgacaactttgaatcttccgaccttcagtattccttcactttggatccgcctacagaacaaccactacatcatcaacagcagcatcaacaacactcacagcaacattccaaccaattgtcgtttcaattttctgaaccagtaatccctcttaatgcttacaactatgatgcacagcagtcttcgttggtggtaagaccacctacaagcgtgccctctggattgactttatctcactctctagatgatacccccaagtctaagagggcgctcaaaccaccgacaaggcgtcaatcgatgccagcctcttcacttcctccctcttcgcgaatcaagttaaagaaagagcctactatcacagctaatatcatccctaacgacccaggaaccccaaaaggaaacaaaacacctctctcctcgaaaggaagcttgcttgcaatgataggaaggaaactcaagcctggaccgaaaccaaaggttacaaagtcacctgcgaaatctcaccagcgagcccaatccctttctagcctatctataaccgggatcgtcccccctagcgatccctcccggccggttctcagatccaaactaggaggcaccccgacgtcttctcaaccacatctccaacctcggtcaacttctatcggattgtactcggctgaacattcacccgatcataggcctagttctcctagttcggtctttctccacaccgaccagtcgtcccctcagtctgtccgctccaacaagcggctaccgttgaccaaaggcaaaaaggccgcgtcggagaaaaacacgacagaggagagaccatcgttagagatcactcaggcgatcatcacctcactttacgagcccattcatccgtccgataggtccagggtcgtttcatcgatgagcccagaaccggaaggtccggacgacggggcggatagaaaggctaagatgagggggaaggaggagatgagataccggtgcttggttgccgagtgtgacagagtctttccaagggtgagtctaacggctttttagatcgatcgagagaccggcatggattgccctaaactgacgtgcatcgcgtgtttctttgactatttcagaaaagcgctatcatccaccatatccaaatgcatctggaggataaaccgttcgcttgcgaagctcctgggtggtcagttctcggtttcttctgtcttatcggattttgactgttggctgatctgagcgacttacctccaacaacacagccacgcttcattcgtacgtcaacacgaccttcgtcgacatgagcgaatccatagcgataccaaaccattctcttgtccttggtatgtctaaaaacatcctccttagtttcatcacaaccctcagagcaccaacttacccatgctttggtatcatctttctcaaatctttgattctttccagcgggaaaggattctctcgaggagatgccctggttcgtcatcgacaacgtgcaatttgtattggaggcaccccagataccgcgcctgtcagtttgaaacgtcggcgaggcgaatgacaacgtctggttgcccctcagctcacctattgacatatcctatctatctactcatctttgaatcctcaccattcgaacactttgttgtccgttcgtgcgttcatagacttctcgttcatcgtttagaccatcaattccatacgtcactcgtctttcttttcttctgatcgtcttatctctgtgtacgcttttgttcgttcatactcgacagtgttcaaacgcggcattctccatctcattctatttgggttctttcctttcagtcactgcttctgtttatacatctataatct

SEQ ID NO: 719 - DNA, 2253 bp, Xanthophyllomyces dendrorhous
aacgatctctctgtattcgattctctagcccctttgcctatctcttctgttatacttacactccgtcccgactttccgtcatcttggttactttgtgatatctcttttatcgctgtgttgatgttgttttgattcgtgttcagactgaatattgacatcgataatagcgtgtgtaaaaaaaaggagaaaaggatgaaacacattccggatgattttgtgatagcccataagaatggttatttatccgaggattccggcattctccacacggcttcgtagagctggaacgtagatccgatcaaaaaaccccaacttcctaccaaagtcaaggagatagaaaaaaaacccgggatgtatcagcactcagtggagagggtttgaccaagatcagaggggtgagggatgaggataacaaaagaagaaaaagaagaagaaatccctttcgggaaaggacgaaccccaataagtactcatatcggattgccaaactgccctgctatcaaccgaatatccgagcgctccgcaaagacagaaccctacagaaccaacgaggttccatacaccaacttgccaaccgatcgtcaatggcttgaggtgataccatcttggttgaacctcgatggtcaggatgagagaggagatgatgaaacctagacctcccaccacttgggctacgcgagaacagaaccggcaaagccaatcaatcacagagaaaataggtaagcgatacattcaattgaaacaatgtgtttagtgggaagaacagaaggaaggacttacgagaccagaagaagacgtcaatgatcgcacgcgaacccgtcccgtcggctaaaccggggatcacacctggcaaaccagtcagagttgatatccaaaagactgaggcggcgaacatctggacggcagctgctatatatcccatctctttccatcgaggcttcggcctttgaaaggagaaaggagatagggagggtcatgtcagtttcaccccaagagacagaacggatagaagagagtggacggaagaacaaggcgcttacatccaggagaactcggagggttcatggtttgcggacgacttaggaaaatcatcggtagaagatgagaccgaatgagcggatggtttgttcccccaaataagggactcaaaagaggatccaactaggaaagtttgaagaaaggacattgagatttaacaaggaagacgaaaggtagttggcgaggaggattcgttaactaggcgagtcaggcagaagaggaatatccccctccatcaagcatcacacgtaagacagaagaggacgaacaatcgttttctttgcctctattaccagcttccaacagtcctaagtaggcaccgaccagaaagatggttcctccgatgaaagccaaagcgctagctgtcggagccatagcttcggaatctgtcgagggtctgacgactggtaaccagacgcaaaacccgttggcgacccagacggctgatccccaccagaaagcaacagccacccagaagctgaatacgcttgaggtaagacgctagtccgtccgtgatgcatcaactaggggaaacttcaaagaggaaaacgtacgtgacatcgagcttcaaatggggtttgagcttatcccgctcgccgtggtgggctactctgatggatattgtcgaagttgggtgagattcaatcatgccggcatggtggtgggaccgtaagggaaaccgtcctggatgccgtcatgagtttcgtgatcgagctagtgagttctacggactcgaccagaaagaggcaaggaatcgaacgagaaaaagcaaaccttttctggcgtctcgactgttgtatttgatcttggttctcgaatccgagttgggatgttcgatttcccactccagatgggtaggattcagcctatttcctcttcgccgaggcctaacttcatgtccgctgggagttctagctggatgaagggtcggatggctgagcgtagagctggcagtagaggcagacggtttcttgaaaggcattctcgaaaggacacaaagagctagctcctcctttttctattctcagatatctgggctatatccaaggtcagtccagcaagatcaacggtgagctcgaacgatgtgcagcaggtgagtgtcaagagcgaacaagagcatggctaagagaagagaccatggtttcggcctgttggggttttccagcagcagcaggtaatttaagaataagtatgacgtgtgtggggggggggggg

SEQ ID NO: 720 - DNA, 15677 bp, Xanthophyllomyces dendrorhous
gtgcatgtatgcacgtgagaatctcgccactaagacggcacgccgccgtagccaccgcccacacaaggttacagcatggttacgcccacaaagctcgtcccatcaaacgtcccagttcttttgctctctctttcttctacatcccatcccgtttctcgtccttcaacgatgtccgtccctcttcaacccacgactcctgcagccgagaaaatcgtcgtccctcaggtgtcctacctttctggagttaccgcgctcctttccgggttcgccgacccggttttcggacagtacggcaagctgcacaacttgcgaaatgatctgttcggaacggtctccaaccctggaaacgtcgagtctttgggcaaggatgtcaagagttagttttgtttttttacccttatttttctttcttgcagagcaaaagggacgtgcaacaatgtgtaaggtgagggaaggatggacagggccattggaatcatctggacatgtgttggcgtacgtggccgatcattgaaaaagagaggttacacggataaagctgaaaggataagagggtgatcggacttaccaggatagctcatcaacaaccaagcatcggaaggaatttatttctgttcgatattgctgtagaggagagaacagaaagaacgatgatgaaccatctcttgcgatcacgatcggattcatctgtcccatatcgctgatcttacattatatatcttttttccctttcttccacctcctcctttttctccatcatctagtgacccacttgaccaacttcacgttcgatggagtcaaggctgatctcagcaagagcgtctcgatggaccctgctttccaggttcagcactcgttctccttggccaaggcggccgagcctccgagctacaactttggtgctgtctttgctaagaaagatgtgcgttctccctactactttctcctctgtcccgtcttttctaaacctcgcgatagaaagagaacgaggcaaagaaagactgcctccgacatcagaggtttctcccaagccttcaaccaaggctcatgaaacttttcttttcttttctcttctctcgtacagctcttcttgcagggaagcatcgaccacgagttcaactcgtctgcccgaattaacaaaccctggaacgactggagtgttactaagatgcaggctcaggttggtgtttctctctctctatccaaacctctagctcttatcccaccttctcgtcctgattgtctctgctgtactctttgtttcctatactagctctctcccatccccggccactcgatggtccagctcgagcaggagttttctcttcccggtgagactttgaccctcaaggcgatcaacccgtcgttgaccgatggaaccggcatctacatcacctccctcctcggagctgtgactcctcgattgtccctcggatttgagaccatcctccagaagcccactcccgagatttcccagtctgttacctcgctcctcgccaagtggacgtcggtgttgacccccggaaacccaattcccacgccgatggcccctaccggcactcctgccttccatgagtggaccgctaccgtgcaggctcagatggccggtatcgtcagcgcgacctaccaccaccgactttccgacaaggtcgacgtcggtgccgatttgaacgtcgtcatggccggtggccgaagggaagctaccgctaccgttggtgcaaagtatgatttcaggatggctaccttccgagctcagttggactcgaccggaaagacttcgatgttgctcgagcagcgattcgcgcctacgttctccttcttggtttccggagagatcgatcacatgaaggttcgttccctctctctctctctctctcttatctttcgtcttctacaagcttcgtatcggctttcgcgcgtactcaatctctttctctcttgccttcgctcctctcgataggctggtgccgcgaagtgcggtttcggtgtcatgctcgagactacaactctcactcccgaggagttaggaatggtcccccaacctgctatgtaaacaaaccactccttccctactcctaccttaagcttatggaaaagaacgttaaactcgaagggaacgagaagcgattggaattgaatgggtgtgtgaccagttgggacgtaaatacgatcgttctttcttcttttctcctctgttttgcttctcttctcttctcttcctatttcttctctatccctttcgccctcttacaaaacccacaaagattcaaatgaagactgtatcataacctggtctagtccaggaagaaaaaaaaagccgagctgtcccatataactggaaactccttgatggataatcaaataggaatacctgtaacaaaacaggtctttctagcaaacaaagagagagagagagaaactgcggtaatattagaattggtcttgttcaaattcgacaacccagagtcaaaattgtgcacggaaggtatcaagagaaaatagaacaatatgaaattaaactaaacaagaccactgaaaggaacacaggatggatgtgtgctcttgaagacaatgtatagacaacaatagagatgaaaaagtcaatgagcaacgcttttaactaccctcgtcctcactctgacccccccccccctctttgatggatgaccaatgacagtcaagtcaattgatcagtgtcctatgaaccgttttgacgagcccttctcccttctttgcatacaccagcagataaggattcgcgttcgtcccactcgtatccgccaaaacttcgtccctgctgactttagtgaccgtctgatcgttgtacttaaaccattcctctggattttccggaagatttcgctgatacaggaagtctgtgaacatatgcgtgagcgcatgaatcaggccgcagttccatcacgtttcgagaggagaaagaaagagggtaaacttacaatggccaaacccggcttcaccttgagatgtaggtcgaaaaccacagaagcaccatagtcagtctttgtacacaatcatgtatgacaaatggtgggagccatggagaaggaaggaagaacagacctcgatgcatgaatacacttgtcaattcatactcttgattcttctcttccgcccacatcgcttctacatcttccttgagctcacggatcttttcttgactcgactggatcttctgctcgatgtcgacttttctcgcagccaaatcagctttgaggtcggcatcaacatgtgaggatgagagccagtcaggggaagtgaaaacgtcgtccaggagatgagagatgctctctttgtatgatgtctgctgctagaacgtaagaagccggtcgtgagacacttgaaatgacgggctttttgaacgtacgacgatagacacttacccgaggtggttgaatagcctgtaggccatcacgtaattgacggatctctgctgagagtgccttggaggcttccgtcatcggtggattggcaccttcgagataacgatcgaagaacagcgtctccggaaactcgacaaaagcgttactcttgtatgcccgagcagtctctcgatcaaattgtgctctctgtcgagccaaagaaagaagaagaagggttgagcgttttgtacgttgaaactgcgaggaaacaaaacatgtacggacttgaagttggatatgcagcattcgaggcaattctatcggaacctctaccaaggtggccgttttacccgccagatctgttgaatcaggagcgtagtagtctgtgagagcgtcgtgcaagttcttcgaagttccggtctcgcccacattcaaaagtatatgattgaacacaagttctttgtccctactaggatctgattcggcatccccctcgactacaagcttttgacgagactttccgtagaacaatctgcagaaactcaaacatatcaagatgaatcgtttaaatcgcacagagtaaagaagtgctcaacttactgcttgatgatatttgatcccaagtcgcttccacgttcgagtttctcgggattcaacgcagcctcaatctggaacaaacaattgtcgagacactcagaaacatcgtgttgttttccttttggaaaaaaatagaggaaaaaaaagggcagttgcaaaaccgacgatcttcagtttaatcaacctcaaggtaacatgaaccgagacgcgctcgagcaaatctgcttaccaaacatcatagcaccatttcctacatctttgggcactaccatcttgttcctaggtggtagaggaggtggattggaaagagctgaagttttttgcaacccatctctagtcttctggctttccacaggagcataaggatgtacttcagcctcaggttcgacagtcatctcccgatcagctctcaacaacactgtcgatcttctccggggcgtctttcggggtgcggcgtcatttaaaagagaggaatgaatcggtaggggtgatggaggatcagttgagacttcggttgatacatccgaaggcccatcagacatcgcagcatcttccgataaaggaggttgcgtcgaaaacatcgatcggtcatccacatccattttactaggttcctctcggtcttcgctggatcgtttgcccagtacagacgaggtcgacgacatccgactaggaggctgaggagccgataaaattacctgactggtcgttactgaagcagagccatcctctaccaacgtctgctcggtatctgaagacccgtctcggatagctgtagaatgaaggggcgggctctcatcttcctcatctttagaggtgaccaatgcaagatacgccagttctaattctggagcgattgaagcaacttcactgagttccaagttcaaaaacaggccagacaacgcttcggtgactagataggcacggtgatgacatgtttagcacctacaatttgctaaagggatacgacaaagaacttacaacggatggatcgttcgacctctttgaatgtcactgcccttcctcctacacgcttttcgttgagtttctcgacgactcgaaggtcttcctgatagagctgaaagttggtaactgtgtctcgaagctgagcaattgtgtaaagatactagatgaacaaaaggaggcaatcaatgcatcagcttatgtctgttcactcaagcatttgcatatggatattgtacctgaagtagtgagttgagataacctatcatgaccagaaccaaccgacgaatgaaaagatgtcaacaatcaaacctcaagaggggacaagctgatcaaaacacgtacaagtgtttccaacattgatcaagccgactggccgactactagacacaggctggatctctggcccagactcgactatttggaaggaaagaaagcaaatgaacaatcccatgtcatgtcgaaatagaagtgttcacaatgcgtcaactaacctcgtatgcctgtatcaacgtattttcttaacgttgcacttcctcgagcatcagcaattgcccgtaaagcttctttgaaatcatcctcttgcccaggcgcatcaataacctgcgattggagaataaagaccgacatcagaacgtggtcaataccatatcatgtaattacgccagtcaacagcacaacactgaacgtactcggatatcatacagcctgcacagagacaaccatcgagctcgaatcagcgaacgaaccaagtttcgattcaaacaaactctgcaggcaacagaagtgacactcacgacgtcaatagctcctcatcgatcgattcttccgccccgaacatcgcgtacgctgcttttgaatccatcggctctttctttgcctgcaaaatcgcgtctatcaataccctctgagtctctgtttgatgctttctgctctccgcgatgatctccatggattccatgatctgagtcctagctctcgttagatcgtctcctccagaaggatattgatccttgacgctcttgagtgcctcgaagaatttatcagtgatataggacggcggaaattccgcttgatccacacaaatcatatcggcatcttgcatggtaagaccgggaatggattcgtaagcggcgttgatttcactttgggtattgtgtcccttggagcgctcggtcacctggagtagttgtaggtcgtccctcccagtacccataaatccatcgacgacacaaccaagagcctccaaatagaggggcctgtagatacgtatacataccacataaagttattggaacttccttttctgcaagaatgattgaacaacgtcaaagagatgtctagacttacgtgcgaatagagtcgtaacgtgtctgagctgtgtaagcgaacaccagatacgccgatggaagagcaaactcagtgttgacacccagcgttgtaagagcgtccttatactcctgcgcgtagggtttgacgattcgatttcttgggactgtatatcacataagcgtttagatacaaatttggttatctgcaaagggacacctagatgaaggcaggaaccactcactgttggacttgagtgcaccaatattagcagcaaatgttccatctaatgggttcctgagcccaacctgcccagaatgtttcaagttcgaattcatcgaatgtagatctggaacatagatgggtcaggatgatcgggacaagaatcagataattgatgaagagaacaggtagaaaaatcagttgatggccaacagacgcatggagtagacgataactcagcaaacatattaaataagaaaatagatacttctaaacaaccgataatgttcgagataagcgttgatttcgacccaggccctcatcatcttttgtctgacattcaaccacttctctagatccattggaggggagattaatacggaagaatcatcggtgccttcagggtctttggtgatcatgaatccaagctgtttacaaatgtcttgactgatgctcgtgaaaatgaagccgaaactgtcagtcaagaggatcgctctcacaatacataggatgaatgcaatcactgaccttttttgatcccaaccgactttgcggctgaaatttgggttcatcgatctgaccgctcgaaggttgtttccaaacacggcattggagatcatcctttgggcaatccagacacatgtgggagatgacgggtttgaaagttgaataaggagacgagtaagaaaaagacagttaagggaagtgggatgaaaatacacctacgtaagaagaaccgtccaggctgcatctgctccgttagtgccaggtagcggatcaacgtttctcgagatcgtaaaatcatgaaccagcttgtaatctaacacaccgggcagcgatgtcttgggtacaacgacccagctagcatcatttgctgacacatacagatctcctagagtttccgccgatgtcatccctacatcatcctcggtgatttgaaggaattgattggatttctcttcggaaggcgagtctgcccccaagggcacctgttcctcattcaaaaccatatctacatcatctattctttctaatggaatctgctgcgaagcttccatcaagctgaccatcgatcttgaaggagctagacgatcgctaacttctgcctgaacaactccagacacgcaatgatagtgcctagccaaatctaaaccggtgtcccatccattagactctagcattcgttctgggattgagccagcacgagcattttctagaatctggagtagttttgtcacttggcccgctcctttcgaagtcaacaaatcaaacggaggaattccctctccggatggaaagagccaccattcgaacgtgtctgtatcgaacacagctgttccagcgcccggagggaaccaagggattgatcgacgaacttcgtctattgacggtggggtaacgtttgaggccaaggaaaccgaaggagagggggatacaggccggggtggtctggattcatctatctcaggcgcaggcgtggcagatgtagatgatcgagaaggctgagattcggtcgtaggttgagacggggacaaaggtgtagctcccatgcgctttacaggagaggacgagggtagcagagtcggttctggcagtttcaggatatcaatctcccagccggtactcttacaaggccagaccggggtttcaaggagaactgaggggagcacaccgggtcctatttgaggataatcggcagatatttcccattgatcgttctgattcatgggatctgtctcggctggtgtccaggaatccacagcagttatctctttgacggaagtattcacctcgggcgggggagttaaggacaggacaggttctggagagctagatgtatgaagaaaaggaagcaagaacagtagacgtcacatttcagtcaccgaggagtcgaacgcttggtcgagttatttgataggtcttcaagacgaaccggtattttgaggttgtatcccatcccgaatttgccatatctgatgtttggacagaagttgaccatgaaggctcataactaggtggttcctcctcaggttgtccgctcaaccttttgctgacgctcataacctctatgtgctgagcgccatctgtgtttccttcatctgtccatgttggagacaaggggggtgtacgaatgggattcgacagaccgtctgccgacaagcttgacgtagccggtaggaacgatgagacatcagtctgtggacgagtttgtggaaggtatgaggaatgagatgggtttgtttgagaagaggatatctgccgagagggaagaggtatggactgttgttgctgctgctgctgctgctgtcgacgatgatacagcgagtgctgggaagaggtctgagcctcaggagcgagggttgagcttgacgattgggagatgctgggattcgctactccatcggtcactgggctcttgtgtaggaccatctcctaaaagacttgaacacgtctctgtacgactaacattcatcgaaagaaaccacacgtccgtgaaaactgaaataggtatgtttggatagattgatctgatggagactgacccttggaagatgcaaacgaactaatgataaacggagctgcacgtacgacacctctctatctaaccgagcagatcgagcggaaacgaccctgaatgaggaaaaagaagtcgaagacttcttgaagacagactgtaaagtattttccaatagaccctgtcgtatgtgcgtgagagaaagattgaatgaggttatatacgaatatgtcgaggtcgaggtcgaggtcaaggtttggatgaagtctcggttgtgtcttcatctatgtatccatgagatgaccaggggttgacctcatatgattacacgcttagtcatcaagccaacatcgtttcgcctagtgaactgcgactctcatcccgagagatccttacgtaattcataaccatcaatttggaaccgtaaccagcatccgtgccatggcctcgcctgccacccaatttttctcgttgttctttcttccttcttttcttctttctttttttgctcatcgttcataaagcaatcgtttagaacaatgtccgacgtaaggatgctctctctttcttgctcgtgggggtgtcgatgctgcccttgtgtttgctcttgacttatctgtctggttccttgcttgttgctttaatctcctcggttttggttttgctttatgtgtctggtttcttgccctttttttttttttcttgtatctttcttctcgtttctctccgcttccatcgccacctcgacctcattctttgctggtcaccggctgaaatctttggtagtccactattccttccttcaagttggtcctcgtcggtgacggaggaaccggaaagaccactttcgtcaagcgacatttgaccggaggtacgtgcgatgtactttggaccacgccaatagtcagatctagagagtggtttacgtatgtaaataatcgagctgatgaaccctttcgttcctgttcactctgccattcttctgtgcccgttcatcactcttagagttcgagaagaaggttggttcgtttcaatttcaggttgatcaatcagctatttgctaacatgtatccacgaaaaatgtaaataccgaacaaagtacattggtaagtcccttttttagtttggtctcgccttcctacagctatctagtcatcttacaatatcttcgccttcttcgatccatctctttcagccacccttggtgtcgaagttcatcctcttcagttctccaccaactttggtaccatctgcttcaacgtctgggataccgctggacaggagaagtttggtggtctccgagatggatactacattcagggacagtgtggtattcttatgttcgatgtgacctcgcgtatcacctacaagaacgttgccaactggcaccgagatcttgagcgagtctgtgagaacatccctatggtgctttgcggaaacaaggtcgatgtcaaggtacgtggagtttcttgtgatgattagtcgagagtcgaggtgcttgttagctcgcctacacattgtgggtgtatgctatttggattgtattctgatatgccccttgccggtgttttcctcccatctttttcgacaaatgagtaggagcgaaaggtcaagaccggcgccgtcactttccaccgaaagaagaaccttcagtacttcgagatctctgccaagtctaactacaacttcgagaagcccttcctctggttggctcgaaagctcgtcgggtacgtgcctgtttgaggatcagtgtctctgtccgtattcttcacgatcactaatttcaaccccttttcatgatcttctagaaaccctgctcttgagttcgtcgccgcccctgctttggctcctcctgaggttgttctttccgagcaggaccgagctcagctcgatgccgacgctcaggccgccatcaacgccccccttcccgacgaggtaagtcaaccgcgctcatttgcgtctatatgtttattttggaacatgctgacgataatttgtccaaccgatcacttttctcggacggattacaggacgacggagatctctaaaagaacaaaatcatcagattatctctacatgctttagcttccttcgactctcctgtccttaactttccacctctttttgcttcctcctctttccctccatcacgggctctttttttttcttctgccgccccatcctttgcgctctataaatcaatatgaatgaacgccccagaaagtctgcttgatatctgtctgcctgaaatagagagcaaatgccggctttaatggccgaccgtaaggagtacgcaatcctacgaggatcaatgtttgtgcaagattgcccggaacttaaaaccaagacggccaccattagaaagattcggggaataccgggaaagaggccgtttcttggtcttctataaatattggtaaactcattgcatcatatgtgttctgtaccggcatcgttcatgctcttcccatcacctccgagatcattgtcacaatctgcctcgttcatttatgtgcgtcgacgtgttccgttcttataaaatgaacctatcgtcgctactctttttcaactcatctctctcccacctattcacaaaaaagccataacattttctagaatgagcaaattccttcggtctaccacaactatcaagcatgccttgcctacgattcaaccaaagccaacaacgaccaccttcgtgtttcgttcgcttggaacatcgtcctccaaatcctcggccgctggttccgaaaatcctatcaatttccgtgcgagtgtcgtgggatcagctctaatcggtctcggagctggtattctcatcagttccctcgatctgttctcttcctctcagactgcatctactattatcgacgcctcacgttcaacttccggcgaacaacagacttatccacctccatttggatcgaaagaagattattcgaatggaatccgcgatctcagggattacttcaaatcgttgggaagggaagatgacgtttcgaccgacaaaggtgatttggagacacatggtatcagtaagtcctgttcgtcaacgactttcgagaagattggtcactaatttcaaactctttcctccttaatacaaaggcgaatggtcgtttcataaggaacacagaccgtctgtcgttgtttggcctttgacgtacgtcgaactcagatggtctgtaagagacatcagtttatcaaacgagaggtactaaccgatattccggggtcttggtcgtctacccggaattctatttatctttagaacggaagaagttcagaaggtcgtacagatcgccaaccagtataatatgtgagtcgtttgcttctattcctctcatatcagggaagaattaaacattgactaatgaggtccgttcatctggtcactgacaggcctgtcacaccctactctggaggtacctccctcgaaggacactttagcgcggtacgcaacatcaaccagcctctcttgtctacgtcacgatattctgatattacatacatgtgtttcgtcatatggttggaaatctttgggtcgcggttcttcgaaccaagcctcacggaggaatttctatagatctcaatcgaatggataagatcatcgaaattcacggtgagttcgagcgtcactcgttcattcatcttggtctcttttcatctatttgtccgattcaagaaattgcatttgcattatgtacatcaacttaaaccgggacattctctcttttagaggccgatggagatatggttgttcagccaggaatcggatgggagaccatcaattcagagttgaagagtcgtgacatcaaactattctttcctgtgagtacagtgtgatatagttctcttcgttttttaggtgcgctgacatatgctcgctcgctatccttcatgctactgtcgtacaatccctttagctcgatccaggacctggcgcaacaatcggaggaatggcagcctgtggatgttcgggaacaaacgccgttcggtatggaacagctaaagcagaatggttcctcaatttcacagtcgttctgccttctggcgaggtcatcaagactcgtcagcgagcgcgaaaatcctcggctggctgggatttgaccaagatgtaagacattttattaacactttgatatgactttgtcaaaaaagctcatagatacgtcgacacgatttgcgctcatcttggataggttcatcggagctgaaggcaccttggggattgtcaccgaaggtaagatttttatctttcgtttccgttctgtctgtgtcagtttgataatgatgatccaatttctctctttctttgccatttccacatcagccacgattaggctcacacctcttttgcctactcggtgcgctgttgttaacttccctaacgttaggaatgcagtagctgctgcaacagaagtgtatgtcacttctttctgcatctcgctatctatattcaaccttgatgccccacctttatctctctactgatagaaaaaaacatctgggtttaattaaatatggaattctcaagtgtgggacatggtcaccccgtccaatgcgtggaatttttagacgatcagatgatgaaggctatcaatcagcagtcaggatcaaagtaccctgagcgggactccctcttcttcagttcgtgtcctctatcatttgtttttcttgattgtttccgaagatgagaatactaatgctgttctataccccctgtcatcttcaatcagaattccaaggctcagacgcgtcaatgaaagaagtcgcacagagtgtaagcgcggtcgtaaaggaacatggtggtcgggactttcaattctccaaggatgctgccgaagccgaaagtttgtggcagagtcgaaaagctgcgctgtggagtgcgatgggcatgtatcccgattgcaaggcttggttggtccaagttttcttcctttcacttttcttttatcaacgcataccctgccgcccctacttgggattggagtttgatggatatccaagctggaaattaatttatctgatttgacgctggggatcgcaaggacaaccgacgtttgtgtacccatctcgcgcttgcccaaactggtagaagagaccaaggcagatatcatcaaccgagggctttctgcgtgccatatggggtaagtatttctcatctttctctcccaaatcaaatttacgagtacttttattctaaagaagtttgctgattgtatattgcgcttcaatgactttccatttttgtgtgtagccatgtcgggtacgtttccgttcaagtctcgccaatctggttcctcactctttgattctacagcaaccatatcaagcagtatttgacttttttcttcttttgacgttttctttttgcttctattttcgacagtgatggaaatgttcacagtgtgatcttatttaaaggtgatgaggaactcgcaaaagtcaaggaggcagttcatgagatggttcatcgcgctcaacggctagacggaacagccactggggaacatggtttgtcgtcgagctttcatctatttcccctgctctcatattgatgtaattctgactggtgtctctaaacccatttttattactttttttcctcgcccaggcgttggtttgggcaaaattgaggtgtgtttcctcttgtcgttttcttcttttgacatttttcaatcatctaccaagaagcagaacaaacattgattcaggaaactgctgtttcgtttgatcgttcgccttcaatagtacctcgaagcagaactaggcccaggtacagtccgaacgatggagggaatcaagaagcaccgttcgtcattttttgttgtctcattctatcttcgtccctttcctttcaagagccaagttctcctaagctctgatcccaactgacctgtatgtttttggtgacatttctggtgttggttcatacagtggatccaaagggattgttcaatcctggaaagttgtatcctaacctgggagcaaaaccagatttttagattctgaattgatttggtgattcatgtcttttgtactttctagtttatgactacacatcaagaagagcaaaggtataacaatagggcatagaaagcatgtacaacaatgaaaggtccacttcaacatcgagataagctggagctctaattaaaattgacaacggaagtgagacatgtaaaagttttaggcatatggcacaacatattcataaagactgatcgatacaaaagattcatacatgacaaacagaatttcagaaggaggaaagcaagcacaagtggttgagagacattaaatgtaaatacgggaaagcgtgagctacaaaaaatcgcatcaatgtcctgcgcctttctcaaagactgtgatcgactcaacctcatcgctgaaacataagagagcgagagattatcgaaaaatcagctcatgtggcgcgcagaacgaattaacaaaggagaaagacagggaaaaaactgacaaatggtagagaggctcgagtttggccttcttgtcacataaaaggtatcgtctgaagaaataagggagggacttcttcatttggtagttcgcatgggtcgcggtcgggacggcaaatacatagtcgagttcttccaatgttcgttgcatagtctctgggacaagcacgaagatcatacagaatgcaa

SEQ ID NO: 721 - DNA, 622 bp, Xanthophyllomyces dendrorhous
ttctgatgcaacctgcgtggtgtatgattttcttgtgctctgttcttgattgaacccgtaggtgacaagttcggatgggcttcgtatcagctcggtctcaaattgcacgagtgaagaaaaagacagatgaggtgttcttggttcgccttctctttggtcggttggttaatcatgaagatacgatgaaaggctcgatcgaacgagcgcagatggccaacaggccggaaaactaagagggggctaagagaagcagtggctcgaaaagagttagatgtatgtaggaatcatcaagaaaatcaacagcatccttaaaggtggaaatagatataatgaaccgtatccaaggtgaactgtaaagactcgagacaaaacaagtagtagaaaatattgaaggggaagatcgattgatcaataactacgatctacattgtctctctttcttcccttgggggatcattgatcccacctggtgttcctctggcacccgccaacccgactctcgtatatctagccacaccaggcaaaaaggttctgaaaccggcagaaccaggtaccacaccgggaatgggtcggccagaaggaggtggatcgaggttagtaaatcgggaagtgtcgggatgat

SEQ ID NO: 722 - DNA, 1059 bp, Xanthophyllomyces dendrorhous
gggtagggtgggatggggtcggtgctaatttcatacgctggttcgaggctggtttgggttcgggagaaggtgttgataggtcaacgataagcgcgccggctatatataaattaattgtcaagaagaaacgtatggaaattgagagtcagcaagacagcccgacttcaaaaagaccgaaaggcaaggaagccccaagagaaaggaagagagaagaatacgaactatgccatccagaagcggtgatgccaaaaacaaatttgccggttccgagtccagttccgatcccatctggacctgccgttttgggctctccaaactgaacgaccgtgggtgtatcgactcgttggactgagatcggtcccaagcctagtgatccagagtttgcttggccaaacgttgatagttcacctttagctgtcaatacggcgacatgataatctcctgatcaaggtcagaagggcaaattagaaagacatagttgtttgacttccccgaaaaggttgaaactaagagaaagctagaagaaggagagacttgccgagggcaactttgatgacgccccttccctgcaattctttcagcacactcggtatgactcctccagacgattgggacagaagctgactcttcgttcccttgtaaacgatcgaggtcgagtagtcgctgtcggctgtaccagggtaatagacgaagaatgtctcaaaatgggcagaaacgtgggtcattcgagtgatgttgtaaggttggtattcgtagtcatatggctctaacgttgggcgaggcgcttggggatactggaactttgggtgctaaaagaccaccaacgacatagcgaacgaacgttgtctgagatcagtttgaccgtgaatgtatgggttagtcaagagagcaacttacatgttcccatatctgtcttcgattgcctgtactcaactttccgatgtcatccactttacttcccagccatgccgtccaaacctcacctttctccgttaatgccaccagaaaactaccaccacatgcgattttaacgattttgttctcttctatctctggaag

SEQ ID NO: 723 - DNA, 114172 bp, Xanthophyllomyces dendrorhous
atctctggaagcatgaacatgggtgcagacgaaactgtaatccccagagggatctgagcggccgatgaatctgaaagaggagagggaggtggtgggtttggagcttcataatctggccaccaaacgcgaacacgtccgcttgaagaaagagaggcgctgttcgtccagcctgcttcgacttgtacgatacaacttcggtttcgagcgtataatcagttaatccgatcgatgatcgcatgaacaatattgaatgcagaacaggtgacaagacctactcgtttgatgacgactctgaatcgaacttgagagctttgccccaggcagtcaactcccagatactaaacgcaacattcgaatcagaatttgaatcaactctggtagaagagactatacgcgtgagttgattccatgctcacatgttatctgcgtccagtatcaagacgtgctttctaccacaactgatgctcaagactttactcggcacgaggatctggagtgcaccacccattcgattgacatgagtatctgcgctcgagactttgctggtcgagaaagtgtcaaatcggaataaacatacctgatgaggctgggtacagactgttgctggatccatccaattcagcctcgaagcagtatacgattcaccgtccagtgtgcctacgaagaaagtagatggcaaaccccaaaagtcacaacccagtctgagcaccgagccaagaagcatagttcgtatagagttggaacgacgaaaaatctgcttaccccagcaccatatccgaccttgactatcgagtccacaaaacccgtaaccactcgcttgaaggtctaccattccaactccttcgttcagaggaagaagtaccggtcgattgatcccatcaatccgagcagtaaagtccgccagggcgggatgagacctaggaagtcctaaccgtccattagaaagtgatctgtagatatggccgaagaatgcaatcattgttcttgagcaccattgtcgatctctctttgaggagggaggcaaaaaaaaacataaaaatccttacccccagacataaacagactattcgatcagatcacagaagcacgaccccgaggagacgataagcaaagaaaagagcagaatcagcatttgtttctgcttgaaagatattgtagtattaacacaactccaaaagatacagaccggtcttctcaatttcaaatacaagtctttccaaccatcttctctcgcggtgactgtaagtggcagattaaagtcctctctaatctttcgtttccagaatgtctgactatagttgattgggcattgacaacaaataatcctgtgatgagtctgcgaactggatacggaacgagagaataatacagaaagaccgactcttgaactacttgtttgatgtgtttgttcactcgggacaacgagagtagatctgtgagaggtagtatcgggagaatattatcgaggaaaagttcatccctgatcggaagttgattgatccctataggtcagcaaacatggtcttgggcaagaacgagattaaacatgactacatatttacggaaggttgtccaggcttgacatgatgtgttggctgatggtggcgatgggtgatgacggtgatgatgtagaacggtagttgttctgaatttctcgctcatctccgatctacggactcgccacgtttgtaggtgattgttcatgtgcatcatgtaactggtacaagtgaactaatgaaccaacatgatattcaaaaagttctagagcgtacaattcgttgaaacgacaatgcaagatagtaagaaagaaagagcagagcggcaaaggtgataacctgagaaaacgacaactcctctcggctatctagcaaacattaggctccatcatcgatggccaacaaacctcagcttcttctcctttcgcaccaacccctgattgtagaattccacttccggtgctgaccgacattcccatactcaatccatgaggttccatatatctatcattcgaaagactgaatgataccaggccggtcgatggagtgactgtgtcgaaagacatgattttgacttctggaacatcccgagatatcgctaccggcgtcaccctggagcttcctgattcaaatgaggaatctgtttcatgcgcggagcttggagatgctacagatgagctagataagctggatgtgtcgattgtgttgattgagggagttcgcgatctaccggtgaggcgagtgatgagcccccctaacggagaccgaactttccgaatcagactcagagagagtgtcaaagtcggagagtaaggtgtctctgaggctgtgggcacagtgggactacatgcgagctgtatccgaacaaacgagaagaagacgagggttatatattgaggaagaagttcatgcttcataggtatagcaagaccagaattgtcggaagaaaggttcaaaagtactaacggggaagatttctagatttggattatggttcttcaagcgcgctaatggctgttgtttgttcatggcgagtacatgcatcatgagcaatcagcaacggccttgcgaactgttgccctgaagagaaagaagaataactggaataacgtacatgaaatgattccgccatgttttcaacgtcggtttggcaacacaaatttggctttgtctctactaccggtttaacacccttccagccgcttgttgagacgttcacatggtcactcgatatgtcaaatagctttctacgtcgacgtatgctttgtgcacaataaagataccatgcagatatggccagtagaactagaatcggtaagaggattcctagtagaagggcgagctggtgtcgttcaggagcgtcaactaggtggctggaggttgtgtttgcataggtggccacctcgatagattccatcatgcgattcgatttggatgataagagggctggtttcaacaaattcctttattatatcacctaatgagcctgataactgaagtcgtaaacatttggaactcatctgtggttagtttacgtatgacaagttcgaatttttgtcctttgagatgtcgccaacttgatgatgaagctgacggtactaacacaacggttgcggaggaggtagattgatctgtcgagtaggttctatccaaagaagagagatgagaaaaggtattgcaaaatctcacgaccgcatgtctatcaatccagctatataaagatgttaacaaagctgatgcatgcacgaacagaattcatgtcgagccttgtcaaggtgcatactaaccatgtaatcgttcgctgagccgacgtacgaggctggtaaggcaatgaggtgacacagtcggatattaccaattgttcaggccgttcgatccgtcggtcagtcattcgatctgcttgtattacagtcccttatctgacccataggatcaaagtcgagctagtgattcacatcagagtcagcaagatggtgagatcagtaagagatgggaattgatatacaaaatgatcaacagagataagataagataaatatagtcacgtcatcgcaatggcccgggtttatctctcgatcgaagagttttcctatcggctgcgtggaaagtaagcgttgagactcttgatcgctcgactcttagccattgagtttcagttgcatcttgtttcccaactgtctcctattctattctgttctattctatcctaccccattctcatccttcaaccttcagatacctttgatagtcgtgatttaccagacgatcgcaaaggatgtccagctcaaatcagtttcttcggacgcagaatcaagcgttttagtaagccttgtcgcgtccatgattgctttacctgccacttcctgttcgcgagtatgtccaggatgaatacacgttgatcaatgattgaactctgcttgattcaatctagtgatgaatacgatcgaacggtcgtcttacgaggcgtcaatctctgtgccaaaaatcctttgggacatcgcgagtctccttctcttggcgggctggtttctgaattcatcaaaaccattcacgttacttaccctcatattgagaatcactttggatacatatagcctcccatgattcatcttatcatctgggtcttccgtcctctccagataccgcgggccagattagcttcgtaggcagccctttcaaattggaggacgcagaggttcatatcgcacgtctgacggcgtgagtgcctgtttgtcgggattccccttccccccatggtttgtgacgagatcgagctagcactaccttccagatgaggctgaatctatggtgccaattttctcatataaaaatctaggtgggggttccgggctgtccgattggccatctgttgggaagcgatcgaacacgaaggaccgtaagtcccatacaagcctaccgagaagttcgatcgtggatattcaagctggatttaaatatatggtttgttgttatcagtggaaaatatgatgaggagtatattgactatgtcgtcgctctcctccacaaactcaaagagggtggattccgagtttgtgagaactcttctcccatccggctggtctcgacgaaagggtgttcctgacattgtttcatacacactcattacagtcattgatcctcatcaagattgttggtctcgcgcttcaggaggctcaggggcaccttactggacacttgtagcctgtggattggatccgaataggtttcagtcgacccaggctactctagcccatggcttatggaacggatcagatggaagaacaaaagatgagaagtggcctgatatggttcgttctttgttaactaaatccaaagattttcacccagactgaatctcatcctccttcaatttggttgatgttcctcagatttggcaaactaacactttcaagctagcttgcttaacgttgttcaccctcttctttgcgggaagaacgttcgcgcccaagtgtattatagacggaatcaatattcaagactggctgcatgaaaaatatttgaacgcatttggcaggtcagcaatccacgtttactttcattcctaagtatttcaaccccctctgactattgtttcttacaactacagattagcggatcggatcgctgaagacggagaattaaacgacgtctgcgttatcggatgggactcgatgtacgttcgttttgaatttcttcggaagagcatataacgggcaagcgtttgactttgttggcatttcatatggctatgtaacttagcaacgaacctcaagaaggatttatcggaaattctgatttgagtgtcctaagagaagagcagtcattcaggttcgtctcaccctcttcatcgaaataaggtcatgtgaaggatcgaatcatgctcagttgagattttgcaatgtgcaggacgggacctacccccactgcgtttgaggctctcaagttagggatgggccagaaacagaagattcagaagtacaagttcgggtcggtgcgtagctcttctacttcaagttacttcaaagacctggcgccttctcgatagccattttttctcatttgtttctcagcgtaccttgaagtatgtatactgatcaatcaatttgttctcgctgacagactggatcaaagtcagacggatatgttactgtagatccagaaggtcagacatgttggctcgcgccagaggaagaacctggaggaatctccaaatggggttggaagcgagacgcaggttggacaacaggcacttgcatatgggctgtacatggggtgtacgtattatgatttcacaatttctcgccctttacgctctctcctcgaatctatctgtagctgatagtctcttcctatcttggcgcgatattcagttgggatatcgagcaagccactttgcttcagccagattacttttcgaagcccgtcataaagggttctgaggaggttgatttcttgtccgattattgggttcctcattggaagctgtggaacgctagaattcggaagtgcgttcttgtttatgatgcactctgttctgttttcatcctgactaacacctcttccttttggcgtagatcgcatccgcaagctatcgcatttatcaatccaccagtctttggacatcctcccactttggacgaagcagatgagaatggacgagtttgcttgtctcctcacttttatgacggaatgacactcattaataaacggttcggttatatgaattcaataaaacatcgaacagtttatgaacactgacatatgtgacctcgataccctgtgccttcttcaggctacattcattcaacgcggatgctgtaaggatgaatatacctgtcatatgcactaccttcattttttatctgatattgatccatcaaactcttctcggattaggttgggctcgcacgtaagacgaccagtgttcttggaggagcatacctagggctcgagaacattaaagagtctatgcggcatcagttcggccagctcactatcaaagatacgagctccaaaaacccagacaacgggctttccacggataaacttaggtcataccctgcagtcttaggcgaggtatgtcgtcctttttgacctatatccatcagcgcatcgagaaggttttcttatgagctatccatttgcctcttacatgaattgatcatgcctacgtcagattggtgtgccgttcgattttaagaagacggacaaactctttgggcttattgctagaggaggcagtcagcacaattatcgagagcaagaaaaggcaatggatacctcgttaacaggatgcgatggcaagaacgccgttggggtcagtacctgctgacttattttcctttcatgacgtgtggatactattcttatcatctctttgttttctgacttgccgatcgtggactagtctttcgtttgggcttacgattgccacaatacaaaggagaaaggcgatggctgggttcgtgattttccatatctagtaactctgtgtactgtgttggttccaactaatcccgggtcattctgctttgaatcagaacggagaagatctttcaatcttttgcaaagacgattataggacaaagattcctagtatggaggtccctcggtatatgtatgacctactcaacattggggctcgggcccaaagggctttctcaagagtgagtcttttacagtatttcttatcgcatcagactagatatacacttgtttctattgtgtattcggagatctgactctgttctttcgtgcgctctcaaagccttatcctatagccttggttggtcgacttcgacatctcgatttctcgatggacaagagcgagttgactatggaggtagaagaagaaactcttcctaatccttctacatctacaaatcggtcatctccggtctggacggaggtctaccttccctatatccacttcacgccgttcaaactggatgcaggcgccgatgagattgcctctctgagtcttcaacccgaattgtcccaacaatcgatcgtctttaatccaagctcgattttagcatcttctgcatcaactcccttctctgcccatctgatcagtgcgccagaaaaagaccctcctttgggcctcgagatctggtcagccgagacgggagcaagacccaggattgatatcaaggtccatgttcatctccaagaaggtctcccagctcaatctggcggaggactcatcttcgagatggttgcagtcggacagatcttgaaatggaggtgggtgaccgcagacaaagcgaaggaagtggacggcgagcagacaaacagaggcgtggaagttaattcaaagccggtgaaggaggtggtcccgaaggagggaaagctgagaaaatattcgatcaagattgaaaagtggttggggcatggattgtctggcggactagctcagaagatctcgcaaatacttccttagcctgtctcatgttatcaagacaaccgtctgccttgaaactcttatgttttcctttctcattatcatagttttattccttttccttgtctgtatttccgatcttgagtctaattgactttttaacctgttcatgaaattttgtccattctgaccatccaaacatcatgacaaaggatggcttaaaggtaaaaggacgagagacaattgagaatctgaagtgcaagagaggcttagaaccccttggcccagctgaagtcaaggcgaacgggtccagaatagagaaaatcgtcgtcagcaggcttcagtctgttttgcatacgatgtacctgaattaagtccggaagtctaaaaagaatactcactttccggcagcgtagaagtcctcgacctccttgatgatcttctccagagcagaaagccactggtcaagctccttctcgactgagaagggggagaagagggacgaatatgaccacactatcaatctacaagtttcacaacttcttgtgcttccccctcgaaacagaacgtaagcctgctttacttaccgacatcctggggcgatccaagcttggcgtaaaagtcttttcggtatgggcatgccttcatcgcaagctattcaatccggctcaggtgttgatttagcatacaaatacatcgaatgaagacatacgagatatatggtcaaaaactacgaacagcgaagacaggtcggacaaacatagagtggtactgcttcaaagtactctcgtatgacttagtgaaagaaacagtaagctcatccgacgggttggatagagagtgtcgcaaagcggtcgcgttgaacttaagtcctctgtattgaagcgcgttgagtaaacaaagaggtttgagctttatcgttggacacacataattcgagtatgccaagcgagaggacaaaaaacagtggtgaagttcttaccgaatgagccagagaagaccctgagtagccgttcggttcttatctccgggcttaccctcattctgaacaagagactgcaaggtcgccgacgatccagggctggcggccaatcgatcttggactttctagattgttcaattatcgagaggataataaagcgcccgagatgtgttccgtgtgtacgcaatttgaatatctcgtggcccaatgtgatacgtattggtgtacgagaaaacagaccttgatgtttccagtgatatcagacttcacaggagtaaaggcagcgtttccaaggacgtctatttgagagcattaggagcatgaagtagtgatcagctcagcagggcctgaatgaagaaccattgaaaagacttggtggatctcgttcccgtccttgcagttgagatggggccctgtgcctttgatagaggctcaaaagtggacccatctcttggaagttcgtcgcatctgttgtttagattgatacgcatccaagaactcaccgaagatcttgacgagtccctcggaagcctggcagaaggaagcagtatcaatcccaggggtggtcgagacgtcttggaatttctgtacggggcaaagaaacgtattgattgaatgattgagctctttccactggttcgacacggtcacaataaaaagggtcagtagataactcacaactggaatggtctcgaagaactgaggagaagacatggtagattgatggaatttgatgcaaagaggaagaaaagagaacaaatggagtcgcttggtcgaggatgggaggaatgtaccgagatgttgtcctggcccgggaagtttcaaaccgttgcgttttaccgtttgccgaagatatcgtccgaccctttgctcactcgtcgtccatcatccatcatcaaccactcacctcgtcactccattcatgacggcgctcaacaaaaagaaacatacttcatttctcctccgttgtcttcgcggtctaccaggttcggctgcgtcctatgactccaatcggtcggttcaataccttcatctacctcttcttattcagcgagcaaccgcgtttctgagccatcaaagaaacatttctgtactttttttattttgccgggatgggaatgaaatagtttgactctgtcgtacttccttcttgcatctctagatctactaggaactttgttcgaagcaacagatcaaacggagcgcaacgggtggatccaatgggtgtgggatcaacagcttcgtttgtctgactctactgaattcgttcatctcttgtccgtcgttcgaggggcgcaggtttgactttggatacgcatatatatatttgaaaaagctcagggtggtttcagaggatctcctttcacaggcccatggaaggagtgtggaggaacagatgatgatggacagcctataaccttagtgagtttccattcgttcgcacctcctaatgatgcactccatacttatcactcttgcttcccacatccgatagacacctactttatcctcaaatcaagctcatttggcttcgacatatacggcgctcctagtcttgtcaattctacgagctcctttggataagctcaacagaccgggattggttgcatttctgaggtcatgccagtttgaggacggctcgtatgttgattcctcacctctagaaactcaagtctttttttatactgatatatgaatgatatcaattctgaccctcatattgaccttctctatacatactttcgtagattttcgccattaagaaaggagatgaacgctgagagagacgttagaatggttctttgcgcttgtgtgatttcggatctggtagccgattggacaggagtcaacgttgaacagtccgaacgatttgtccaggcttgctgtgtcaggccctctcccttttttgtgttctttctctgtaaccggtactaatgttgctttgaccacagtcatatgacggaggattcggtcagagaccacagcaagaatctcaaggtaacaacaacctttgctaatttttctcatagcgtgccttcccgcttctgagactgcttgcccattcatctctacccattcgtctcaaacaggaggaacaacctattgtgccctcgcctcactacatcttctgtcttccgtgtcgcccactatttcagcaccatcgctctcgactcagccaaccatctcatggcttttacacaggcagatacaacctcgggacgttccgtttcaggctgactttgatgaggaggatcagtcaggtccaaaaaccagatcaatcagcggtggctttcaaggcagaccaggaaagctcggggactgttgttattctttttggtgtggtggcggactatcggttcgtcgacgtcgtttgcacttctctcagctgtcttggtagctatatcggcagctgaggaacttgtaaaagaactaattatcgtgtgtgcttgcttggtcttcgcaaaatagattttgggcgctcaaagtttgatcgatgggccagccaataaggcgttcctgctgcgttgtcagtctattgtgggtggctttggtaaagctcctctcgaacgaccaggttcgtccgtcatttccacttaagctttcaatctgggtaaagaaatattcgacagttttccaaaggtaaaatgatgactgaacccccgtccgaccctcttcctgcttgattgccatttgttacagatccgttccatacgtactcagctcttgccgcgctttctctgtttgcaagcatagatgacaaagaactcggcaagatggatgcattgaggaacatgagcaagagcgcactcggttggctagagagtgagcgaaccaggttgggctggctcaactcgatatagaatcatgctatcgagggtatatatatgtgtatgtgttctacccaaatatctagcgcaaacaaagggatcgctctgatggataggagaagtcgcaagattgagcgctcctgtgggtatcaagtaaagagtggagacaatgcacaacgctagctagtgtcattatatgatatcagtatgagacgaaggagtagcggacgatattggctctcaaccatatcgaaagtattcccatccaacccagttcgcaatgatgtaactagaagcaataaaaagaatgcatcagttgtctgtacaaggctgtttctttacgttctactgtgatggtaactcactaggctccgactgggacgagtagaggaaccaggtacttgtagtgtgtgtccatacagaccatagacagaacctattgacgccagtgaagaagcacattaacggttgacatgaccgtttcgatcgctacatacaacaggacacttgaagtaaccagttctagaactcaccgatggaaacctatcgggttggtcatttgtcttgaccaaatagcatccccacggttccaaaagaagataaactacgatggcgaatgaggttgacagaagaactataccaggaaggatctttgaatcgaccggcatgtgtgcgtgttaccttcttattcttccatgaagcggatctattcttcctcttcagagatgatggatgatggcagagagaataaagggttgtataccgggatggatgaatgaatggtcaacaagctgtgcacgtcaacggacgagatggcgaagtgtcttcatctcgttcccactcctggtcatcaaccatcatccggatcattcatcatcttatactaacacaagcagagctttcctgattgaatggcatcctctatgactagttctcattcggaggatgatctagatccgttctccaccgtgtccgagacaccttcgcctaatcctcgggacgtccctttaccttcgccatcgcccaccgatgctgaagcctcgtcctcttcaaatcaaccaaacacgtcgacctcttctgatccttcatcgacggtgtatcagcaagctcctcctcttccttcttctagtttgtcggaagaacaggtcatgaatagtagagcgtatcatatacagcgccctaatcagcccctctcacctatcggcaagtatttgcaggaggacgggtgggtgattgaggtacgtcggaatatagttaattctactgggtattctttgtccaaagtcccgatccgatagctctctgactgacacttttcctctttgacttcgtccgttgttacccctccacagatcatcgatgcatacaaaacgactgaggcaaagtcgacctacatcgtctatgtgattcgtaccgatgtgagacactctatcgtgtgatcatttatgaagattgctcctagagcttacgtttggtctttcgaattctaacatcttctcagatgatcgaggctcggcgccgatactctgagtttgaggctttgcggctatcgctgtctaaattatatcccacgctcatcgtgccgccggttccgtccaaaacgacggtatcagagtatgctgtcaagcagagcaaagcgaaggaagatgcagtggtgatcgcaaagcgaacaaggatgttgggcacattcctgaaccgaatcggtaggcatcctatcttgggaaatgaacctgtgtttcatcggtttctcgatggtggagtctcttgggtgggtctctctctagtgctcgttatgttcttgcccaattgtctcggaggatttgacatctttctttgttaccaacgacatggctacagacggaaatctcccattcgcctcccatctctcagttacccaagaacccactcaaagtgccggttcataacccgacggattggtcgttcactgctgcatacgcgtcgttaccgaacccgccagcgaattactcgcttagaaatccagaccaaaggtttctggaaagcgagaagtttacgaacaagtttgagaaacatctgagcggaaatctggaaaaggtcaatcggcggattatgaagcgatggggaggttagtccttatcgagacttcttattgatgatcagatacggacgtcgcaggatgccaagttgatacttttcatgggagattgacaatgtctctggttccattttgcttcgctttcttaagaaaattcaaacgactatgccgagcttggagctgttctgaatggattcagtctgactgagaccggctcgctgtcggcggcaatcgagcgtacgggccaggctgtggatgcgacttatctgtcaaccaccaatcttgttcgttcattcttattcttctttcgctactattttagctctgatatctgaaacgcgcttgtccgattaaatagctatcgcaatgggagtctcaatataccgagcctctttcagaatacgttcactttgggtcgatcatcaagaaacttctacactaccggctgcagaaacaaattcagttcgagctcacgatggaacagatcgagtctcgaaaggcatatctcgaagggttggaacgagcggagaacgaggctcgtcgattggaaggcgcattggctgcggccggtctgggagggagctcgagcggacccgatcgagatcgtggagagagtgggggtgggttgttggatgggaacagagatggtgacggagaaggggaaagaaggaaagtgccggctagctcgacatcaatgagcagcttatcgacgactggttcgagcgggtatgggtcatcgttcttgagtgcgctcagtcattcgataactggaatgattgacgtcgatccagaggcaacccggcggaataacatctcgaaaacaaaggatacgatttcacaggttagagggaaagacatgttgttgttggtggtagaaatattgtgtacgataatcgctaacatagcactgttttatgcacgctctgggtgggcgcgtgtaacatagctggaggacgcgctccatctgacggcacaggatcttaagtatgcatcccggacgatccaggctgatctcgatcggtttcaacgtcagaaggttgcggatatcaagggaatgagtatcagtctggctcgggcccaccgggactggtgtaaacaggttagtgttgtatctgggtatctctgtagggaactcttgtgcataaacttactggaactgagtgggaaacatctatatttctcatcaacagaacctagaggcttggaaggaagcgaaagcggcggtcgatgctatcggtgagagagaatcaactacttgcctccttgcttggtgtctgtgcatagagatctaaaatctgttggccttgctatcgttcatgattcagaaccccatccggcccgagcccctcctagtggatcacgagtaaatcaagaagcaagtctgccctcaaggccgaacttgccgcaaacgacaagccaacagccgcttccgagagagcgaatctcgcctggaggcggtggttcgggtacgtcgggaaggacggctagcgatcctctcggaggcggttcacattaggatttctgttaaacatgatcggtccttcctcatcttcctttatttttgtttttttttctccagactgtctatatctttctcgcttgcttcccattgtgatttgtatagtttgtgacgaaatcgatgacatacctatctgtcattagtaggaatgacagcaacagtgttattagtagcaacaacgatagcaatctcatcaccagtcagcctttgacgtagtctgaaaatactcgtataattctcgactcgcggactggtttcacaaaaaggaaacagggtttacccggccaggcggtggagctgtcactgcggacgaaataagagcggtgagaaggcagggctgctgcgcgcgcttatgtcactgtttacgtcatttgaatgaccttgcgcctgacgaggctagaatccccttggctcgagtggggctcccaagatcggagagaacgagcgaggctctagacagcgggaagcttgctgcgcgattgcctttgcccaaaaacgtccagagcgtcagggcgtttttaacttttgatccgccctgagccttggccctttttataaagactggttcctgttttaactaccgcctactctcctttcttcttcttcttcttcttcttctctctcgtcacttcttaatccatcctgctctccagatagagaaaagagaaaacattcataacacagatcataaactcatcggttctgcttgttaaactatctacttatccttcctaatcgacatctttctctttcggatcccaagaagaacaacccaaaaacaaacaccaacacattcaatatgccttccttcgctgccttccctggttgtaagtgtgctgagctctggatacgtcatccttgtttctatttctctggtgtgtgaacctagagctaaccacttatgtatgtatgaatgttttgtgtgaccttcatagtcttcttcgcgttcgccgcgatggtcttgctcgtgattgtgtccgtatccgtaccaatctgggactctgtgagtttgacctttttatatatatatatattctttctcggtctgttcaatactcttttcttcacaacactacttatctattcgctcttttgtcttatttttcattctaggtttatttccttaaagccactctcaacagtgagacggtcacctttggaaactggggttactgtgttcaaggagggtcgtgcacttcggccaaatatggttatgacctcacctctactttgatcagtgattccaccggcagtacgtctcgggctctgcactcttcgtttcagcgccttgttcgatacgttcttgctgacatcattttcttctgttcttctcgatctttattatcgaaaaagaattgagcaacgctctcagcaagggccttacctatgtcttcatccttcaccccatcgctgctggactctcgttcattgctgccttgctcggcctcatcggtacatttgcctcatcccgagcttcgaccatcctcatggtcattgcttctctcttggccttgctcgtgaccggagttgcttggatcatcaacatgatcgctttcggaattggtatgtctttgatcctgtccagtcgtctagatttcttttcgcttacctgaatctcatgcacccttcgttcgtgtcgacagcccgaaaccgagtgcgaaacgctggaggacaggctagctacgagaacggagagtggattcttctcggtgctttcgcatccttggtaggttccgtccgtgctgatatctcgtaacgttctgtcgctaacactatattctcattctacagatccttgcctccttctttgctgtttgcggatctttcggtcgattccgatccgaccgaggagccggaatccctgctcgatactaagcggtttatctatccgcctttaatgagtattctcttttacgataggctttctctacttagttactgtcgtaatctttaccggattccttctttgccctttatgactctctgttcccctgctccgtttgtgcttagtaccagatttagctagagcccacacgtgcactgtatacatactactttattaatttctttcgccttgtcatctctttcgttcgaagaaacacgttcataaagatagttcctcttaatttcgtcggatggatatcattcaggacagcctcctaatcttttctgtttgaatctgtgtgaatctgtgaacatgggatgaagcaccatggaacatatgtatgctgatagaaaaacaaacgacgtgttgagcttcaatggaggctgtattaaccctaatcgcagcaacccagcgttctactgtttctcatcgtacgcacgcttacatgttttggctctctttcttcctcttgttctcatcttctcatctttctacatcttggatatcaaactaaccgaagggaaggtcaaaaacgatggacgacctgaatgacttagattggtccgtttcagctcaacagacttcaaaaccgagccctttccaatcctcgttcgacctgctcgctagttcttcttcatctacttcgacttcttcttcggctttctacaactcaacccgaactgtctccccacagcctcctcctctcgcccctttcggagctgccaaaccatcgatatctcaacaaaaacctcagaagtcaacggatgcgttcgctgatctcttctctctaggcggagtcacaagagcacccggctcgagaggagggggcgcctcctcatcgatggctgaggaacaagcgagactcagagaagaagccgctaggaagaaggaagctgagcataaaggattcgaaagccaaggagcattctggaacagtttaggaggttcaggactggctggtatcgaaccgtcacaggcatctgctccttttcatccttcggtccaacgatcgcaacaacagcagcaacaacaacaacaacagcagggatccatccgattagggtcgacaacccctcttgtcccttcacgaagctcgactcctcaaaccagtcgtcctcttgcttccacctcctccgcaaaagcaccatcacgaacaaatccgtcggacatctggtccgagtttgatctcctgtcttcatcttcgaatcctggtcctcctccatcatcctcaactacagaccagcgcctggatgcacaaagcacaccttcgttaattcttacgcctcctagttctagctctggtaagactggaccagcttcggatccgttcgacttctttctgaatcagacccctgtgaatggcaacgggccctcaggctccaagcaagccacagcagctaacaaggtgcaagcctccgcagcccgaggagatgaagacgactgggagttcaccgggaatattagagagggaaaagagagaggtggtcttttagaagacagtgaggaggacgacttcatgtctgctttcaacacgaaatctgtagaggtggtgcgtcatagatctactatcatttgcttctttcttcactattgtttccctgacgttttcttcttcctctcgcggtccggttgtcaaattgtattttgttctccttagaaggctactactttgcgcccagctcaatcatcttcatcttcatcctctcgtcgaggatctcctccaccacacatcgtcggccaactcgtcgagatgggcttcaccccagctcaggcccgacaggcccttggttcgacagagtccggcctagatgtccagatggctgcttccatgctgttgagcgaaagctccgatcaaagcaaacatattgatcgtggtttcagcgatcaagacggtaatggcgacgatgacgagagagagagggaccgacttcgtctgatagaagaggcggcggcggctgaaaggcgccgaaaacgaagacaaggtccttctcgatcatccgtagctactggcggcgcctctgatctctcccggtcggcgacgaacactcctccgaacgaaggagcaacgacacctcttcaagagcaagccgccaaaatcctcgctcagacaaacttacttgggaccagtgtcttcaacagggccaatgctttctggaaggaaggcaaatctcaagtccagaaagcttacgaagagagaacagcagctgccaacgcaggaaatagtcggtcgtcgacgccggcgaacgatggaaggccaaagtggatgacggagaatattcagaatgtcgacggttcggacaaagaggagccgagggcgcagagtcattcatctggattcaaggatggatttgcggatgagcgacttcaagaggacgctcctacccataggccacaaagagaacggccggtaaaccagaaaccggcaaaggcgattgagcaaccgagtttgttattgtccgctgcttccaagatcgggagcctgttctcaacggcagaagacgagcctaggtcgtatgtgtcccccaaccggcgaccgcctgctcgccagtcttcaagctctctgacgacccccccagtctctcgtccgagcccatttcctcctgcgaaacctctgatgacacggccgatcccctctatctctacttcttccattgaatctgtctcagcacatcgaacgaagggtaatgagttcttcaagctcggtcagtttggtgaggccgagggcgcctatactcaagcaatcagtatccttcctgatgggcaccctcgatcaattccattgtataataatcgggcaacttctcgattaaagaatggcgatcatactggatctgcttcagattcgaccatggtgatcgacatggttggtttggattaccatcctgataaagaggtccctcttccttccgatctctcagatatcaatcttggagacggactggttaaagcaatcgtcaaacgagccaacgcaatggagttgggcgagcggtggtcaaaagcaaaagaagactgggatcttgtcggaaggttagaaatcaacgtaccaggtgccactaagattgccgccatggatggatccagacggtgcaaaaagatggttgacctgatgaacggggtgtctgctcctgccattgctccttcctcttctgcctcgtcatcgtcaacgacgaagcggaagcctccgcctagagcagctccgtcatcgtcgacaggagcagcgtcggctcttctgaaagcgaccactgccgcgctcgaatcagaagatctccagcgagaccaacacaaggatgctgtcgacgcgaggatccttagttggaaagcaggaaaagaaacaaatgtccgggcgttgatcgggtcgcttgagaatgtgctttggccggaattagattggcaaaaagtaggactacacgagttggtaacggataaacaggtcaagataaagtatacccgggcggtcggcaaggttcatccagacaagttgaacgcgggcaatacgacggtcgagcaaaggatgatagcgaacggggtgtttgcggcgttgaacgaaggtatgttacaagtctttagtctcttaactctctttcggctggaccctattcccactatcaatgtttatgtttgattaaccgtctcgtgtggttgttctcaaacgcatcagcttggaacgcgggtcagaagtagagacttggcattcaagaactggcaacgtcatccattgtcatgagaacgtgttgtataccgatttgacgaagaatagagcatggacttttaataatgaaccatagggaggaagggcttcgatgaattcttcctcatgcggttaaagaaacggctgttcgcttacctaatcgacttttcgctgaacttccaacaccttcctgcagactcgtcgactctcgcgcgtcttcctcattcatcctctgtctttcacgtctttctcatctgtttctttctgttcatctccgttcgcctactgtgtaaaggctaactagaacatcgggagcgactgttcatccgccatactaatgcttatccgttgaagaaatgctgacaatttgtataaaacaccatgtttcgctaatatctttcctgcccctcatcacatcatatcaaactgacgcacactcatatctcctcgcactcaccttcacatattctatctccttctctatccccatcgaacaatatgtcttctcttcacggatcttatatccaccgaccgactgcaatgcttggctctcgtgtcgctcgtgcgatccgacaagctccagttgaggtataccctctattcgccgtcgttgttcgtgtttcttctcttctcctttctcgttcttcgtctcctctcttaccgctccaacactaagccgcgctctttccatcatccgttttctttttttcgacttgactgatacacgccaggctttctcattgtcatttatgacctacaccgcgatccatacatccaaagacgcaacggacgtctcgtttcatccccagtcgaaccctcgaccatgggaaaagctctcaccagagtaccttgaatcttataccgttcgagcatcgtgtatagctcctcatacacctggacagtgagtacatgtccttctttgtctttttatctcttcagagggagttcttgtcggatgttgatcggataaagaccacgcgggttgacgattttgaaagctcctttgaactggtatatcagccctacacactacccgacttctgatagcttcttcgacctcaagttcaaacctatacattagacactgaaggagaaaaacgtttcttgaaaccatcaccaagcttctctagtctaccagagatcattctctgcagttcttttccttttatctgccttgtattgtgatgtttatctttttctgttatctagttgaattttgtgtacaccgtttgttgtaaaaatggattttgtttttgaccgtcatggtttgttttctgaataagcttcctactgacagtccttttctgatgggcttcttgtttcggaaagaaggatgtaagtgctgtgacatgtacaaggcctgtcgttcatcaccaacacaagacaataatcctgccatgtacccgttcttgttcttcctcagcggtttcaaaagatgatctcaagtaattatggtcaagggtcatagatcagaaaataagaatgcttagcggggacgcttaggcggactcgtttccggcgacggtgagctgcaagatgaaaagtttaacaaattaattttttttaaagcttgaaaagagagaaagacaaggagaaaactcacgagatcggaatctccggcgtcggtgatgctcataactccgactcggaagagcttaccggccgccgttccgagggtagcgttggtaccctcgtatcggtggacagcggtcttgctgagcatggcgtagtactcaatctcggctcgtcgaagagggggagtgttcttggagaggaggataagcttggctgtaaggggagaatgaaagacgaatagggaatgtaatttcgggtggatggttaaagtggatagattgggttggaaaaaattgtcatgacgacggatacggaatgggaagatagtcagtcatttgccttcgcagcgtgtgaacgctccagccagggagttccacaaggtcgaccaggacgatcccgtgcatcgacctgttgaaccctcaagaaagggggaagacccaagggccgcggggaaaatttcaatgcttaccctttccggatcgcatcgacttcaaagcggacttgtagccaagggtgaactttcctaaagaacgagaaggaggagagaggatgagcatttacattctggttcaaatgaaaaccatgcaagagaaaaaagaaagaacgaaccagacttgacgacaagctggagtcgagagttgatgttctcggagttcttggtagccttggacttcttagtgggagccatttctgaaaagcaagtgaagcagacctgtcagactgatgaacggcggtatactcagcactcaatctatactcacttgctttgtcttgacgaaggatggatggagaaacgaaaccattcgagtgtgaggaaagaaaagaaaagttttggcgtgttgtaaaaagctgtgcatcgtgacttgctcgttaccatgaatttcatactccgtccttttctccaacaccttccacacgctgggcagcatgtacttgcgcttgtcctctgtatattgatcagatcaaatcaatagattcaatttctatacagatgtggaaggccaaatgttctgtgatttttttatagacatcacgtcgttgatactggctgctagaagtctcacttttcatcgattaggcatagaaataggcgtagagagaacactctctttgtttatcatatggcacagctgtccaaaacagaacaacctcagacaatactatacatccgtctaaaagtgtatgcaatgcgtctacaatagttcttagttgtctactggtttttcatccggcccggcacatctacgaagagagacgatgaacctcttttaacccatagcccgctcccacatctcgtctccaatcaatccacccattcctgtcggacccttgaggcaattatataaccacagcttcagcatctctccgtccactgcgcacgctcgaaccattacagtccgtcccatccctggcacgtttctggcttccagcactgagagcgaccaaagaaacgatggagtgcgtgggagatgattgatcttggtttcggacgcctgaaggtcgagtagatgggtgattaatgactgagtcgccggacctgttaggattaaggtaaggaatattttgtatgggtacaaagaagatgcatatgacgtttgattggacgttgtcgataatgatggtgatgatgaagacggtggtttcaatcccgatgcaggatcttgaagagtagtgtctgccgctccagaagtaggcggtgctgatgatgagactggtagagccgattgagctagcggagcagaaggtggaggccggttctcatcgtggaggacaatacgttcgcctactcctcgggttgagccccaccatacctcactaaagaactcgagcctctcagcgtcccatacttcccctattgttaaagctcctcgtttttctcgtccacaagctgattatcatcgaccgatacatcgaaaggagataaacagaataaaaagggcaacggttagtctgaatccaattcggcgcgctatgctattgggtggcctcagacaacgtaaagagagataaattgggactaaacgagcaggaactcactaaaccaatcgagaacgatcaggttagcggttccacaggtcggcagatcgaaacgctgtcgttgggtataccgagagttctcgaaacatgcggttggcgaaggcagatagtaaagagacgcatttggctggagcgtagcgatcgaggtttggatagttgtcgaaagacgtaaagattccgatggggatggatttgagagagaggaaagtactgtaggagtcgctaaccggacaccgggtcgtctcttaaatactttggttgttcccttgaatcataatccgataatcacgtgtttgacccggaagaaaagaaggccgccatgattagcgaaacagacagcgattgatacgaatgaaaacactctcacctgagtcaacacgagaagagctgcaccagaatcgacatctaaattcagccagaccttgtccccactaatcagtcctccgccgtaggaaagcacatagattgtccggagacccttgggcgaagacgcgagcggagtgggtgagaggagtttgagcgggtatacaaacgagagatcagcaaacagagcggtcggtagtaaatgtgcacgccctgtgccggctggctgaggcatgaggtagtcgagactagcaacagaaagatggtaagacggtgatgaacagcagagatcaagcgatcagccagaaaacgaagatgttgttcttgcttgttagggttgtgccaagcgatcgcctcatcaccatctctcagcatcccagcatacatctctctgatactgcttgagctcatctgataatcttcccttccctgggcagacagatacgttgattcagcaatggatactcttccagtcctgcctccagaaatcttgcttcatatattgtcttatctgcctctttgtgatttagccaggtgccacactatcaactctacatggctcgaccttattcggaacaatcagcaaagtctttaccgaagagtggcagataggaacctgaaggacagtgacctaacgatgagcgactggctggtacatggtgtctcagaatggaaagagttctgtttgtgatctagttcaccttgtctttatccagtcgaaggttaacttggattagctcaaacaatgtgcttgtctacctttctgtaggccggcgtagacacatgagccacagaaattggagacaaggcaaccacttgtcgaactggatcagcccaccgttaagggatgtatggcggatcaagattgacgaagagcataactttgttatgacgacgagccggctgggttggtctatctatcttccttctttatgcagtcgcagtcgacactcgcttactcacctatctttcaaacaggaaacatatatgcgatggattccaggacatcagaaatattagaagtcatagtgggagtgagagaatacgctcatcttgagtatgacaaaggtttcatgatcttcgatacccattgtaaggaacaactctcactctcgtccaacctccgtatgcgcttatcccgctaatacatattggaacccactgctcttcctagtcggcaacacccttgaggtatggagacgtaccgaagacatgtcccaagacggtcaaatgtcaaatccgactgagaacgaagcctctcaacaagtctcgtccaccgcgttctcgacacgaagcctctttagcttgtatgcagagatcagatgcccggcctcgattcgagcttataggtgagtgcgcatttccgttataggcataatctaccgaaccaagtctgaagaaagatcacaacttcatagattcgtatatcctatcctgctcattggatctatgagttctcagtcggcgttcctgtgggacattcctgaaaaaaggatggttgggtccatcgacatctcctcagccaacatggatctcataaactgtgagctcgtgtatttgaatacttctgggtccatacgcgctaacttttagggtctcaacagatgttgagaaaacagaacgccatattcttatcctaggcctgcactatatgtctgtcttctcgttatctccccacctggatccgggaagacagctacaccccccatatcacacactcaacattccctccgtccctccttccaccgaatttgttctcgacctttcgttagattttttagagctacaatgtctaactttagaaacaagaacaagaagaaccagacgatcgagacggtcggagggccacctgagcccaatgaggaaggcaatcgtttgggagacggagggcacaagagccgaaggagccatctttgcaagcaccatcgattattcgttcacagcgttcgtgtctcttgatatttgatatcctgtcgagtcacgagtgactgatcatcctctctccttttctgatcaatagcgcccacgtttcggaaggtgatctgatcctcacttctagactaggaaagatttttatcgtcctcgattatgctagtgtctttgaggatccatctttagaatctctacacacgatatgcttggatgtgatcgagcccgttttcaaccttactttcagctacggttcggctgtattctccacggtttgtctatctgtcttttgccttccgtgtcgcttatctccatcgcagataatgttttaggcttatattcggctatcaccaaccactccatgcgtagcgaacccaagtcctcatcattccttcaggttcccttcccaagatacaagacatccgagagtcagtatctaggaaggaggctggcttaccaagcttgccgctaaagatagagatatattcttgtagtaatgtctctgccggagcagcgctcgaatgtagttcggtacaggccgatcggaccagggcgttagtcacctttcctcggtcaatccgtttgccttgttgtaagatgactatgttgactcgacttaaatttattaggatgtttgcatacaacacccgagcagaccctgctttgggtaagccaatcactttctgctttcataacttttgtaatctccgcctatactgatcgattatgtgttctgacgagaatattgtaaacctctatgtataccagatggattctctccgcctgaaggtacgcttgttgtctgtttcttcgttccgttcatctcgtggatctttggtgcccattgtcttgtcttgcgcacgatatcctgaacctgaaaatgcgattcccttgttactggtagcgcgcacacattccggatactctgtcagagtgtttgactttacacccccgctctcatgaggagagctctgtatgattcatgtactatatacaatgacctcacgaagcttcactaccccttgataagttgagagatgcgatggaccccccaaagagaaatatgttgcgtcagagtttatggtatataagcaccacatattatcaaaaaatgcgggtaagaaaaagcaaacgtcattgattccgatcgagcaacaatataaagatccccatcgagatcgcatcctctttctctcttctcttcatttacattcacatccatccatctctttctttcagccgtaacaacacatcaacatacacttcaacaacatgtttgctcgatccatccttcgatccgctcgaccccaagtcttgatggctaccaggccgatctcccgatcagtcgtcctcaacaagggagccatggattctttgcgtaggtcatctttcttcttctatcacaccacacacacatacatgtttgactgatgataggagattcttcttgtgcatatgtttgtaggcgaaaaagcatctgatgttgcgtccaaggtttctgatgccaccagctcagctgccaccaattccagttcgtctcgtctgaccttaattccaaataatacaatctttaggataaggctaatcattgttttatgtccgcgcttctgtttttccatctcacagacgccgatgtgtccaacaaaagctctaccagcgatatgccccctgagttggccgagttgaccgatcctcacgccggtgagaaggttgataaggtccttcgggcgcagggtaaggatctcggcaaacatgagggggacaaggcctcggacggaaacggacacgtcgttcctggaggacaccaatagactttttcttgtgagtgatctctttatgattcatactcctcaatagtttttatggctaactggacttggtttcaatctttatctgttgtggttgcaacagtgaaaccaacacatgcatatctcattgattcctatcgttctccccgttcaacgctgtacccattacatttcgtgctgtatccaataagaattgcctagctttttcacacatcgatcagtcctgcttgcaagaaaagatgacgtatcacggctcctcgttttgtggctttacgaccccaagcaagacccgcaatcttatcgtctcctaaagaaagcagatgttctcaatggcagtacagatttacacccagacaggatacttgtcagtttgagagaacgtcacaaaccaaggggaccgtgaagtaacgagcgcgctaagcagacatcaacagattctgaatgcagttagtggccttgagagattttaagagttacctatgttttagagcgttctatcgagatcgctcattaaaaaaattgcatcggagcgatgaagaatgatgagaagagatttcgaagcgtcggcctcatcaagatggcattcatttcgctgacaaaagctttagctcggatagtcctgattgaataggcaaagctcatacagatgaatacattttgtcgaggtcatggatcgtagccaacttattcctgactgagcagtcttgagcgaacttcgtcgtataggtatatatatgaacacacaatctaagctaaacgataaccttgctaagtttagaaagagctgtatcaagaaaaaaaaatgcagatgggtgatcgaccattgtcagaaatctacgagattgaaggaatcacatgcacctcaaggattggagtatcaagcaacatacaatttaacaagagatcgccctgcttgatgacctgttcatattgggcatttttcttgtctcgtcggcttgtcataacaataccagagaccttatcgatcgtacagttcaatcgaccagacgagatcaaccgagacaaatcactgaaatacaaacgagagtaacatcaagtaagaaagactgctgagacttgagaggaaacgctagaacaaacctatcaatgaactctgggctgacaccgaatgccctggccatgctatcaagcgttagactcttataacttgccaggagctgagcataactgataattcgcatctctctgacgaaatatctagcatggggtgacaagatttttgagggaaggaggtagtcttgctcgatagcggcttcaagatttcattccagtacaacctatcagtacatgtttgaagaatgactgaaagcaagcactgtccaaagaaaaaagaaaggaagaaagagaagaagcaatcttggaggacttacccaaagacttgaagaatttggcgtaatcacagttgtgtaacgaagtagcaaagtcttccaagtttgattgagacgggaaaatctggcgaatttcaggagagttgatgatctaaagcgagcgaattgatcagtaacctagcatactgccaaaagtgaacacggaatagcctagatacctttttcttgatatccacccgctccatccagaccatgcaacccagcacacacactccaacaaagtcatcgtaggccatcaactcagtagccgtgaatgtcgagagcgcgtcgatgagcagctcgccgccctgtttaaagtccctgataaccagatagtacaatccctggtacactttcaatcggtttcgtcgatcccaatctcctccttcgttcacgagtctgaatgatagatagagagacgatcaggtttggaagaaacaaatcacatgacgagaaagaggcttacacggaggccttcggaaggttggtggtgataatattgttgtcgttgaagaagaagccaactcggatgatagtaagaacaatgtcgatacgagctccgattccaggagtcttctctagagcaagctctaaagcagctaatgatcgctcctgacgtacaaagcaatacacgaatgacatatagcggtggttaggttttgtgataataaatcagagtaaagagaaagagagctgatctaccttgtctccaatcttagtcaagtaggcggccttctttcgaagtacatcgctgacctctgtctctcccatgctatcctcagcctccttgatctcagtctcaaacttagcaagggccgtctcgttggcagcttgaagtttggagaggagttcagccgaatcggttgagccgatcaccgagggtgattccttgattatggtttccaagaacggagccatctctgtgagaacgaagaagccgtaagtcagcaaacagtagagaatatgtatgctcctggcgagtaagaggaagcaaccaaaaagggagaagaacaaaccatcactggtgatgccattgatgagatcctggcgtgccttatcatgaagatgggagaacgccggattactgagtacaaaaacggcctgaggaagagcaaggttggggataggcaaaggagcctcttcatctactggagaagacatatcactgagagaggacagaactgatgagaaagagaaaaagagatgaagattgttgatgatcgttggtggtggtggttgaaggttgagggtgaatcaaaagaaaggagaaatcctccacgtagcgatctccaactcaaccactgcccatcatcaatcatcaacccatcaacctccatccttccatctctctgtccaatgtcgtctcttctgcaacaggccaccgatctaatccagtcagatcccaggcaggctgaggaacagcttatcgccatccttgattcaactccgggtgagagattctcgttctcgttctcacatatatcgtcattctttgttgcatctactgatcctcctctttctctttaccttgcttctcgttcttctgccggttcatctttcttctctctctctctatcttctctgttacagccgacgaggatgaacagcacgaccaggaggatgccctgttgaccctcggaaagctctacagagatgaaaagtatgttcaatatgctagcctccacctccgaactctcgcctttcgataatcgcaaacacatctgagcacaaacacaagttaactgcttgctcacacccgctcttcaacctgttttattctatagaaactccgatgctctcgcttctatcataaagaaatctcggtcccagatgtcgacagcggctaaggctaagactgcaaagctcagtaagtctttctttcaccttgtcggtctccgagaccagtactgtttccaataccgcggaagattcttggcgtgtcatcttgcgcgacggaaggctgactcctttggcttcttgaatcatatgatatctctagttcgaaccttgatcgatttcttctccgatatccctaatgctcagaacgcccaaatcgattgcactaaggatactattgagtgggccagatcggagaagagggtcttccttcgacaaagtttggagaccaagctggcaggcctgtgagtgttcggctcaccactttctgtcgtcttcatgtcttgcttgtgcagctcaattgccagccacttgacacgctgatgttgtgttctgtctcataatggcgatggaacgggatctgatgtacagacaaatcgagttcaaatcataccgtgaagcattaacattgatcgaggccttgctcaaggaggtcaagcgattagacgacaaactaatcttgaccgagatccatctgcttgagtctcgagcaagttccgcaacagccaactgggctaaagcaaaggtttgtttcttctgcacaatctgtctccatccgatctctagtagtgaacagaattcttaccctcgcgctccactgtatatctaggcggctctgacggctgctcgaacggcagccaactcgatctactgccctcctcttcttcaggctcagcttgacatgcagagtggtatcttgcatgctgaggacaaagactataagaccgcgtccgttcctgttcctgtatctgaccctgtcactctgctgtatgccttctaacctatatacgtctgaaccgcctcaatccaggtactcatactttttcgagaccttcgaaggatactcggcggctgacgatgaccgagctctcaaggctctcaagtacatgttactttgtaaaatcatgctcaacctggttcgtattatctctgttacagaagaagagagaagtacccatacacaattctacatacttagacatctctgagttctttcttttcaaccacacaacagcctcaagatgttacatcacttatccagaccaagcttgcgcttaagtactcgggcaaggaggttgaggctatgaaggctatcgctcaggctcaccaaaaccgaagtttgggtgaatttgagcgcgctttgaaagaatggaaagatggtacgtagttctttgctagactctcttcctgtatcttttatttggacagaaaaatgttttctgattcaccgaaacgattgttgttatcttgtatttttttacaacagagttgtcgaatgatccaatcattcgatcacacttggccgctttgtatgacacactcctggagcagaacttagtgcgcatcatcgagccgtattcgagggttcagatcgcccacgtcgccgatcaggtcggccaacctgttcaggccgtagagactaagtgagctgtctctgtctgttgtctacgtccatatattatacactgtttcatcagtagatcatagactaacagattctgagctggttttgctcttgatcaccctgaaggcttagtcaaatgattctggacaaggtgttttttggtgtccttgatcagggagccggagcacttctcatctttgacgagccgaaagaggatgtacgtagtttttcttatcattatgtcttcgcttttctttaaccccaagtatttaccttggctaacacgagacattgcttgtgttaatagggaacatacaccgcaacattagagacaatgaagcatgtgggagacgtcgtagaatctttgtatgaaaaggttcgtcctctctgttctttccatgatcgtcctttcacaggtccgctggtgaatgctctttctgatcaccggtttaatttttgtaggcaacaaaattgtcatgagtgatgactttaggagtagaaaagggtggaaagggaaaaaagccagcagggccaagatcccgtctatatgtgttttttttttcatgtatcgttcgttcgttcttcaacaaaggcgcttaacgtcccttcgacaatgttattcgagagagggcaaaggacaagaacaaaagaaaaaccgaagacaaatgcatatagcaaaggtaagaaagataaacaaggaaacagatatattacagccagttagatcgagagaatgtttttcttctttattcttcttctatggatgagctggtgatgacggctctttaaggaatacctgttgatttgaagacatcacaaacagaaggcctgtcagcgtccgtgctacacaagaaagagaaagacagaaggtggcggtagaggtggcgcaagaacataccttgaaaccctcactgtagagaattggtttatcgaatagaagacatggttcaaaccaacaatcaataaccgtaactttcgagcgacgcacgtgggagcgaaaagaaaagaaagccgaaaaaagaaaaagatgagaattgaggaaaccactcactaagctagccaactgagcgcattactcggcacatatgtcactaccctaggagccaatcctctggagaaccctttgaggccttccctagcccagacgattcgaccggcttcaaagattccatttgcttttcggattcgttcgtctgctgacgttcctctagtttgcaatctacgatagacgaaatcgaaaaggaaatggtattggcaagcaaagagtgagagaagttaactgctgatttctggtgctgcgcttggagaagtggagtgggacgaacaatgttttgaggacatccaacggtgtgctgatagctgctgcgattgctccagccgctccaccagctatgatgtgtgttccaggcgagtaagatcctgaggggttgatcgtatccttcaagtactcataagcggtgaactggacggcagtaaatggaacggtcatcatgagcgtcgtcgggtaggaaacatagaaagcagagattccttcggctttgtagactgatcggaaggcgtggccgacgttcttgtaggttgatccacgaagctgcatacgctgcttgatcacatcgaacggattcatgagcgcatcggaagcgatcgtagcggccgctcctcctagagcggtagcggtgaactgatgacccggcctgtttccaccagccaaatccttcacaatctcgtaggttccgaaatatacggcgtgagccggtccagcgccaaggatgaccgagttgacacctttccagagagttttcagtccctcagtggcggacactcgggctatcgagcttgagagcgtattatatgctgtcgaggccgaggcgacagagggaaggatctgcattcgggtctagaggatgataggaaaaccgaacaacatacaatgcatatacgaggttggcgactatctgataacaaagattgttctagcgcggtagagtagaaacgagcttcataccttgatggagtctatcggaaacatcacagcgtgctccgaaattcctgcctattatcgttgaagggaaccagtcgatcaaccgattcattgatttcagcatacacaagatgttcagtacttttgtaagggatcggcatgctggctggttccgtctatctcagacttatcgaagaaaaaaaaagttatatttaccaaagcgcctgcggccatgttcacacccaatccagctcctatcggaagagcttcgtagtcctctacttttaatcaaggtggcatcaaaagaagaccaagcccgatccaacattctagtcagcgctcagagtatcgaatacggtagaaacaaccagaacgtcggagggcaagtgttcatggagagagacgaaccgacgtgttcactgatgatgggctcgctcatgttgaatcgaaagagaatgtgagataggtgggagatattttgaggtgtttcgggcaattgttttcacacgcgtacacgcttgaacgaggaaagatggctaaggaggcaagggcggatagggtataactaaaagattcaagtctatcaagacgagacaaaactgaacgaatgggaggggatcagctatgtttttttctctctttcttttccacttcataacccggagtcacagagaagttcaaagatcggatgtaaacgcttggtcggacttgagatgtcaacgaacgaaatgccagaccagaaggcgaaaggaaggacgggtagaacggagggggcggagacccgattgaagcggatgtggtccagccatcgcgcctttgaaggtgaacatagacccatcctcaatctaacagcgagtgggccaccacggcgaatgaacccatcaactccaccaagggaggaagaagactctgttggctgtcatcaagaagacagatatatgatttgtgtttccggtggcgacaagcaaagagagcctcgtagcgtgcgacgacaagccagatttgggacatccgaaagtgatgatgctgaaccaaagcggtcggctgattgacctctgcgtgcctagtctgtacatccgtctcaacggtccatcgtccccatcgttctctttgttccacagaccgacatctcgtttgatagctcaatccaagtaccttccatccggaagagacgtgactgccacaccgaaatgaagagcaagagaaaagccaagacgagagagaaggagaaatagaggaggaaaaaaataccacgcacctaggattgagatcagcaacaaaggaagcgatagacgaaaggcagctcttaatctggtgaacagaggaatcggttggagcaagcgatataggaaggcctgttactggaagaatagataccgacaaccagaggaaacaacgaccgaatggtagtgtgagaaaggaaaaaggaaacgttgagggaaaaaaggttgacgtcgtcggatggttggccaatttcggaggatcatcgcctctatattttctattattttatataattttattcatttactttcacctccacatgctcagtactctgccgttttgtatgcctcctacacccagatctggtcgagaattcatgttatctgacgtccgtaggatcacaatgcacgatagagtgtcaatctggaagtgcaaggcctttttccgtcggagaggagaaaatttctttgatctaattcttttgcttttttctaacgactgttgaccatcatactcattcgtctccagagggtcccttgcttccgggtccactgtgcctgcccattccaggcataaccttttttacatggtaagggaggagatcgttgagtactgatttgcaagatgagtttagagagatagaaagagagagaaactgaccatagtaggaggaagtgtagtgatcggaggcaacaagctagcgactgaagttcttccggcctgaatcagcagagcatccatcacagccatggcggccatagactcaacaatggggacagccctgaataccagataaatcatgcgacgtcaggagaagattcaatcaaagccaatgatacggagacttgtgtaaattggatcaaagagataggagaacaagaaaaaaccaacctgggcacgacgcaaggatcatgtcgacccttggcctccaaaacaccagcagtaccgtcgtatcgggcggtctgctgagcctgagagatagtcgcaggaggcttgaaaccaaccctacagatgaacggcacgtaacaagatcatgatcagtatgcatacatgaatgctgagcttagccaaaacgatctgagatacggacctgaagtagatatcctctccgttagtgatacctccttggatacctccagaccagttggtgaccgttctgtacaaagagacagaagcaagagattgtgaatatttctgttcgaggtcagagcaaggaacagaaaagacaaaccggagcattccatcggcaccctcagcgaacatatcgttgtggttgctacctcggacctcggttcctcggaatccagatccaatctcgaaagccttggtggaaggaatggagagcatggcatgggcgagcaaagcctccatcttgtcaaagcagggctctcccagctagatgtgacagcaattacgaatcgaacagaactcagcaaactcaaccagactggataagaaatacatagagcgaaagaagaagggcgtacaccagctggcacacctctgatgacacaggtcaccgttccgcccaacgaatccatgttggcctttgccttcctgacggcctcctccatctttgcggaaatttccttgttggggcatcggacgatctccttgtcgacctcttctcgggtaacagtcttaagcaagttcatgaactcttcagagagcggaacctcgtcggtatcctcaccggcgttggcggagggagcgtcgaacgagggaaggtgaaccttgcccacagacgatacgaaggcgacgatagagatattgtgagcggcggcaaggtacttttcagcgatggctccagcggcgactcggcctagttttcgatgaaggacgttttttttcaaataaaaatttcgatgacgtggtgagtcataggcagcaaaagacagacgatagaagacaaataagagaacagaccaatggtctctcgggcactgcttcgtcctcctccactagaagccttgattccgtactttgcgaggtaggtccaatcagcgtgactgggtcgagggtagagatcagtctcggcgtaatcatgaggtcgctgatctttgttctggacgagaagaccgatgggcgttccgagcgtcactccgttctcgacaccggactggattcgaacgagatcaaactcgtttcgctaacaaagttgtattaaggtatttagtatggaggttagaaggagcaatggagagagtgatagaaggaaaaaaaattattgaagagaatgttcaccaaaaaaaaatggtcagccttctggagggctcagaaagagaaaaggagctgaacgaacaggggtagagatatcactctgtccgggtctccttcgagaaagctggatctggatatcttcggcggtgagggtaagaccctatgaatgaagacattgaacgtttgcgcaacccgagagatcattgagagagacaacaagagtacagtcgatcggtgatcagtagcagaagaagagcgaaggttgatcgaaatcacagtaaaagacaagactcaccggagggacaccatcgacaatggcaccgaccgaggcgcagtgggactctccgtaggtatgaactctgtactgggatccgaacgtggacattgtgtgtgtatatgtgagctagtagcgagctgcttcaaagggattgggatctgagggatgatgttcgggctgaaagagcggaagggaaagttggaaaatgaaaaagaggcagcgtatgaagatcgcttacgtaagctcgtattccccagcagacaagatcttcatccatcagctagctaccccgctaccagccgactagccagctaccaatttgccatccgacaacaccagagacatcatggcctccagctcagcaacccttctgttgcctccgagaccgcagattgaacactcctggacaccctcagcgtatactcagccggcgaagcctccaccgcaggacgagcgagctcagagcgcgtttcaagcagagaccgcgttccgagcagcaaactcggatggcttcaacaaccacagagatcactcgaacgggccgaaaaaacttcgagcaagaaggacgattgattactttggagagtttgcaaaatggtcaacggtttgtttggatctttctgttctcttcgttcgctcttttgcatgcatcagggaaggatcggctgttctgctctgttggaaaccatgcacaatggataatcctgacgttggaatgatgttggatttaatcaggttcgaaagattcgaccaaacccacattacaccccttactcacgtccagatcccgaatttataatagatgtgtgtatctatttgcgtctattcttgccattgtttccatcaacgcgctcgtcttgcatactgatcaagtctcgttgggtttcgctcaaacgtttcacaaaaagcttcttccgccagcagcgtactctgggaactcatcgacctcgctttgtgaaaagttcgttcattctagtgtgaacaagattcggagtccagtgaatgtcgtcaaggttagtcgttcctttttgtggtgtccatcggctgggtggtctgcttttgcagagagtatggattcatatctgatccatttccacttgctcgtctctttctgcggtcgaccgtttcgattgcccataaattagtggacaccagaaggacgtcgtgtactgacaggtgcacagagcggagagttcacgttatggaacggtctagccttcaatttcgagacgattcttcaagcacacgatacacccattcgagctgtcgcttggtcccactcgtctcggtatcttctttcgtccgaggattccggccagatcaagtatttccagtcaaacatgaataatcttgccgctcttcctggacatgccgggcattcatgccgaggtttggcctttgcggctggtgacgaaaagtttgtaagcgccggtgacgatggttatatccgaatctgggctttcgaggagaggaggcaagagagaggctggcgaggttggttttactgtctcgtttcaagtctttctttctcgtctattttgtttctgatgtcctctttctcgattacacacaggtcacggacaggacgtacgttgtgtagattggcatcctacaaaaggactgatcgtgtctggctcgacggacgacaaggtttccttctgggatcctagatcaggccaggctttagcatcgtatgtctcttccagtttcttttctctttctcttaaaaacagacaaagaagggaaagatcgaagaggaaaagaaagaaaagacgtttattgacactcgcccatatcgctcttagttatcttcataagaactctgtactagcttgtcagtggaacccgaacggaaacttagtagccaccgcgtcaagggacaccagtgtccgtgtatttgatatccggacgttcaaggaactcgaggtcttccaggggcacaagaaggacgtcgcttgtaagtggtaacgttgagaaacttccttcaaagtgttcttcctttgagacagtagatgagttgaccgagatctctttcttctcatcttgaagccctggcgtggcatccaatccatcacgatctgttggcatctggtgattttggaggaacgattcttcagtggacactttcccacccccagccgcgagtgacgatcgagaacgcgcacgattcgcaggtgtggtctctcgattggcatccgctcggtcattgtctcgcttccggctcgaacgattataccacccgtttctggtgtaggtctcgaccggccgatgaagatccgagtaacggacaggcagcaggctacggaggaggtggaggcctgggtggaggagcttacaacagagtgttggcttcagaggcggcggctgagaaggtcaaacggatggcggaagaagccagagcaaagatagcggctgctaaactcgaacaacgtatgttttctttcctcatattgtttgtctgtactgttccggtttgatgtcacattgaactgacagagatcatgttggttgacatggaccatactaaatgcatacacacagacgaagtattctcactgccgggactttcctcttcaggccataactctgcctatcctccgttacccagtacattccctccagggttcaaccagatgaacacgggcgagcccgaatctctgcccgggttcggtgctccttcgggtgatgctcttagcgccggtggaggaagaagggagattgattattcaatcggtggaacttcatggagtcaacagcaacagcagcgacagaaacctgccggcttcccacaagcccataatcagggtcgacagcaaggattcaacaacttttctggtggaaacaatatcggcggaaacaactacgctaaccaacccccaccaccacaatcgaccaccggtggtagcggcggctttgggaccgctaagggtgggttcgaacagacatttaacccgaactacagaccgaataacaatcctaatctgggcgtcaacaacaatggcgccaaccaaggatacccgccaggaccaggtttcaatcccaactcgaatcccaacaatccattggctggaggaggagcaggtggtatgttgccttacggaggtaaccgaaaacctgggcctggcccgggtcagaatcagaatcaaaaccaagcctcgggaacagggatgggaatgaatgcaggatgggattcatcgactaacaatggccctaacaatgcatttaacaacgctcccaacagcacattgaacaatggttctaatttcaacaacaatttcaacaacaacaacaacagaaggggaggaccaaatgggctcgggaacggaaatggggctggcttcggaactagagggagaggtcaaagaggaaggggcagagggcgaggtaattggggtggaggagagtaggaagcacactgatggtcgagaggaaagtaaagaggagagctcttagaacgaaacattgtttttagtattcatgtactttattctcattctcgctttccattttctttggcgtaaaacttgagacctcgaaaccaagaagacacggatgccaaatcgagttttcctgattttttgattccaattcttgttattgatacaaaatgtatatcgtttcgttccatttgtccttttttcttccttctccttttcttcttctttccctattctctctacgttgtagaggcgtcgacctaagtctactgcccgaacgatcctccggcctgagctgcaccacccatggtctgcattcgctctccgacctgattgattcgagtgaatatagaaaaagtgggaaatgagaaagagggccgagcatgttgatcgatctagaactggagtgagaatgtggacatacctttgcgttgacctcaaagaactttgcaacgcatctgtggagggagagaaaaggaagaaatgagtattcggtagaaaaatatagagaaaagaaacgacagagaaagagctcaccgatcgatacacacaccctcacccttgttgagatcgggctcggcgtacttttccgagatgcatttactgtggcaggacctggagaagaggaagggaagaatggttaaggtcctatcggaagacgtacgatactaagtacatgcacacacctgacgatacgatcaaagatgtcagagatcatactgagctctgcctctgccatctcaatctgctgagggttgatggacccactgggggctagagagcaagcagagagtaaggagagacaagagatgagagtaattagctgatagaagccaggatgtcgcttgaaagttggccaaagctgagggtttgcaaatgtaagaggagaaaaaaagaagggagagaacatagagaagaaagccaagacacaccctgaggagctcgaccaaagaaagactgctcaaagttgtgaagtccctcatatcagtaaaaggactggaggaaggcaaaggagatcggagactgtaccattgctagtttaggatgaggacgtagggtgagggtgtatggtttgaaaggatgagcaagcgagttgaccgtctggatggcacaggcggacagagtcacacggggaagggggatggagcacggaggaacggcggcacgtggtccaactggtaacttttgggtgcatgcacagctttcgtgcctgaaaacattactctgccgccctcgagagccctgattactgctcttgttcctgactatattcccgttcctgtgcctgatcacacctcaagtcacacccacatggttacgccctcgataaggctccctgtcgtctcttttctcccaacatccagacatacactctcacatcctccctcgttcatcctcgtcagcctatcgtttgaatctcctggatcctcatcaaccttgtcgtcctcgtcgtggctgtcgtaatcatcttcgccgtcgtttgcatcttgtttataagctcgtccgaccgctggccttttcgccccgttggcccttctgtgttcaaactcttggcctcatctctttttcctcaacaatctcgttcaaccctttttttcctccctcttgccttcaatcacccaaggtctccctcgtctacttttcttctctctttctctctcactctcctttccggcataggctccttcgttcttgacttggctctcggctctccctcaataattctttccatcgcaaaagagagagaaacatacacacacacacccctcacacacgcagataaaagcgcatattcgatcttctaaacatctagactcgttatgaaaggactcaagaaagcgatggtcagtcctcatctctctcttcatctgtctacaccatctccgtcaggcctctcgccgaaagaagtcacctgtaaggaaggacagaaaaaaagtagagaagagaagagaaaaaaatatacgagttccaagaaagatcaactctctccccttttcttctcatccgctcttccccatcgctccatcttcacggaagccttgtgcttgtttcattcttgacatcgattcctacacgtcttgccttcttcttctccttcttctttcagagcgagacgttcatctgactgacccgatcttttgtttcttctgccttcgctgcctgtgctgtccttcctctccctctccctctccctctccctcctccacccgtgctcatttaaccactcacccttagctctcacggagcaagagttcgacgagtgattcaaaaaagaatgccgtgcctgccaccacctctacctcatccttccaggctgctccctcaaacggcacaaaatcacagacgatcccgatcaacacgtccaactcgaccccggcccaaacatcgctctcgaacctcgtcggggcaacaagcctgtcgtcttccccagccaatagatcatctccgtcgtctccaaaccagtcaacacctctcacccctgacagaaagatgcagccatcccacggaccggacaagacctcgcctgccccgcccgtcgttgtcacagcgatggagatgccacaggatccgcttgttccccacggatccggcgcccgatcaatgtctcccggagccgacttggaggctactcccccaaaaagtggtgcgttgggaagactaagaaatggtgtaggcccaaaggacatgatccctgtgatcggcggcaaggcacccagaaagcaacggagcagttggttccattcggcagaacgagttgaattggaacaactccctggtttccacggtacgttcaggagtatttctccagtgttgtttctatcattctccccttctcttcttcttcctcttcctttttctcaaattctcttctctttcttccctctctgttacattcctacccaaacacacatgctcacacattctttcttcttggtcgtactcaaacagaggtcccggctggcgagcgatccgagttgtttatccacaaacttcagcaatgctcggtcgtcttcaatttcaacgatcccaatggcgatctccaaggaaaagaaatcaagggtcaaactctccacgagctcctcgagtatatcaccaccaccagaggtcaaattgccgaagagatctatcctgaggtcgtctccatggtaagttcaattcactctcatgtcttctcttccttgacatccaccgttgacttcgttccgtctgtctttcagtttgcatcgaatctgttccgttcaatcccacctcaggtgaatccgacaggcgacgcattcgacccagaagaagacgagcccgtactcgaactagcttggccccatcttcagatcgtctatgaattcttccttcgctttgtagagtccccagatttcaacaccaacaccgccaaaaagtacattgaccagtccttcgtcctccaggttcgtctccgtttttcttttcttgatccgtgtgtgaacgttcaagttcgtgtacacgtcagccagaataatcaggctaattgattcatgggtgtatgcgtccgtctacctggctattctagctcttggatttattcgacagtgaagatccccgagaaagagattttctcaagacgacgctgcaccgaatttatggaaagtttcttaatctacgagccttcatccgtcggtccatcaacaacgtcttttttgccttcatatacgagactgagcgacacaacgggattgccgagctactcgagattcttggttctatcatcaatggtttcgcccttccactcaaggaggaacacaaaacgttcctcactagggtactcatcccgctacacaaagcaaagtccctcgcactctaccatccccagctggcgtactgtgttgttcagttcctcgagaaggacgcgacgttgactgaagaagtcctactcggtctcttaaggtattggccgaaagtcaactccccgaaagaggtcatgttccttaacgaggttgaagagatccttgacgtcatcgaggctgttgaattccaaaagatccaaatcccgttgttccagcagctcgcccgatgtgtaaactctcaacatttccaggtggccgaacgtgcgctttattattggaacaacgagtacatcgtcaacctcatgggtgacaacatctcggtcatcctccctatcgtcttccccgcgctctaccaaaactcgaaatctcattggaaccggtgagtgataagagattctgatttattcgtttacatttagcgttcagctctactcaccaccatttggccttttctttctatgtaaccagtactattcatggcatggtctataacgctctgaaactgttcatggagatcaatccgacgctgttcaatcagtgctctgaaaatttcaagatcgcccgtcaacagtgagttcctatcgtagtctactaattcaatctacgcttttcatctcaatcgctgaccccatatgaccttttgcagagaacggaaaaagatacagaccagatatgatgaatgggagtctctccgagacgccgctattcaaaatagggaagcttcaggcgcgaccggtccgctaccgaaagcgttgacagcgccggctcctcccagaccggcaccagcagaggaagaagatatgacagacgtctcgatggaacttcagaacaatatcggtatggattctttcgccagtgacggtggtttgggaggtgccccattccaattggaatctatccctgtcgaccgaacggagatggtcccgcagggtgagcacgaggattttggattatcaccgacgacagcagctgcagcggcctcgacgagtcccggtggtccgcacgtgcgtagaaaaagcgccttgccccgtatgtacctcctttttgcccgtctcgatcgtactgttccagtttgtgactgactagaaatgcttcccactttgactttcccagttgaccctcaagtcttacgtgacttgagagcccatcggtctctcgagaatgatttaggtgcacctgttcgaactcttagtgataattaatcgcctgaggggggtcttgtccctttcttcttgtggtacctcgacacttttccttctcagagtccctgatctttttgttttatcctttctcaatcaaattccccgtcgtccttccgggtcggctttgtctgcttttcgtaatatctcttccttctttcattcttgatcaatcttgccgccggcctgtttgtttatgctcgtgtctatagccccaatatgtttcatcactttcttctctccgtgtgtgttccttctcacatcccgttttttttttacttttctttcgccttttgacaatccaacgtttacgctctatcgtttggtcaatcgccggcagagtgaaccgctctgtagcccatctattcgttctttttctcctctgtttctatctccttttctctggccctggatctctgctgttttctggagttcaaagctgaaagagaaaagtctcgaaatctcaaatttccccgttctaatctcataatacctcttccttcctcccgccttctcttttgtcttcatctttatctctgttttgcatctccccctcttctgaacccctttcttttctgttcactcttgacttttcttctttaacttcatcacttcactttccttttctcccgagttcatgatggctctcattcggcttctttactttggtccgtttttggaagatataagattccttttttgtatactccttctgcgttttcacttttgtgtgtctgtttgaccggctagttttgagtgtttctcatcatctgtgccatcaggtggtctttcccaggtagatcattggagctgacagtcagactggcattcaactcaaacttcaactctttacccagacgcaaacatagatatgaccatggacatcgactgttctctttacacctcttccttttcatctatctattaaaaaattgctctgaaactttcttttgttccctggtctgatctgatctgatgttggccgttctattgtaatgtactcgtttcgttccaccccggctttcggaaattcgaatccgggttccgatcttacgcagccgatacatcttagatatctagtttcacatccgagacattcgaaccgcccggggggtcaataaatctacgaaagcggagaagggaaagggatcaagtatctggaagatgggtgggtgaacggaggttagtccagctcagggagaagatcccgagcccatcggatgactttgggatgtgcgcggactctgtcgaattttggatgttcaattagttatccgaaggaaagtaccttgaatgggtaaaaagaaacggagaggacgggaaagaaagcgaacgtacttgtcaatgttgaaattcagcacctgaggaaatcgagccagatcaagtcatcagacacccgttagtgatcggtcccgaaagtcttcgatctcgatcttctacaggataaacaaaggatcagaaggacaagaaagaaaggaaactgacttgtaaacgctgtagagagacgcatctgcttataccgacgtacgcctgccctttctcaaacgtcctgtccaggtcaatctttagatctgtcaatgtcattccttgacttttgtggattgagagcgcccatccttcagtttttccgatcgagcgcagaaaaggaaaagacgtataaacaaaaagaagcagagagttcacgtattggagttagggttagggttggtacttatatagatgtagttgaagtttcttgcactcaccgagcatcagagggatttggactcttgtggcctcaacataagtccgcccactcggcccaaagctcgattgttcctcgaaccggaatgaaggaatcagcagtgtttctgtgtcaaactatcattttaaattagaaagaaaacatggtcactcagtttctaaaacacccatttgtcatcccttcagacgaagtttcacttgaattaaagttaggctcaccttgatgaccggaaatactttgggtacctttccgacagttggaaggggcaccgttatttccaatggatctctgccatcggatcctcggatggtctgctcagcaatccttatgtttttccgacgggcagtttctaggttcagaaactgaaccacggagcctgtagagccattgaccaagttagggtgatctttcctatatcgcgcatgcgcggtaagaaaaaagaaaggaaaaaggcaagacagatatcagtcgaaagctcgtgagcgttcgggcttgtggtaaacatcctaacccaaggttcactagaagcatcactctcgctccgactttcaactcgactgtatcagccgccctacaagctcttaatgctattcgaacccgctcaggttcgaccttctttcccgatggagtacagcctggatagtcaatcgccggatatttgatcagggctcccgttaaggaacctaagcggagagtgttcgcccgagtgacttgagaacgggtgggatacctaattagattgcggtattgttagatctactcatcattcgcccgttctatagaggaataagaagacacacagttctgtcaatgctcggccttcaggcgctctagaaagtcctgtgagtaactttatgctgttctcatcaagccgatcaatccgcatttggtcttcaaatcaaagaagaaggatgtcaagtcacagcgtttgtcgcgtagttcaccgatctcacagtaaggcaggtaaacaccgtcagactcactcagcacgttgacaaagttctcgtctttttgtctaaatactttcttcagcataacaacgttgttcacacattcactccaagagctagcttcaaacgcgaacgtcgcattctgtcctttgttagctacaggaggaagctgaaagaagtcacccaacagaaccagctgaagggaaaacaatagaattggtcgtcagttcaacgttgaagtttgaaactgataagacaacagagttttcgatacctgtatgcctccctaaaagttttattatgccccggtcaaaaacgacaaaaagatgatgttcaagcttgcggatcaatatctcgctctcagcgagcgcgtattcaaacatgcgccgatcaagatgatcaagtggagcactcacgaagggattctcattctttcgtgcgtttctagctatatactcaagcttgtcgaactgaagtcaaagtatccttgcccagggaatgaatagaagagactacgagtaggattcggataagtttagtcacataccagtaccccatccaacatgctcagttcgtcctgatgtaagcgccaaaccgaaaataaaaacaactttgtcagggccctaaagcacacgcgacctttcagatatacaatcatgcactcactatgacaagaatatcaacctctctccaacggtctagcgcaaaacttgttattggcggatttctctctacccatgtaccttgatccttgtcccatgtcaacttggcaattgctcgatacagagcttcagcaggcagttgaccttgaccaatacctgcccatgagtgaatagtttgacctggagaagaacgggttgggagggtttgagtgaagattttattaaaagccaacagaacaaatgtttttggacgaaccttgaagtggaagagcagcaattccagtcgtagcagtgatggctgcaatgaaatgcattaatcaacagaggacactcagctgttcagcaagaagaagcctgatgaagcggtatctttctgatcttcttgcatcggagaagtgaaaatctgattacatacctatcgattgcccacgatcttgaagctgtcggataatctctttcaaaaggaatgactttcctgtacctataatccaagatgtagacaaacattaacgatgttgaacgaaactgtgacgaattcaaagtccaacaaggattgctaaaaagatgcacgcacctgccggtcccgaaaaaaatactgattctccgtccaatactaatcgaagtacatcgcgctgctcagaacttagtttgctttgcagcgcttccgattcatctgtcaaggtaaggtcgcacaaagacaaggaaggcgaaggagaaagctcataggtagctgatgttgaggagattatcggctcgaaagaggatgaaggtatgggtagacttgacgatgaagatgtctgatgagatttgcgaaacaacgaagaagcggaccatagcatatgttatcaagtatcaagtcgctcgtcgatgaaaggagtctcctcactgtttggatatcataagagcttattctagtcaagcttgaagtatctttgtgcgtagacgacgaagggttcgtcagatatatagaagacggaggctcctcctcatctatgggaccattcgattggcttctctcgtttctcttccttcgaagcgtctctgtacccttccggcttgtcttggcagcgtcagacttttgacgaggcgtgacagtgttgggttccatatttaaagcgagttccaaaaacgaggatatgagcgtagaataggtggaagaaattcgttccaccggctgtgaggacaaaggggtggagtgaaaggagctgcccattgtctgagctgagctgggtaagctgcttgatggcttttggttcaagtaaagaacaacggaacgaaacatcagtcataatatatgcatatgaagtgaatcatatctctacactcacaggttgatcgtattgggacatgagcagttcgatctcctcgctctccaggtcatcaaactcgtcgtcagagtcgatcgcatcatcggtgatttttaacttgtctgactggtccactgaccgacattctttcgaattagttgtgcgagtgagagattcagttgaattaaggacgacaggtagtcggtctgtctttggtatcacaggaaccctcaaggattgtttgtgagctgccatttgaaaaagaggagaggactcgatggacgatgatgatggatacaagaaatataaatcaggcacgtcgtaatcttatctacacaagtggagattatttcttcggacgcgtttgcgtgcgtatgtagaagtgaattatgcccatcaccaccatcaatgtctacatacgaaggtatccttccttgacttcgtttctttgtcgtgtcttattgttactgatgaactgtttgttttcatgatcagacgatcatccaagtactgccaatccggagatagagagtccagggttctctttagatgatattctggacgagctccaggcgacgggaggagaaggcatcttcttagttgattctcaaggtctgtcatacagcaatctgcgaccaggaacaccttccacggtagatagctcatcaaggacatgcttgtgtacgtaccgattcttgttcttagggcgaagaatcgtcggagaaggtctggtggaagcaatggctggtacgcttggaaggtaaggttgtagtctatcattcgtccatgccagatccattgcctcaagcctcttggtcatcatatacagaattcatggtggagcttccgacaagtatatatcatccctaccatcgcttaccagtcaagatatatcaagcacaacgggtttgttcgagacaatctcagttgtctacccgtcgacgccgaactgattgtattctcgtttttcttaatgtagacgatgcctgtgcaatttgccaaacgccgtataaaatcttacttcacgagtatgtagtttccaaacatgtatcattcgttacaagcagaagcccgaactagattctctgtgaaaaacatgtcaacccgatgtcgatcatcatatttcctcttgattataaaactcagagaagagcttaatctagcacttgattcaccggccgtgtcaaccgataatcttggaattgtacaaattggatcggagtgccgtcatttcttctgtagaagagacgccgctcaatggctagcaaaagtgatttgaactttcttgttctacttactcgaacccaacgtgttgtttaattactatttgcttctcttttctgacaaacagtccaattcatgtcctctctgcaggaaaaaatgcgatctatcggtcgaaactccatccacatcctccacaacgggtaccccaggtacagctcctcctaacgtcttgccggccgatcctcgtcaagaagcacaagatcttttagcttcgcttttttctggtagcttttcaactcccgcgccgcctacagatgcttctgcagctagggaagaggaagacacaagttttatgtcgatgtatggttagggagaggtttaaaccgtgacagtaggagcttgatccgtgatgtatggttactttgtaatcgactgtctgtattatgtgaatgagaaatcagacagaagaatccagacctgccttgaagaagcttaaggggggaaaggattacgcatacacccgcccagaagattggcttaatcacaaacaagacatgaaactgagagatgaaaaaatgtcataacagtacggaaaaaatatgaaattgaagtaaggtcgtgaaacaagaacacacaagcgtaggtagacgttaatgtggtgattaggaggagaatacaagcatacagaacataagtcatgaacggtcaagaaaaacaagacgaagggaaggaagaaagacaagcacggctggactagcacaacagaaaggaacacagaaagaagaaaaaaaacacgataagacactacatcataacatctaattctttggtaggaccatcgtctcccaataaggtctccatgcttgaatcggcctcgtcatgaaacgacttgtcctcttcgggcgctgttccgcttggctgaaagactgagtgaggagacagagacttaatagtactagatgtggataccaatccatcggagattgagaggttgctgtctctttcgtcagaagatgagacgcgcgtaggggatgtggcttggtcaacatccgatgaatacttcgagaaatttgtgaggatctcagaagaggaactgcacaatggaagccgccccggtacaaaaggtcttggatccgagctcgcgctaagcatatctttgtggattggagctgaaagtccagcaccaggcgcagactcatcctcatttgtcagagaagatgcattggaaaaggagctttgttgcgatgagagacgttggatagaggatggggggaaagctagaggtcggagaatgggattgtcgtcttgcactactgtgtcaatgatatccgacggctattgagaaaagtgaaagaagaaacatgataggagattagcgcatgatgaaacaataccttctcttttcggccgatacatgaacaacatactagaggagagcaaacgtgattgaattttttcgaatgacctatcaaaagattatcacagacaagcaaaggacgacacagattagtagcaggaagatgaacttgaaaaagccgtggcagattcacctgcattgccctgtctaaagcactgccttccattcttgcaatctggtttctctcgaacagccttttcgagctcttcgaatactgtaggtctcaaacgcgcccaccattcgtatagaccacatctaagacatcggaaagaaacatacgttaaggacgtaccagcctcaagcatgctcaaagacaagtgatgctcacgcgattaagtcatccacacagctttggcaagtcctgacaattgacttgtcctcggacagatttgaatggattccttcatcaactcgacggaagatacctctgatgcctcctgaatctttaccctgatcgctccgaagccacgctagaatgtcagaatggacacgggcgggtgtgatagacggtgtgtccgatatatactctgcatagaagactggtgtcagttgggacacaaatgtgtacttgaccttgtagaataaaaaatactaacctcccaaaattcttaattcctctagataaagagttccaaaaggcgaaaagttcagtcaacaatccgtccaaatattgaagatgtaagatgacaaattggaacaaacctgtgttatctctaaatgcgttcaatagctcgtcactctgaggatcaaatattccatccgcaaatgagtggttatctctgccccaagaagagccaggactagacattgaaagcaatgaaggtgagcaacttcgggaagagccgcaatacctagaagataagaaaaaagctgggcatcaacatggttctggtcaacttgacgatacgtgtgacttacccgtcttcgcaaattgaacactgcgcggcaacaggagagccagtggctgtcagtcgggagcacgaagagcacgtgaagtgtccgtcaggacacgctataagggagaaatcatcagaaacaggaacggcggatgaaagaagaaaactgaaatataactgacgtccgtctagaggatacagttgtccgcctgaatcgatggtagatatcttgacgaaattcgagaagggagatgagctgagccggatcaagtcgatcatcgaagagtgcgtacgtacaggtaccggacaggcccaaccatacggattgttaggcatacagtatctgcaaggcctataaatctcggtcggccgatgaacggaaaatggagaaggagggcatccaaactgaaaagagtcaaacgatcagtatgcgctcgatcttttaatctcaaataatgagcagacgcactccaaagatatctccatgtttccatatctgatcggcctggtccatttcgttttgagttctagccttctcaggcgcatgtctataaagagaatagaaatacacaagtcggttcatcaccccagctgacaaacgagattgataggtgaaggtactaacgtaactaagacgtttactagacctgatagaacacgagagaatgtggctgagctggctgccgtccgacaagaaggacagctgtaaggagtcggctgggtagactttgttttgccatataatagagtgtgtaaatgagccatcgattatatgcggtcaatatgtcaattaatcctgaggtgaccgaccttcaagtatgagcagagacaagaagaacagaaggcatggccacaagggtgaattgtgaccggcttgaatgaatgacatcaaattagtgatcagtccaagttgagattgttacatgatgaaatgctttcatgcgatccggagttggctgcctattgccaggatcggtatccggtccttgagagatgactcgcttactttgtataggatagcagcacagattccacaccagagctcgctttcaacgtcttcaatgaacttgtggtactttgagtgttccggaggttgatcctgagcgatggtaggatgttcctggacaaaatttgtcttctcggcgttgttcacgataaaagtggcctttcctttccccttgtcctttgcgctgttgctactaatcgatgcatccagctcattctcgatactatcagccttgataccagaacaaccttcttctctgctgcagaccgacaagtcagaggtcgaggactgagaaggtttgagcttcttgagctcggattcggaggatgactcgtctgcgctagttcgagcgaagggtgacaagacgactgccgataagccgacaaaatcttggtctaacggccgcttgagctcaagaggcatggtaagaggatataagagcgcaaagcgaatgagtatagaggggtgcgtggatgagtgagtctgtatgtacaggacggatagtccaagacaagaggttggagagagatggatgtcaaggataaaaaagggtggtaagaggtgaacaaagagactgtctctgaatgaatcgagtgccgggttgagatggttatcgccactggggatttcggctcaaaaaggggtaaccgtcccaggcgtttcacccggcacctacatcccggccgccaacccagtttaccagccagacgtattggatctgattcttgatatccttctcttgagcatctcggtttctgatagataaatacaaacacaaacgccagctatatcatggctccatctacacagcttcaaccaccgtcaataagccatagatcatcttctcagaccgcgtctcgaaatcccatctctcttcgactttacaaagtcctcgcttcctcattcgatgatccatcttccagggaagctttagaggctgtatcctcttactacaatgtcccagcaccctctcaaaaaagttcctcgatagcagacgggtctcttgttgctagcgaaggagagataggcccagatggggtcgtcgaaggagctgcagctcgggctcgaaaaggtcttcgcagggacggagagctccggttggcagaaggcagcaaaaagttcctcgacgcatttggagaggtcgaccaggttagtttggaactatttgtgctcatttcgggacattgattagtgattgttggtcgtcactttgatattcacgtccttcccgctctgtcttcaacacaatcaatggatgtagaaactagatgctttgcagcgacatatattagagatgcatactcgttgcgatgatgtacaagccaagttggaagatgctagcagtggaacacaattccttttggagcgtgctgaaggcctgagggagcagaggtatcttctttcttgttcattttttttccttttcaacagaggagaatgtaccaacacccttcacattacttttacctctagagcgacgacccaacttcgatcgacaatcatcaatcttttcctttcacgttttacgctctctcattcagaaatcgaaaccctcacgtctagagatgttcctcttggtcccagcctgttcctcgcgatggatcgagccctcagtatcaggaaggactgtcagtcgctattaagcggcgagggaagcgggacgacggccgggtcagtcaaccttttctgcttgtgttaggcaacgagctcaagcttatcaagattttgtaacaccaaaatgaactagtgaggatattatgaaatccacgtcgcaatacctcgaggcagcctaccataagatctttagatgggtcacgtgggagttcagacagttcgtgcgtgaggctcaactcgaggttggccaaactcttcgagaagctgtgaagagattacgtgaccgaaaagtcctgcttgagtgagtaccttgtagcttcaagattcgatttggaaatgttcaagttacacgactgaaccttgacgcggtctgctctctctagtgaggcactgttgactctaagcacgcttcgacagtcatctcttctggcattgttcactgaggctttgacccggggaggaccctcagggctgcctcgaccaatcgaactccacgcgcacgatcctcaacgatatgtgggcgacatgctcgcttggatccatcagtcaaccgcaaatgagcgggaatttctcgagagtttgtttggggttggacgggacggacggatgattggaagtacgagagcgccaaacggaaatgtaggaggagatgaggaacggctagtgaggacgatgctggatagagatatggaaagttgctgtcggccgttgagggtgagtgtgtctcccccagatttacttctgacaagacttctcatctgatcagattgcttcgtttggatgcgtcaatcagattcggatccaacacgccatcaaatcccaagagggagtcatcacgtcctacaaagtcgtcaaccttctccaattctatttagtcactatgaagcgaacgctaggagatgatgctttgctgacaaagacgctggaggacatttttaaagtgtcttacaaatcgttctttgacactctggatgcaagaggacggtccctcctgcgattccttcatgtgagttgatatgtctctaacttgcaaaggtcctctgctcaacatttcacgtctcacatcttggttattgactctcacaggccccagacgccgatttgtcgccgcctccggctctccggaacgcgacacaggttttaagagaaattatgtcagtgtacgaatcaaatctgctggatgtgttgccagaacaatcgtctctatcgaaagagaacggagtggatgaggatgagacggactttgagaggattctcgatgccgctgtcgatccacctttggagatgtgcaaacggatggccgataggaggacacctgcgccagggcagaccgatcgtgatgtcgagtgggacaaggctgtcttccttatcaactgtgttggatatctcgaggttggttcctccttcgttttctgtatgcgcgtccgataggcgagagctcacgatcgattgtccaaaaccctccaaattatacagcacgtgttggagtctttcagctttacgacagctcgagtcaagctattacaaaaccagatggaaagacatatcaagtatttaacggacgaacacgtaggtccttacacattcatttatcatattgccctcccagaaaaagaacgaaaagaaaaaatatgagatttctgacaataaatccggttatacatcagtttgagaaatgtctcgaagatagcgggttaagtggagtctacaaagctttgaaaggaaaagatgaggaggcaagtcttgtattatttctaaatttaaacagacaaaatatcaagacataggctgatcgaaagggttcaatgaacaaaattcagacggcactctcgcgtcttccagcagcaacaccgagcgcggttcagacttccttacagacgttccagacttacctccagacactggatgtgttgtcttgcgctcgacttgctctgctctcgtccacccaactaggatcggagatacacaaagaggcgctcggcagactggctgacgcatacagcgcgatctgggacgcagtgatgaacaaggagaaaaacagatacgagttccctgtgagcttgctaaggagaggtaaggacgaagtgagaatgctgctcgctgtggacggcaatgacggggctgagcttgccgagagaaacgaccagtaaagcaaataggaatgaatgattgtcaagtgagaaacacacaatagataagagcacgcacgtgacacgggcctgggctcttgggccttgtggtggaaagaaaggcctaccggctgcggttgtaaccagaacgtaaccgaaacgtaactaacgcgtcgtgcccgttttctcttgtcccttctttgtgtccgtcctaatcgccttctattccatcctcaccctcaaccctcacccgtttcctttgctctggccgtcgctgaaagaaagagagaaagaaagaaagacagaaatcagttcaaggccaatcctttctctttcacctcccgtctttcacctctattccttcggtttcacctctagtcgtccgacttgatctgttcgttcaacctttgcactttcttctttcctcatcccgccatctttccttgatcgttcccgcgtccgaatttgacccgacaacccaaacatacctcggtcctttcttctatctgttgtatcctactcttcttaattacccagggctgtcttctgtttctcatctctcgtcctcgaccgcccttctcctgcaaactgtcacgcacgagcctcggcatctcgtccccttaacttcccgttccctttatcacctcacgcttcaaactccaatagatcaaactattgtattagaaaagaaggaaaaaaaactcggctcagaaacaatcaagagaacgacaacatgtcctcccatcacgtctcatcctcctcaacctctagctctagcaatgtcgttggaactcactaccgagtcggtaagaaaatcggagaaggtagtttcggagtcatctttgaaggttcgttgattcgtcttcggtcccatccgtctgtttttgatcgtcatactctcgaccggcaagtctttttgtgctctttatgcaaaagctactctctgccacgactgtcattcaacttgtcattggaaaagaatcggacagagtgtcctgagcatctctgagccttcgatagaagatcgattgagctcaagcgtggatgttcgacagaagagaaagaaaaaaacgcctagtgcttttccttccggtcgctcgagttgcctatccgactctcctgtctagcatactctccttgtcccaagatatttttgatccttctagtctgcctcatctggctggctcggttttcagcatgatctactcgtttatctatgtgctgatctgttcgtctactatgattcgcatctgatgtgatccggtccgatcaggaacgaacctcctcaactcccagacgattgccatcaaattcgttcgtcctctgtctcctacttcccatctgaatcgagtcgttcaatttctgacccattggtcggcgtgtttgtctcgttctgtctttctcttctgtctgttcacgctcttccgacctcggctaaacaggaaccgcgtaaatctgacgcgcctcagttgagggatgagtatcggagttacaagattctgaatggctgccgtccgtctcctgttttgtttctctgtttctcttatcatccggacgtactggtcatcaatgcgtgatttttgacatctgatcttcttgaatcatcattagacggaatcccccaagtatactactttggaaacgagggactgcacaacatacttgtgatcgatttgctcggtccttcgcttgaagatctatttgatatgtgtggtcgaaaattcagcatcaagactgtggttatgacggccaagcagatggttcgcatctgttttatttatatatttctttccgtccgattggccttttctatttcgagcgtcgtcatgtaggctaatatatagactatgtaatctagctcactcgagtccaaactattcacgaaaagaatctcatctaccgggatatcaagccggacaactttctaatcggccgaccaggcaccaaaggtgccaataccgttcacgtcgtcgattttggaatggccaagcagtaccgagacccaaagactaaacgttcgcctctctttttcttcttcttctgtctcctgttagactagtactgatctcgtcaactcctctttttattgattatcttaaacacactctaaattttatttgttacatcttaactttttcacgttcaacaatggcgtgaatgatgatgtctttttgatacccgcgaaatcatcacaatagagcacatcccatacagagaacgaaagagtttgagtggaacggcgcgatacatgagtatcaatacccatctgggtcgaggttcgttcctttttcttccatttgtttgtcatgtctgacttgatggtctgaattttaaattgataaatgtggatccttctatagaacaatccaggagagatgatttagaggctcttgggcatgtcttcttctatttccttcggggagcaacgtacgtcgaggtctcttgatcattaacaagactagtctttcaacgcatgatgctgatcatttctcttcctcatcatggtcaaacatggccgtgtctgactcgactttctatagtggattgccttggcagggtctgaaggcggcaaccaacaagcaaaagtacgagaaaattggagaaaagaagcaatcgacgccgataaaggaattagttgaaggctaccctggtaagacccaagcttttcttacgtatcctgtctttggtcgaacaaaaatgtgtctaaaatacgtctgtcttcatcccctcctcttgacgtattgtacagacgagtttgcaatctacttgaactatgtacgaaaacttggcttcgaggagaccccggattacgatttcctccgtgagctcttcaccaaggcgctcaaaagcacgggagaggtggaagacggagtatacgactggatgctactgaatggaggaaaaggatgggaagctggctctgtaagttgaactcaattcctttcggctttctctttcttgagttctgaatccacacaatgcttaccttttgccttgagggcctgcttgtcttcagtcagcatccaacattctcgctcagtccgctgttaacgactctaggcagcacagaagtcggacagatcgagatcgtgacagagccgaaagggatcgggccagagcctctcaagctgctggtggcattagcacacctactcgtacgttcatcatttgtccgttcattcaggcttgttttctctactttctccatttgctgacgacgtcttttccgcctatagccgcactggctcggagtgcatcccagaacaaccgggctgcggctcttcgaaaatctgcccaggctcagcctgtcaatggatcaacccaagccatggtcggcgtcagcgcaccttcgtgagtcttgacttttcatttcacctgacattcatgttttctcttctcgcctttcctctttcgtctctgtcttttcatttcttcgctgtttgaggagtatcgttttataacaattaccgttttattccgtcttgtcgtacctattctatttgttcccgaatgttggctaacttcgtactcaagtcttgctcttgattccaatcatcacagctcacaagcacaccacccctatgccactggtaaggcttctatcatatcgttgatcttcttcaagtcgtccctgattcattgatttccatctgaaacaacagaaactcctcaaccgtcaacaccttattacgaaactcctgccgagcctgttagagcgacatcgtcccagccccagccgaccgcgcaagcatcgcccatgaatgccgggtaccaggaagatggtgttcagggggctactggcccgggagaacgacgatcgggatcgaagactaagagattcttctgctgctgttaattaaaagtggtccaaatgtcgtttataccatttcttttctctagaacgtcagagagagggagagtcaaaagacgtgaaattctccatttcctctaataatatcttctactctctctttcctccttctgcttttatttacctcttttttttctatatttagtcttcctttggatatctgtcactcttctttttctttcccatcgtgccttctttactctacacctggctatctaacacttgcctctctttctttgctcctcctctgctcggttgatgaggtgaactgaaatatttttcagaaagaaaaatcaaacataaaagagatcaaaggaaagagaacaaaacgaagagaagatcttttgacccagaatactctctctgttcttcccatcttcctcatctcctcaaggctttgttgaaccctaggtatcatggatcttcggtgatattaccttctccccttcgctctttctcctctttcccttccctctagtttctgctcgtttcggactgtctcgtagattgggttgaaccatatcctgtatgagtcctaatactgtgacaacaaaccttttcaatcaatcttaccaggaaagaagagcccgaaaagtctttgtatcgaaaagaaagagggcaatcgaaacaagggcatagaatatgattatcggctttctatattacatgcatgttgatagagtgagacacccgaagtgcagaaacttgtacaaatcaagagccggtatctgagatggacgtatcagatttaataagattataaaacagaacgcaaagagaaattagaaaggaaaggcaaacaagttttttttttgaaacgagaaaaagaggggaaactattctgcgaatgtgttggtatatgaacgtaatgcaagcttgggtgacccgaaacagggtatcgatgaatcattcatctcgggcctctggttctcttaatccttttctctggaagggaaaaccctatcaatgaacaggacacatatgcaagatattctcggactcaagactttcaaccgatcaccgttttctttccacctgggctctccaccatcacactccccgcctgtctttccatacggtcgatcatcgaccttggagccgattgagcggatggatcaatcgagagacccggcctcacgggattaccataagccgacctcgtcttgttgtgatgaaggtatgaagggggaggcagcgaacccgtgtttgattcaggactgtcaaacataggcggttcttccggcggatgtgaggacgaagatataggtataggagaagaagcagagtcggagaaaggatacgcggtcggtaaaggagaatctgcaatgtcaactgggctcgagacttcttgaaaatcatctgcactcgagcaagagccagccggctcgggctcggtcttcaacgggaacaaggattcatgggatggtgatggaaccgatgggacaccgtgatacaacgaagacgaaggtgaactagtgtattcgatcgggcttgttacctcttcaaactcatcaggcgcatctcgaaaagacgatggtgatgaaggacatggtgatgtcgacgcccggggtgatgccgtcaaaggagagtcagtggtaggatgttcttgggatgacgatccttcggttgacaatttatgttttggttgtaacgtcgaggatggagataaaacctcgtcgtttatcttaccgggttcttcacaaattggctgttgatcgtctgatattgagagagattcgaatggggtttcagccttctcgatttctttagaaggtgtgtcggaagaaatattcgctgaactgctgactggaatctttggtgatgatggctgactagaagatggtgtaagagaagaggtcgagctggagaaaactgagttgtagctgcctctttgagcccttatacttcgggctcgacttgtaagactttgaaatctgaagttcaacaggtttgcaaccaggatgatcagtgtttcgttttacgtaaggagcaaagtcttcgcaaccacttacttccgaacagctcggatgaccgcgctgaaaatacattgatgaagaatttagcatgacaagtcagtattcaataatcagaaaacgcgaaaagtcttgatacttacaaagctgaagagatgcttctgatggctcctctgacttcgtcagctgttggttcttctaccatgcgttcgggcgccaaattaacctcccgcgatggcatagagatcccgttcaaccaaggatgttcctggaacagtttgataaatcggttcatagacgaaaacaatatatgttagttctagctgtcctgaattctgtttgtacaagatcagcagacatgagaatcgagatgaaggaaagggacacatactcttatgtccggtatagttatcctcttggaggcatctttgtcgagcatccgatgaactagctctttctgttcataaggccaaccggcaggaagaaggaccctaccgcatgaagcaatcaagtgttgtaaaacaggtaatcgaacgatcatacacagaaagacaaagtaggatgagtgagttaccggtcgaacgatgcatgtacaaaataactcacggatcgtctcggatagcctggaatagatcgacaggattcgattgctcgaacggaagtcttccggttaacatacaatatagcgtgactcccaatgaccagactatgtaacaccaagtgacagaccaatcaacggtcaaatcagacgaaagatatttgagtgaagtcttgatttctattgacgtactatcgaaagctcgcgcgtgcacttctttctcggctgtatgaggagaaagaaagggaaggattaacttgcttggttatcatgtgcatactgtcgctcgctagcactcattgacaggcttacgtatgtaactttctggagctgcaaacaataaattcctgagatttgattagctttctattcctccttgacgaagattgatttggagcttgaaaacgaggagaaaattgagaactcacgcatgaaggctggacttcccgtccctttcttgattctgtcatcaccatccttacccccgaaccagtcggaaactccaaaatcgcacaactttgcaacctttcggtccaatgtaagcaatatattctccggtttgatcttttttgggttttgatttcaggcagacacgaggtcaagagagcacgacgaagaggtaagaagacatataccaaaaagaaaaccagagagtttcagagaggaccatgagaagagtgttcttacgtcgcgatgagccacatcgttctcgtgtagatattcactttagacgtggaagattaaaataacaagtaagcagacgtgtatcagagagctgccatcattcgtcctgcaaattatatagcaaactcacagtcccatcaatatctgactgaaatactctttggcatcctcgattgacatcagcgattctctagtgggcacgtccatcaatattcctcctggacaatattcaaggacctaatgcaagtcatgaagagcatagtatgatgaatatcgactcaagacaagaagagcagagtgaaaagagtgaatgactaaccatgaacaaaccatcagatagaggtacatcaatgacttcatataaatgaatgaggtttggatggtcgagctttttcatgatagcaacctataagggaatggacagagagcaaatcacgcatgtatgagcgatgtcaaatatcactgttgatatcgactcaaaagactgatgaaaagaaataagacttacctcccgagcgatcaacgataacggatttttcttccattcttcttccagatcatcaaagtttgatgagctgggactctgttctggtctgcctgctaagccacctcggtttcgacctcggtttgctaatgaacgttgtcgaacggcccgtcggagacgggcttttgagtattctttcaccgcctgggatgcgtgaaaagagatttcgggagtaaataagaaagaatacaaattcgagaggataatcgggtgatcagaacagatcgcgcacagagtcgatggatgaggatcacgaacaaaagaatcgcctgtctgaatattgatcccaagctcgacggtgccgtatgcccccttcccgagttccggtcccagttgatctgcccggcaggtcaaaatacatagaaaagtatagtcatgcttcagaagattgcgcatccgagttgaccacgtggacggccagatagtcgtcccccttaataaaaagaggtattctgaggttaaaacatacattgattgactatccgtcgaccatcgtccgatttggtcgcgacggcatctctggtttctctcaccctatttgatagaaatatatcaagatgttctaattttagtctacatatcactatgcgttatcgcagatggaagagacaagatggacggaccgatgttgactgctcggtctcctgcggtgacctcctttcaactcgtttgatggacgtgacggcgagttcaagcctgaatcagccccctcatggtctaaatcaaatgagttcagacgagatgagggactgttcatgggcggagtcgaagaaggtgtcgatgaggatgggttgagaaaggacgatgatgttgagctcggcgagtctatggacatggtttcccgggtcgacagagcttgaggaggagatatgataagatcttgatccttatgatctgtgtctgtgtttaaatgtttgcacggtcttggttctgagtatgatgtgagatggagtaggatatgtgtgggtgtgggtgaaggtctgatcgatggacgcggtgatgaggcagggaccgccaggaacggtatcaggaatagaaccaggaacggaaccaggaacaggaataaaaaatcaggaacagccagatagatacgaaagtcggcccaagcgcatggaaaaacacgcgaaaaaagagccaaaaatgatatgaaagacggctgctgcgcatctgagcggaagatagcttccattcatttatgattcaaatatcctagacagctaatcttctcctaccgctcttcctcggtctctctatcaaactaccaacactgaccaagctctcatcagtattagaagcgctttctctcatcagttagccctcaccgtctctattcgaacatggacgactacgacagacaggcagagcaggatttcttagagacttatggttcgttttcgatgttcatctatcgtttttccaagtctatctacttctttgtcctgtagacctccgtacccgtggttgtttcctttgtcggatcgcttcaaaatgaatcagttttgattgaaaacaagctcatcttttgtgttgtcttttgatatctctcgtttttgctctgctcgttgcttctcgttcctcacgatatcatcctatcgtcgtctcctaaaagcctcgagctcacaagctagctctggtcagaccagcacgctcacttggattgtaagcttagcatcccttttttttcaagtcttcttgtccgtttgatcattatttgaacgacaagcagactcgtaagcaagggggtttcatccggattcacatttttcttgattaatttctcctcagacttggttctgctcccttcccggacacgagtatttctgtgaagtagccgaggacttcatcgaagatgacttcaacctgacaggtgcgtaccttctaccagtgctttcatcttctccttattaaggagatcgcagcttgcctagatgtatagaactctcggttccacgctctttcatggacgtcacgactgacagcgtacacaattcacttacatcaggccttcagagcatggttccgttctggaaggaagctttggaaatggtgctcgacgtcgagcctggtaggtcttctcttaggtttccctctatcgaatgtttcgtcgccttctcttatcggagaatcatcgtttttcgtgtcattcaacagaggaggactccctcaagatcccggacgtgtccatcattgagtcttccgccgagttgctctacggactcgtccatcaacgatacattcttacccgacagggtttgcaatctatggttcgctcttcttcctatttgtctaattacaagagcaaccagttaacggcctatcggtccgaaactcgtttttgatcgtgtaatagtctatcaagacattcggtgcgtgcccacgagtccactgccatgcgaccgccgttgtcccctgtggtcgatccgatcagccagggctagacactgtcaagttatattgccccaactgtggagatatctacagtcctcccagctcacggttccaaggagtcgatggtcggtctgtctttctgctttcctcatataaggtagcaggtgttgattgttatcgtgtgatacgcgtcctttgcaggtgccttcttcggaacgacgttccctcatctgttctaccaaacctaccgagatctcttccctactcctttctatcctcatccggctcaaccttcgctcgtgtcttcaacaaatccgaatgcgcctgcttcgccttcgtctcatcgactgacagagcagagccgaaaccctgatccgtacggaggtcagaaacctgcgttcggagaagtgtaccaaaagcggatctatggttttagagtgagcgaacgagcaaggagtgggccaaggatggcctggttgagagagagaccgagaacatgggaagagttggccaaggtcgattggcgaggtcggtggattgggggagatggtaaagatggcgacgacgacgaggatggtaaagggaagccgacaggagagaagggtgatctgttcgagggagaggacgaagaagagccagaagaggaaagcgaagaagaggaagaagaagaaggaggagctggagtcgcttcaaaaaacgcggctggtacgtactttcagttctcctcatccttttgatgccttttctttttcagccttgagcggagttttgacatttctccttgtatgatttcttctttcgctctacagcccctatcaaaaatgcccttgctttaccgctcgctgctctccccctccaaggcgctcttccctctccccccgtctcgacaatcatttctcgaccgaaacgttcggtaccccgaacgttcccctgcgaagcatcataccaccctcgattcactgattcagctatttctgcctccgaaaccgaaggcacggccggtgattctgactccgacgatgcgctagacacgccgaatgaagcggctccgaggttcttcaccgcctcgaggaaagcggcagtagcaggaagaatgactcaggggatggagaagacccagtcggttgagactgaagtcactgtattggaaatcttttaaacgtaccaggttccatcttgtctctatttagtatgaatgagcgaagcctctcagttttctctatcttactttctcttttcgtgtctcatttgttacaaacgggaagtgaggttgctcgatcgtcgctttgattagacttgaaagagatcgggaagatgtttgtgaggtgtagttcacaactctctgttcatccatcagcggtctttgtgacatgttgttgatctctcaggaagagtggacagaggaaagagtcaaacaattcattcacaacacattcaagaaaacaaaccagatagaaagcaagagagatgataaaaggagataggacaaaaaagaagtcaggaagaaacacttgtctcaaaaaagactcccaagggatcgtgttcctcaaataagacgttaaagactgaaaggtggtgagatgtgcgataaagagatgagtgaaagagaagagtcaaggcggaacgaaaggaaaacaacatgtatccaacaaagagacggaaaccttctcgttctttctcttcttttttgtttccgggtaggaattctttttttggtttcaaagatcgaacgtctcgagcctgtacggaccctccatctctccaaacttcttgatggcctcctttcttcctcttcctccccttctcgacaacgtattcttctccccctctgcagccgccaattttcgtcgttctgtctcggccgacctgatcaatcgaagggcaccgtcaaagtttgcctgggcgagttcgagctcccgttggatcaaggtgtgagcttgtaggtaggcttgaatccgggagagcgtggtaggagcggagggtaaagaaagaagagtgagtaggtatgtgtctaaaagaagagtggtgaacggaacaatctgtgtgtgtttgtgaatttatgtcaagaatcagctttctctcatcttttcggaataagaaagaagaatgaatgtcaacaagaaaaaggaaagacatacgttggccacttgggggagacctcctaagtcggttcgaccagctgagggatcggcaatgacactcaagatatcctcgatcgcctccaaacatctcggaactctgttcattcccagacccaatacggcgtccttccaagcggactcgttcggtctgacaccgaacctgccgatatccaagaccaacctcgagaccgatggtaatcttcccgaggcgagctcggtaggttgagcttgaccatcgatgatgacgttcaacaagccgatcaacttggcaggtgacaactcagcagactgatccctgatgaggagcatgatgtttgaccaatcgcctctagcgagaagagcttgggaaaatccaccaggcaacatgtgttcggagaccatgagccgttgaatgagctgagtaatcaacttgctcgggtacgcttcctttggcatcgacttgcactcaacaaaaaccaactgaagcaatcccttggccacaggggccgggagaataacggcaggacagggtcggagttgaactgtcagccgtttagcgagctcttctgggttcctctgaacttcttcgggcaaagcagccttctgaagctcgtactcctgtcgcactcgctcgtggctctgagccaaccgagattcttctgctgactttgcctccacccaaactttctcaacagcgtttgcgatttcagcgggtgactcccatgtgccatgctgttgatgagtcaacagaatcgaccgaagtcgagggagtaactcgtgaaacggctcggccggttggttgcctgacaacgatgacgaaaaggatcccgccgcaccggccgaagaagaaacccttcgagacttgatagaaccagccgtcgatgagaatgaaccagtctgagcagtagacacaggaacaaggaccttggcagtgcgctgagcagcgaacaaaacatccgacagtcccccggctgatgctcgtccggcaacttcacctccattgacatcactcacccaaacgctaatctttcctccattgtctgatcctcttcgagcgacgaagatgacccgttcgccagctccgttcggtgcaaactcataggcaaacgcctcgagtccgatcggcgctgacccaggagcgaccattgactgagggagcgggaaggaagagataacagccggataaataggatttaccaagtgaacttgcattgattgagtggaaaagagaagggtgtaggctgaggtcgatcgacctggtaggcgaaggatggtggtgtttcgagggtgagaaggcgaacttggtgccggagtggaggggaaggtgtgagggaccaaggttggcttgagtgaattcatgctgagcgcaagagtatgcagatgagagtgagaagctttgggtgaattgaaaaaatagggtggatgatagttagatcacacagaaatcttcatgatagagaaaagaacacaagtagatagaaaagcaaatcaaatgagcaaggaactcactaagaacctgcatgacgccggtctgaagcaagacagcttcagtaactaactcctccttcttgagtccagtgatagtgaactccttttcagtcttgaagttgatcggctgaactccctctccagataaacccgaaggagctatgattgacagtcggacgagtccttccgggaagacctctacaaacacgtcaccagccccttgacttgtcgacacagaggatgtggtcgaggatgcgaaagcacaagaccatctagggcgcaagaaagcgaacgtgggagaggatcttgatttggtcgatgaggctgaggtgacgttgagggccgacacggcgatggttgaagagagagagatgatgctgtaagagtcggaggaagcagaagaggctgaagtcgagtgaacagccaggatatggtcaggactggaagggatagggatcaatcgagaaaccgggctaggcagctataaagacaacgggatgtgtagaagattgtatatttttagaagaagacatcaaggtgcagtgaggccatgaaacggacaaacctcaagggtctccttgtcctgttctcctcgccagcaccaaacggtccgacgagcgagctcagagtcaagatcttcatgctggtcaagtgctactagggtggtgatatctccagcagggttgtatatcgagacgggcgcggtagcaaaggttgtcgtggggggcacagtatgggaccagaccgggttaagcgcggcaatctttacaagagaggaaggagagctgttgatgagtgacaggtcctgagaagaacgacagcttagaggaacaacttacgtcgtatctccaaacaccctcgccattgacggcgacggcaagctggtggataggtccgctggtcgacttctttcccttttgcttgttgctcgatgctccagcacccaccggctgaacggaggagaccttgacgggctgtttagaggaagatgtctttgaggatttcacaaccggaggagagtacgaggccagaagaagcggagttgcgatcgagggtgccatgatacttccagatctaattcaaacgaaggattccgagtatgggcggagagaagggaaagcagaaagaaagtcaaaaagaagttgacccaaaaattagcgaaattggtggattacgtaagatttgctacaagccgtaaccaaccgaccctctaggggcgttgtttggcacatgctgggtgccgacgggcaactcttctaaagaacggcagtttgatgggctgtttccacaagagccagtcgttcagacagggtgcgcgctggagaagagcgggctctgtgaccggacggccatcctggctagatcggatcaccgagaacgatacaggctgcaccatctttggatacaaagttgctcggaggttggcgcacatcgcgtcatcacgttcatcgacatgatgtccatgatctagcatggaatcatatgaaacaagtgtaaatctgtctgaagtaggtcgtatgaagtagattttgatgtcggtgtggtttgtggcgggattcatgatacactcgcagactccaccacagggcgatatcttttctagcaacacgttctactgctcatcagtatgctagcttaatcgttctggtaagttggagaaccttgctgatagatgtctgataccgtcaaagactctgatccccaaaggttattctgcggagaagcatgagagaacacagagtatcagaaaacctttgtagtcttccctacacactccctaatagaatttcctagtctaaatctctaaggggaaggaaaatctgtgcggctttttttttgttattttcccttccagtcaccttctttgctttctctctctcttccccatcgaacagatcagatcatctagtaacaatcgatccctctcattcagtcgacttggtggtcctctgtcgtatcgacgttcttctccttgttcgttctctcctctctctccctcaggcttgtccttccctccccccgacctcatcctcttcaccattctcgccaacgcccaaaggctcacaggaggccctgccctccgaccctttcgattcatattgcctaaacgaactttggccaacgtgtccaaacaacgacagactatcacttcttcttcctcttcgaccgtcaacaccttgactactaacgcacacactaacggacagtccgattcgtccgctcgtcaatcttcgacaagctcaatgaccgagcacaaagtccgttcaggatccgtccggatcactcggcctcagtcggcagcagacatcgtcacttctgaaactacattggcttcttcctctcgctcccccgtttctccaaagcagaccgtattagaaggcaagagtaaggagggagggggaggaggagagtctaaagggaaatcatcaaagtcgaaaggaggttggtctatcattccttctcccgtccggtcttgaccgtgcttttgctctttcgaggtagttcatttcacaggccgagcgttgaacgtgctgaggtctggcttctcttaccttactcactcacatgctacgatcttggtttgttttctgttttgttgtcgcctctctctctcttccaaagctcgtcgccacgcggccgctgcgaacgattcagccccgatatcgacaccccgtgcgccttcgtcaaccaagcaagaagcttcacggcaacagtctgttcagcagcaacgagcgttttcttctgctcaaatcaacatggaaggtgtctcgagagagctccgaaactcaaagtcgagtagtctaaacaatccacccagcgcgccagagagcgtcatctacagacatcctacgattccttcgtcctactaccgtacacctgatcccagaacatcaatacctgctcaggttatcaacctcgacggtagtgatctgcatcgggagattcttaagagttgggaggtttgttttccttccttgctttacatattctactctcaccaagctcactgagaacaacgtgcttgtatcacctctctaggcttcagtcccctccagggcaaccgtcagatcaagagaaagaactttagaaaaagtgtgcagagctgtgtctcgattcggaagtcaatacaaagtcgccgtgttcggaagtgcggccatcggagtagatggagataagagtgatatggatctgtgtgtagttgtacgtttccatcttcttgcttctctcgcccctcttacctctcttacccttctttgtctgactttttcctttctctccgatccgctggcctcatctaggaccaagagcacccgcaaggttatcgaaacttcgatctcaccaagaagccaaaaggaaatacaatttacaacatgtacgacttggcatacatgcttaaagcaaaaggaggtatgatggacgtcaccgctatcgccttcgcaaagacacctataggtacgtgtattttttcttcacctgtccattgatctttcaacattgttcatttggtgccttctccttcgtccatgttatagtgaagtttcgggatcccacgacggacatcgaggttgacatgaagtaagtatctcattttcacattgaccatcagattctcttatagtcttccatctcacatcgcgcctcgaccttttcttcttcgcctcgtttctgaagtgtgaatgatttaggcggagtgtacaacacatcgttgattctctcatactgccttctcgcgccgtatacgctccggccgctgttgcatgccgtcaagcattgggccaaatcgagaaagatcaatgacgcgtaagtggctggtttcttcccacgcagaaacaacttgcaagaggctcaaagctatctctttcttccctcgttctgtcttgcacttgacagctccggccgaagtggtcatccgacgttctcttcatatacactcaacctgctctgcgtatcatatatgcaatcttgtcaacttctacccaatctgcaatcacccgagttgatcgatcgattaggcgtgcctccagctgagatttggatcagaggatttcttaaaagagacaaggccgacaagctagacactacatttgcccccgtcggccgggaaagcggagcgggcgaggaggacgggccggatatgccaggaatgtctcaggaggaggtcgacgaatggaaggatctaaacttgcaagtcgatgtgggtgagcttgtcaaacgatttttccaatggtacggcgaacaatcgccacgaataaatatcgatcctgccgtgggggtggaatcggctgtgagggcttgggattggagtagatgtcttagcagcgtcttgcacggtggaacagtccgtagagagtttcccttcggccaggctgcagcagcggcaactaaggatgaactggagagaatggatgaagaaactagggagagggaacgtcagttagccgcacagatcccacattcgaggtggattaacgacgcgttggtcgttcaggatccattcatcatcgacaaggtttatctctttccttggctagtacattttctctagcgtgataaacaactgacttgcctggccgacattccttccatcgcattcaatcagaattgtacaggtgtcatcaacgtgcccacagctatcttgctaaaggaagagttcgccagggcctaccatattcttgaacaaggcggctccttcctcagagaggtctgtcagcctagattcgtcgctacgatgaggcagggtgtgagacatgattctagaggtggcggaggcggacgaggaggaggcaggcgacgagaaaagtcggacaagtagcaagaaaagaatgaggagccgttgattgatctggccatcttgttatttccttcttttcgtccttcgtcctcttgggtttccttccttcctcctaccgtcatcaagacgtttgttgcatcgaacgcttctctattctgtccactagacgttctcgccctctccttgcctccgttttctcttttgcctgttcttcgatctatctatcccctccccttttcgctcgctcaatttacagtttcctttcctacatccatctcattcatttgtagcagtatcaactattcatcggattcccttaatcaaactaagctttgcttcgtgacatcatttcctctctttgctctcggctccaagtgtcacctccaactccatcgttgattacaagaagaaaagaaaaaagagaggcaaagaacaatatgaggatttggggccaagactgcaagtaaacgagggtgaaacacttagcggggccatcctgacccctgttacataatcagcccctgaaattcttccgcctggacgtacaaactgccatctctcttcatctttgtgtttgcaagtgtctcgattcttttgttcccttggcacataaccctgcttctgcttcaatcgacctcagaaaaccacccctatcgtgttgatactcaaaggaccaaacgatcaccaacagatatatgcccgaactccaggctagatacacttctaccccaaacatgacctctgtagccatacctgacaccccggacggacctcctatgctaggaacgatcggtcgagataccggactcgggtctggctcggtcttgggatcctcgctgctcggtgaagaatgggcagagttcttggatgctgatactagtggagattcactggactctggcgtaggttcacaattcagttccggtatgagagggagagagaactttcaggcacaggggaacgaggaagagagaagagagaaggaaaaggtggatagactcgctctggacgtggagaagaggtcagtatctctttctcctttccttcttaagttcctttgtctttgtgtctggttgtgtgagatgagaatgtcgctatcgcctagagtagtgttcccttgtttcgcctccccttgacgggttttacctgaagacagaggaagggagcgcaggatacaaacgctcaaaactgacaccttctctctcgcttgtggtctcaattgttctttcctctttactcaaaagaaaaacactcacctccaagatgacacttgagctacaagaacttgaggctcgtcttcaagcggccgatgaaagagagtcgtcccttcgagcccgacagcaagctgtcaggccttcgtattgagaatcttcctttgttctgtcccatctgtattggtcctgaatacgtgagtcttcaggagaagaactcgagagttatggcgcatatatagattgacgtcttcttcatcttcttccgcttcgatgcctttcttggtcgcattcgtccagaaccaactctcttcgttcactctcttgtgcgatatgaattgtgtatatgtcttttaccttttatccctggaacctcttcattcgtccgcgttctcatatgtatcttaaacctctgcttgttatgacccgtatttcttttcctatcttcagtatccttgtaaccctgcccggctcgtacgcatagaccgatcatttctacatttgcctcctcacttcgtaccatctcttcttacctcatatgtttcttatttctcttccatctttttcactgtgacaccgttttacatataacattctttccgtttttacgatctctttctttcactcgccctttttaggacgacccgcacgttgcgtatctgaacatgaattataaaccaagttgaagacgtcatgatcagtgaaaacgtatccaaataaattcgtgtatgtgtatatgtatgtatatatgtatgtgtatatgtatgtgtgtgtgtttctgagagtggaaggacgacttgaaggagcttttctctttagaacgaacagatatattgatctttccctcttgctatgagtaaacagaggaagaggaaaacaccgcggtcgatcacagagatggagagaaagctcgtgagagaagaatgtgtggatgggagaaggctagggaggttggttgaatatgtgcagtgataggacaatagaatttgaggcatggcaaaacaggaaagtcagaaacaaaggtgagaatcgtcaagaaaagggaattgaattaaagttggatattaagtgggacagagtctgagtaaataatgttaatgttaaggttgatgttgatgtatgtatatgatggatattcccctacttgtccttcaagtgaaagacgatgttgaaaccgaagatggaaaataagggaaagccaagacgaacgtgaaaaagaggacggaaactatgaaaaagagatggtgaagaagtgggagatggagatggtgtgctttgaaaccgatatctatgaaggaacaagatataaaacacaaacgcacacgcacacacacacacgcgcatacactgaaaaggagagaaagaaagaagaggcacatcaaagaataagatctgatgagaaaagtgtgtctcttcctttgagttacaaagaaggaaaaaagggatagaaagacgacaaacaacactgatgagagtgaagaaggcgagagagaagggaaagaaagcaaaaagcccgaaaagagagagaaagaaagagaggaaacagagatagagtgaacaaacaagagctgaaggtaaaagggcaagagaaaggatgaatatgagcatgaacgggactactatcaatgaaagcacgagcacagcatgagaacagcaagattctctttttcgttttcttccactctttctatgacggataggcgatagattcctgggttttcatctgcttggcaacaactacgacaaccacctttgcgcgtgttcccaccttttcgaaccaactcgggtcgccgatctcgatcccaattctttccccggttcttttcattcccagtcttgtctctttcgggtcagcgtctcctgccagtcggtctgccatcggcatcaaccatgcttgcccgttcgatcaagcctgccagaactgaagcgggcacgaggaccatcggacttggaatcagttgttcttctgccggacgaggatcccaggtcaggtacggcaatggaggaacagcatactgctgtggcggaggctgcgaggaggcttgtgggtatgacgatgattgcaagaccggttgctgctgggctactggtatcgacggaggagcggattgaaactgtttgttattgttgttgtccgagagagaaggattgggatatgtcgaacgaggaggtgggtaaggactactactcaaattgagcgagttactgctagtgttgttattgctgctgctactgctactgctattgttgttgttataagataaggttgagaaagagttttgttgattcgagccgttgaagccggattgctggccctgctgttgtcgttgttggttggaagacgtcgactggttcttgttgagcctggctgtactcgacggaggaggcatgcttccatccatcaccgacggtggcagcatctcagtatcctcttcggctaatgccggcaggtgaagatagagatgcttctggggcgaaggcggtgcggagaacagaccaccttcccatgctcctgtgaagacgggcgagttcagcgcagagggcggaagagatgccgatgggtggtgaagtgaggctaggaaggactggacccaggttgggttgcaatctgcgtcgagagtctcttggaaatgaggggctgcgctctgggaagttgtcgttgttgaattcgtgtgcccagagctgggagtcgaggccatcggtgggagttttgtgttgccgttctgtgaattcagtgcgtcccaagcaggcgttgagaacgcatcagatcccggaccgctcggaggtgcgccattgttgtcgattccaccaccgccttggcctccgccgccggcagaattgttggtggtcgaaggagagattcctgttccgccaggtgaagagcctgaaacaaaagcaggtgaggatccagcactcaccgtccctccattcggacctaaatgatgactatctggatggagcagatgggcgaacggaccatgttgtatgtttgacagacagttcggtccacctcctccgcctccgcccgagtttgttcggttgctggtgccgttgctgtgccgattggtcccaaggcgagcatcgggcgacatgtctgaccggtggtcattcccggaatcattcacgttgaacctctctctggggaagtcctcgtcgatcgcgttcagccgagcaccgaggtctctggagaagagaagcccatccgaggctgtgggcgttcttgtccggttagatgagtttgacaggattgatgaaggagtttcggcccggttgtaagacgactgttgctgaccgagtgagttaaaagaaggaaggtcgacctggtgatgatgatgaggaggctgttgatgttgcgtggacgtggaagatgacgactgagacggattgtcgaaaatggacatgttgaaggcgaggaccccattggatcgagcggacgagtctgacgggtgagttcggtcggacggcttaagatgtggcggtaaaggatcaaacatgtgaggaaatgatgaattactaccggacgggccggccgaaggtgggaactgaaggtcgagtaggccttcgaagggagacggttggttttcgcttcctagtcgggagcttgacggccggagttcactgaactgggaggaggacatcgagtctctggagggtgaaccatcttgatgactggtcattagaccgagcatgctatccctaccgttgttgccatgttcgtctttcgggtctttggtcacagatcctttggatgcattacgcgaagcgggatctctatctgtaaagctgacgcttcgtctgcctcgaccaccttctgggaagcttcgggtaccaccggcattaccacctgtctttttctgttgttcctcgacctctaacagattcgccgcaactttttcgtcacccttgaactttctccatcggtttcgacagcaaagacctgttcgacctggtaaggacttggcgatcagttgccacttgggaccagtcgtttcgaacagcgaaagaagggattcgtcttcttctttggaccatggctgaccctgtggaggtgaggacgaaaagtgaaatgaacgcggtcgtcagagtggacggatggaaggaaataggtggagggcaattgaggggtgtgacgaacctttgataaactggggtccaacacttctttccaacgtttggcacattggtcatcctttctgcctggaatcatttgagcaatctgaccgatacatccgaggtaacatcagatcagcatgctgactaacacaccttcaaggtggaaggtcttccttgcgaccaaaagaggcgacgcagaaggcggattgtatgcgaattagaaaatatcgagacccaccttgtaccataccggtccaagcttttccaacccttccaagagcaaacggtcctcttcctttgaccaacgtcccttttttagattcggagcgagcgagtgaaagtatcgtttacgacagtcctggtgaagatatggaggtgaagaagcagcaggaagacaaaaacaaacagacatgacgcatacatcccgaggtgagacactgtaagcgcggaagagagctcgactggaagtcagaaacgaacaaagaacccaccttaatgttacgaccctccagagcggcggccacgatgggccatttgctgtctttgcctctttgactacctgaaggaagaacgagtgcagcagatcaagatttaggtgttagtcatatggacacgaaacgccctcttctaaagagggagccttggttgaaacttctatcagattccgacggaaacaagacaagcggagcaggacatgttgattttgaacgaatgaatgcgccaatgggcagctccagtcgaaagaacttcaagcaggaagcaacactggctcctcccgggcatcacgctgcggaacaaactctgggtactcaccatggatagcgaccagtttgagcaagagagcatcctcttcgggtgtccaaaacaccctttctcggtatgtcgaggcaggcttcgatggatcgggaggcatgtgatatcggaagaaaggaaaccaaggtgaaaggatgagatgggaagatggtgtgagagtgagtggatgtggatgtggcttgataggatgaacacggaaaagcgggggagagggaaacggtgggtgtgggtgagaaggtgggttttctcctttgtccgtgcggttttttttcttcttttttttttggtttagcagggagaagtgtgtaagactgagaagcaccctgaggcctcctgttttggttggctggttactattcctttccggtctctcttctctcgatggattctcctctggacactgatcgaaggaggaaagaacgcaaggacggagaagtaggttgtcttttcgagagaaagagcaaaggaagcgagtcgtgattgtcaacgagagaacgtccagtggggtaacacggttgatcgacttttcgttccggggggacggccaggaacaaggggggggtgcctgagcctgggtgagtgtcaaggcacaataggcatatggaggcacacaggcaccctctgggccacctggccgcgcgcagcgtgctagaccatgtgtgcttcgtgggatggagtgttaatgagatttagggtagctgtggggaatgcggggtgaaatgagttactgctccgaatgtggggtaaactgtattccggccaggcgtggaagcgtggacagaggaggcaacgtaggcttagtcggcataggcacaaatgcgcagcagtcggtctccggcttttcgccggcatcaattcattggtttccaacccgaccttgtttctattccaatatgacacgtgtgatcggaatctagatgccgtgaggtggctgcgtgaaatggctacgtaacgtggcttcggaaaatggctaggtaccctgagggctgtgtagactagtcaggtgcccatgctgcttagtcagcttcctggctacccaacccttacgccgcacacgctcagtcctctccttcgcccttctccatctcaacgcttgctcgtactttctctccttcctttcgttcacaggccatccgagacagagaacagaccgttcgaccagctacttagatcgaaaacagctatgcctgtgagttctcttgtcaaagtcctttccgtcatccatctttgttttctccccgagtctgatctctctccctaactccctttcgttcatctacaatcgacacctcctcgtcgctcaatcgtaacgaacctcgtcaggcctatcactctgcattcaacgaactcgacgacgttcgtctagtcggtaacacctccatccttcctctcaagactcggttcagaggcccagctcctttgggttcgtccagtcgcgtttttccttatctgttctttccttgcaacctagcttcctccgtaaagcctgttttcctgtcccctctgacatcacaccccatgttactttgattctttgcctcgttttcaccctactcatacgaatacgcaataccgtgccattcagccgactcttcgtctccagacatcatcgacgaagccatttccctgttcagagcaaactgcctgttccgaaatttcgagctcaatggaccagccgacaggctgctcatctacctcaccctcttcatctccgaggttctttccaaggtggcctctcatcggtcagctcttgcaccggcagaagccaaaaaagtcctcggcactctcgccctagactcgttcgctctccctggagacgctaccttcccgctcaactcgatgtacgccccgcccgccaactcggtcgacgccggtccgttcagatatcttcttttccccttcagcctagtttttctttcattcttcacacgaaacaagtactaaccatcagatcggctggtatcttctgaccgtcttgtttgcaacagatcatctcaggtcgtatcttactcaggcaagacaggaagtcgtccttcggctactcgatcacctgtatcctacagacaatgagtatgttgcccactctagcttttctctctgttgctaccaatgcgccatgcatcgctgatgatgtaccaacgcttcttgaacctctatctcgattttttttctggacgatcaaaaccgaaagaggtcatcaggcgacggttccgagtaaatggtggatgtgcttcaccaagcgaaaagggtttgttcctcttttgaatttgtttctcatcatcctcgcttcacacaccaagacacttcggtctccttctgacgcgcaatatttgtctatatttccaacagattctggggagcatgaatgatcttgattagataacttctgtcgcgcccgtcacatggtgattttgaaggtggagagttggaataaaaagagacgcgcgcgcccgaccgctccgttgctcttgggctgtgatctattcctctcttctttccctcgacccccctttcttctttttccttctttatttgttcctactttcgttctcctgctccgcttctctctgttcttccttcttcacccaaagtcctgatgttcttgttcctaccaccgcccactcatcttcttgttctgtccaatgtactcttgacgaatgttggacttcactctccaacgtaacatccatcgaaggggatgtaatcctgaacgctcgtttaaaagtcagaagcccagcgtacgatcgtttgtcaacaatatgtccgtcgaggtgtccccctcctcatttactatctataataaaggaaaatggaagacgtaagaggaggagaaaagggtgaatatgaatgcaagaagtaaatgaacagacagcgaaagggaaaagtacaatgcgaaacaggtgaagagttcttctttttcgagagagtgatgatacatccagctccaacagagctctagagataatgatgaaagataatagacaagaggcaaaaggcgaaaaaggttgaatcccaagaaaaagaagaaaaagaaggaggaaatcctctagtcagagtcgagttcagcattcagctctccatgatcacgtcaactgtagcggcctctggtgctaatgtcgttgtcgttgctgtcgtcgttgctgttgttgctgccgctactggcgttggtgccgtcgacgttgttgtcgacatcgatgccgttgtcgtcgtcgtcgttgccgttgtcgaaccgggttttcctttcgacttgccctttctgcccccagtctttttcgacgcagccgccgcccccaccgaaatctctaccgaacctgatccacccatcgatccaacggtcgtcccattgttaccagcaccaccacttccgagtctttccctctctccatctttctctccgtcgaagaagtcattcctcgcccgatggacatcttcccctctttcgtctcctgccttaccgttcccgacggtctcttcctccttctcctctgcgttcctctcttctgattctagccagccaacaagatcaggcgggatctcctgcatctgaaccgaaggcgccccgttaagatacctcaggttttctcggatcgagaccctgatcttttcgagtgatgaccgagtgtttagattgtccacccggccggttaacggaggatgaagcttgtagtctgggtaaaagaatgcgtcatatggtgttggcggtagagaatccccgacgtctgtttcggtcaaaatcgaagtttcgtaggcccaacaacgtgaaacgttccttccaagatacaacaaaatgatacaaaacaaaccaagaagaaaatagatcgtccacgtaagtaaaacggaattggtttcaaaactgagtagagactcacctgatggtatagcctccaccacccaagaccaataaaggcaggttgaaactcttgatgaaccgaacacattccccatgagccgcgatcgagaggttgaacgctcccagtcgatcacaacccagcgaatctgccccgcattgcaggacaatacttgtcggtcgaaacgtcgtgatcgtcggttccatcaccgctttgaacaaggaaatgtaactttcgtcgtcgatcccttcttgaagtgggacgttcagactaaagtatttacctagtccgttcccaagttcatccaacgcgcccgtgcctgggaagaagtcgccggcaaacttgtgaaaagagacggtgagaactcgattggacatgtagaacgcttcctgaacaccatctccgtgatggatgtcaatatctatatagagaactctcggctggaatctgtacggcagtgttttcgaaaagaaagccagctcgacatgtggtcaacacaaaaagatatcctgacacgaggaagcaatccatacacagaaggatcaagaccttaccggaggagttcaagaatggcaagtacgatatcattcacatagcaaaacccactggcctcccctttcttggcgtgatgtagtcctccggaccagttgacagcaatatccgtgtttccgtgggacagtttcctagcggccacgagcgaagcaccggagtactgcctacagaattcaaacaggccggtgaagactgggcaatcatccccaaagttaaactttgaaaattgagttgtcaaagaaggcggggccgaaggggttactctaattcacgaaccagccgacgcgtaaagacgacgcgagagtcaatatcctcacagaaacatgctcggaaagaggtatgtagagaaatcgaacctagaaagaaaatcgacgtaatctgaatcgtggaacatttctaattcatcacgagttgcagctcggggagcaaacacgtccatccgcttatgaagcccgtacccgacgacgagcgaatttgtgagcgtgagcctatggggtttcataggatgccgctcctggtgtttatgtttcggtttttgaggaaacaacatatccagaaaaaaaaaggtggagcgcgtacagaacatgacaggttgggtgagaacgcgtcctgatgactttaaaacaaatctcaaatcttctttaggagggtcggacagtaggcaaactagacgcaccccataatggtattctcctacagatttaggaaagtagtacgagactctggactgagaatgcggctgtgttggtggtatttcatcgatgaaatcagttatggtctagctggttgactcttttcggctattctgctgaacaatgagaagtctcaagagaaacgaacctgaacgatatcaccctgaggctgaggaagcccgatgtccttcctcgagtaaaagaacggactgtcagaaaaggtctggacgatatcgggtcctagcatatatgtagcgaggttgaaaagaggtagaggagagaaaccacagctagcttctacaaggtctgagctccaagataatctaacaccgtttaaaaggaggaaagctgaggctgataatcgaatggatggtcgtgattaaacgtcgaatgggtgagtgagaatgttgtaggtgctgctcaaatacggtcggcacgtgacttattaagcttatgtcaatcaacctttatattcagcgcatcttaatgatggcctgtccttctttagctatatacatatatatagctatatattcatatgtgaagcttcaatcacactagataacattatcatagattccatatctctcaatattcgctgattcgaagcataattcttttgtaagccttacaataacaatttaccgctattgcgcagagaagatggggaagacaaaaccgaaggatacgtacccaaaatcctgaggcaaagagataagaccaagaagatcagaacatcagccatccctgattattgaagcggcctatgaattaatcaatgtgtgaggaaagagaaaacgtactacatggcctgtctctttggcatgttgcgtcgccatcttctctcctttgagtccttctccgcacgtgccgcatcgtagatcaaacgtctgcgtgtcggtgtaatagtgtctatccttgagtttctttgcaagagccgtcacagcaggcaagatagattcgtttgatgtagaaaagaccgtctcgcagaaaccaggatcatcaatttgaggtgtcggagagagaagcgcacagtcataatggataccagaatacactaggacgcatctatgcagccagacaaaataagcgagtactaaaagatgatcagagattagctcaacaatgatagccatcgatttatgaacatacctctgtgaatattggccttcgccaaatcgatctattcgacctgatgagatatctacagatgcaatctcggttttatagctagtaccgaatatgatgatatcgtcagattagcatcaggtctcatcatcgagtgtgctctggcatatggacggacggatacggactgggtagaaaagatagagagctctgacaagaagggctcgcaagatcgcacgataagcaagcgagttctagacaagtttgaatcgtatttcctaagccacaactaacctatagctccaccccagcttgtgggcttaagaatcgtcgagatgtatgcctcgggtgaacgtctatgattggtcacagaagaaatatatgtttagggaaagctcctcgttcatgaccgatgagaaacagtacgaactccaaaatgagctctgaataagtaattggatcggccgtaatggtatccgctaccactgtatgaatgagacagatgttgcaaggcaggtgtatgcataagcgtatcgagcttagcgacatcacttaggaaactcaatgtaccacgacgaagcttggatgccgcttggatgcttccttcaaatacttgagctactgatgagaacagacacgaattatcatcgctgtcgatgtttaaatttcgaaagccaaatatcacttgtcagccttgacaaacatgagagcgcaattatatggatagaggactgacggtacgatgttcagaactaggtatgatccattgacctccacccaatctcctgctttgttgtttgctgacgcgctgatagtgtttggcgcgatagattctgggacgaatggctttggtttaggtggatccaagctgcgtgaaggtaccggtgctctgatagaggaagtcgaggaacctgacggagtagccgcgctcacaagcaattgttcattcttgctaagtttcaaagaggaaagtgcctgggccgaagacgtgtataacagaggtttcggtgggtatcccgacttgactatcgtttgaaacatggccatcaaggaggccagtgtgataccaatcggccgcatccaacgtgaaacaatcagctcaaaccctacaaaggatagctaatagcgacataaaaagatggcagaaagaaggagtttacgatcttgagcgtcggcaggcaagccagaaactttcgatatagcacaaagcagatcattcacggatccatttgaatctacttgaatcgagctgataccacctggatgtctgatcctgattgagagggacattgttggttgcttgtatgttgctgtcctccagatggacacaaccttgctgaagggatggcagcgtcatggtcatgtgtatgtggcaacggctgtgcttcgaaggcttatgtaagcacgtacgcgtggtttatttttccgttcgttgactttccagcgatctccttttcgactgtacatatccgatagaccaacaagcattccttctgccatcgctcacttctttcttctttctctcttctcaagatgaattctggctcgtcgatcacccagagatcgggcgccactcagattctacgcaatcctgtctccgctccaaaggtagtcaaggtcatgggtactgctggaacagcctatgaggccatgtccaaggttcgtagattctctatccggcttgaacagcaagatcgcagacagcccggtactcatttggctcgatggaaacattcgaattgttcacggccacagaaagttctaggtcgacggttggtccgggtgttcagtctgacgctcggagcaactttcttggtcttcagctttcagctttttgtaactggtaaggtggaatgtgcaacttgttcacgaacaagagtatgactactcgtggattgaacctttcaccgtttcaatttttacaggaggatttcactttactccgtcttttagaggggcaatcaagaatcttttctcttcagccgcagtctttgttctggctgttctaccaactatcgtcatccgcaaaacattaatctcttgtgcgttcgctcagctccccaaggactgctatcgaattcatactaacctcagctatcgagatacatcttatgtatagatccagaatcgacttcgaactctttgagcactcgagtccgagctctcttctcctctccatcaacccatgctactgttcttgtctttgttgcttgtggagtcattcaatccttgatctctgcgatgatcagttctggtgccaaccttggtctcctggctagtacctcgtacgcgcaatttcacactctatgtacatgttatcgaatttagtttgaccacgtttaatcgattgcgcattacagaagacaccctttccatctcaacgaacgattgatcatcttcctgttgtctaatgcatcactgggagtgacgtacgccttccgagaactctggatggagacctccttacctgtgtggcctcacgatatcgtacgtattggttcgatcttgcatctgaagagacaaaaagagaccaagcgaggtatagacgagcatactgaacaagatactttctcttcttatagctgcctattcagggcttgatctctaagagcctgacgagcgtcccatccgcgctcggatttcccatcatccactccttcgtattttccgcaatatatttgtctgttcggcgctcggtttggagattcttcctctcgtggttcggcgtcttcaccaggtgggatttgtgtcaactcttctcgtccgaggatttctgcactcgagtactgacctaaacataatttcaggccatacatcgccaactttctgagaagctctcatcgatctatcgatacaggactcttcgtaaagatcacagttcttgagctggctacagtggcaggatgggaaattggaaaggccatcctccgggtttacatggttcaggttcgttgatgagctttcttgaccagatcaaacccatcttgttcttcatactgacgagtcaatctatgttgtatggtgtgatctagcctatgatgatttcccagaactcggcgtcgcctatcaagtgcctgctggctggattggcctcaacttctccgtacttcaaagttagtgtgtccactactctcatatatgaacatctcacagcttttaatactctcatactgactggttttgctatgttgtttcttgtaaacgcagcattttgctcaattcgaaatagcgcactgtgctgtcacctcaactcaacggcgactcgacgtttacagcgacatgtcatcccccacgacattttggaatgaagtttggcgggccgagatggtacttcttggtcggagctaccaagcccttctcaacagaggacttaccgcctcggccttctccagcatgtacccttctggtccctccaaccaatccacctctcctgatctacatggcgcttctgtgattcaccctcaacacaacaatgctatcttccttcagcccaagaagcatgtttacgatagcctggcatcttctcaaaccgatttgcccccctcaccctcaccagcgcctaggcgggcacttccttctcagagttcggcaccttcgaaggtgcctgcgatcttcacttcaggtttatctgaacaggctccgtctcaatctcaacccgctcctcaaagggcgacacagtcgagtaagtcgatcggagatcgagcagtggaggtgctcgctagaatttggtgggtcgtctgggaaggaatgcccagagatttcaagacagcagcagaaataagactttctcctgtgaggagaatgctagtcagactgaaggtgagaggtactgtgagaagatgtctaaagacaagacagttggatgtgttagctattcaaggtatgatctttcttcctctgataagaagaagctaagaaaaggtttgggctgacttgatgaaatctcatgggattttcatatacagcactttccgcgttgaccgctgcttcgctgactgaagacccatacggtcaagttcaaagggatattcctcgaacgctcgaggccttcactagctacctctcagctcttgaaatatttgttgagcagctccaactaagctctcaggtctccggggcctgggctgaggaggcggatgagacgatgaaagttattcaggaggaggttgagcctctgatagatggtgcgtctctcatgtactctgttttgtggtcaggctgaaatgtctaaaacttctgtcttttcgcttcttatgtcatacttctgttacatagctcatcgagaagggattcgtcaaatagttcgttctagtcttttacaagtcgtccgccttgaatatgtgttctttgccatctgatatagcctgcttggatttattgtattttcagctggagactttccgagagcacctatccgctttcaagttcccgccaaaagtagctaagagcctcgcacagttcatggattgacgagatctttaagaagaatgcaatctaaaacacaacacaaaacaaactcctgccatcaatcataatgagccttttgtctgattcagctgggttccagcttgtctcttgaaacatatctgacgtatgcatcacttttagtctcttgagtaggatcatatattccgagcagtcagtgattatgaaagaatgaaaacaagaacgaagggatacaataaaagaacaaacaagcgtctaatgcttaaagatagaagaggaaagtaagaaagaaaacagagtacaagaaagaatctcaaacgtagccttcaaaaaatcactcgtcgtcgttgccatcgatgaaccgaagtctcgtgccgttggcgactctggaaataacgcccagattctcgtactatgtggaaagtgtaaaaaaaggaaatagtgttaaatcttcctgataacatccaaagtgagtcaatcagacatagtacaggtttatgcttacctcgagaatagtctccatcaattgagtctcggtgaatcccttagcaaacacccgagccttgacatctagcatcacaatctctccatcgtcttcctcatcgctggcctccgccaaacgtcttcctcttctgcctcccggtccactgccgatgtttttgggtttgcccattccgttcgagatagccatgtccctgataattcgataaattttgctcgtactcgttccgtcggtaacttccctatccttcccggtgttctcattcaaactggccttcgagacgtccatcaatcgcagtgcctcgtctacgtcggcaatgataacttcgtcagagaatcggacccgagcgcaagcttgcgcaagacggatcacaccgagcaacgttcgagaggaggtgtatgtcgagaatttatcctcggcttcgtcctccttttgttgctgtcgaagacgaacgtacgcggagacgatgtattctgagattgccttgggaacagtcggcctcttttgacgagcagcagcgatgaagtgtctatcgtttcagaaagtagagagcagtaacatacagggcttagtgatcaacttcctcaaaggctttatgaagcgttctatgaggcagattgaaagactgacctcatcaacttgggatctactgggtcaaaatcgagctgaggagccacgctaaacatgtgcacaaacgtgatgtgctgagcaagtcgctcatcatcatcccttaccggtgtgtccaggatcaggaagagcacgtcaaatcgagacaacagcgccgctggtaagttgatattttcaactggggagaccttggggttgtatcgtccgtagagaggattagcagcagccaggatagacgtccgggcgttaagagtggtagtaattccagctttggagattgaaatcgtctgctgttccatgacttcatgaatggccgttcgatcagattcgtccatcttatcaaactcatcgatgcagcagataccgttatcggccaagacaagagctcctccctctataaaaatcaaacggatatagaacagaagatttgccgcatatgtaagatatttttcctgtagaatgatagcatgcgcgacgtttaaataaataaagcgaaagaagacacataccgagcacaaactcatctgtcactggatccctcatgacagcagctgtcagaccaacaccggaagatcccttaccggtggtgtacacacctcggggagccaccttggaaatgtactttaacaactgcgacttggccactccaggatctcccataagacaaacgttgatgtctcctctgattttcattccatcgtttacgtttttagtcacaccaccaataagaagtagaagtaaggctttcttaacatcttcatggccataaatttcgggtgcaatgctgattcaaacaaacaacatgtgacgggcggacgtaagtaaacctttatcatcatcatgatgaagagtaagatagtcaacgtacctaagagcaagtttgtggtaaatattgggatcttctcggatggcctccaggtcctccttaaccttatcagtcacttccatgtcgttgtagctcttcttcatttgcctaacgtgcatcccctccaagaatgtgtcctggagcaatcccgctcgaagggctcgcataccggtgtacggcgtgggaaggaagataccggagacgtcaatgacgtctccgggcgaaacagttcgggtcaaggcgccgtagagatggatggtcatagatcgagggatatgtccaacaggaacttgactagcctgcgttgagcacaaatacgtaacaattgagagtcagatctttgcaaacttgtttgaggagatgaagacggcgcatagaacaaccaagatatttagacacaaaccatctcctgaatcttgacctcctggaagggcacaaatttgctcgctctagtctgcatcatcagacttccaacgaccctgtcacttcggcaagtatcggtgggacattcctggagcgggttgaaggttcgcgtgttgatttcctgaaaactttcttctccacaagactcgcacgaataagcattcaccaacacgtgcggcttgacatcagaaacacgagtagtaattcctcgaacggtgatgagctttccaagttgtgctcctttgacctctcggacagcctgaggatttcgatacgtcttagagagaggcttgatgtaaagttggctgttttcaaaatgagaggacgcatcaaaccacatattcgtccatcgatagagtgagaactaacacttactatcgtcgggtcaaactgggcggaaacttgtcggcctcatcccttcccatctcctcatttcgcttctttctctgctccatgatcaactcggcaacatcgctttgtgaggatacgtcaattgtgggctcgggcatcaaagagtcaatgacctcggagatcaggtcgatgtatctacgcgcgttgcggctgatgttgagagcgagagaatatgggggatcttcaaactgaacacgcgcaaattattttcggtttatagttagcaacttctcttatcatataagcctcacttaaaattactgacagattgtatatcgtcaagctcaatcactattgacgacacttgcttgttggctacctgggtctgttttcccacgaacatcaaacgacacgagaagaaacgaccgttatgagcttgcgcaaatataagcgtatgtcatgatcagggtacttacaagcatcttcatatactttaatctcttcctgtcttccggaattccatcatccacccccagactcatgttgtcaagctcttcctccaagtccaaccggtcctcctcgtcttcatccgcatcttcgtcgactggtcggttggcacgagagcgaggctctttgacgaactgtgacatgaatgtctgcagcttgactaaggacggattcaaacaaggtgagataagtctgagtcatcaaacaagcttgagaaaggctctgtcgcgttgtcttcaaggactaagactcacttttctcgccagcataatcgataccagtgttgaaggtcggaagcgttaccgcagtgggaaggtaagccatggtggttgttttcaggtgttttctggtatgatgttccacagagcactgattcaaagagctgaacggattttgtctcgactcgtatgaaagagtctgaagtggttcaggttaatgataaaggaagggaggatccgatgaaaagaaggaacaagttgaacgagcttcgagagaaggcgagtagaaatcagcaacaacgagcgcagccagacgcgtcgcgtggagttcaagacgcgtcttcaaactccggctgaccccgagcccgttttgaaccctctagtttgctcgatgagtagtttcttcctcttgtgtacttctattctagacgcgattggtgtacagctgagatgagttagtttttaaagatgggttgtgattatgagaggagtgcatgaaagaactgtgaactgacaaatgctcgacaaaatcgacaatctcttaatccgagtttgtcttctctagtccttatgcctgtgctctctcaacaagaacattcccattaaatgaataaatagaagtaggatcgtctcgtgtctgatgtacttagggacttgtcgggtcaacagttatgatgtgcgcagaatatcatctcggcatttcctgcttctggccagacatgctgatctgacacgctccgcggagttgaagggttagggttagcgcatcacaatcaagtagcttcataaaccgaatatagggttgtttgatacaccgagccaacgaatggctgctcacccttacctcaataccaccacgacggatataccatatccccctgcaattctccttacgcgtccttctttcatcaagaatctttgtgatcaggtctttgcctctccatagtaaaccctccaatactttcttggttgcttgccttttcgggtttcttctttgacgttgaattcaagtcttctcacattttgcttcccccttcaatctgcacctactattcccatttcccacatcgtccaactcgtctctatcgtcaacttctctcatcttcaccccaacttcctggtatgtcatactctgcttcagggtactcacgtcctcgagaactcgacaatcaagtccaaggccttccttatggtgacgacaaaccttccgcgtctatatccgtcaggaaggacaaaccacgcgactggagagacgctttcctggaagaacctgagataaaggatgggagagacagaaaccgagagagagacaaccgaaagccaacgagggaggattcattcaagagggatcgtgccgggataagtggacggtctgatggaaagtacgatcgaccgcccaaaggagatgagaccgaagaaggagagtgagtacagtttctctcctttatccatgacttctacttcacgtgcccatattctttgcagataagggctatctctcctagtcggcatgttccatgttgacctaacaggtgtattcctactgaattgacttgcatcttatgcttcagaattcccgaacggccctcatcccgccgtcgaactcgatctcccacacctccgcgttcgcgtccttatggcgatcagcctgcgtcccgaggcggctacgatcagacctatcgaggcagaggaggtagaggaggcgcaggatctggaggatatccaggtaatagccgaggaggttatcacaatgcaagaggtggccacaaccaataccagcaacaacaacctagtaacagccagtactcgagtcaaagatctgcttcctcatcagctcgacacaactctacatctacaccaccttctgcgcccaaggctccctctcctccaccgaaaaaggcggaagaaattattgaggaaattccagatatcgtagagttaaatccagaagaagccctggcggagagaagaagaaagaggcaggagattatggctagattttcagagactccaaacgcaacccctcctcctgtggctgttactcccgctctgaaatccgttatgatcgagagcacatcgaatggtaagcttgtattgttacttgttttcaaggagccaagtctgatcggaatctttttgcatactatctctagcttcgacccctggcggtgttaccccttctacaccctttgatttgtcattctctttagaaaaagatgcttcttctgaagcaatccctcattcatcagcgaacggaactttccagtccactccttcggcggaagaagagatctctgcagctgattatgacccttcagctgatagaagagcggaggacatccgaagactgcagaacgagactgctgcaaaggaggcgaggaacatgattactgaggctgagaggacggctcaggaggcagcacagaaggagattgatgaggttggagctagtccagacgaggatagcgatgacgatatgttttcgggcgtcatcaagcccaaagaggtggttaagaagacacaacttgaagttcctgtgagtttcttcatgcctcttttaccttattctggaagtgaagttctccgtttgattactgagtcccaaaataatgacatccaacgtttctatcaaggtcatcacctcaatcctaccctcatctgctgctacattatctgacaactgggatgacgctgacggatattatcgaattatcccaggtgaggtcatcgatgacggtcggtatcatgtgttcaccacgttgggaaaaggaatgttctctgctgttgttagggcaagggttgtcaaacctgggcctggagagcaggtcgggaaggaagtggcgatcaaaattgtgcggagtcaagaatccatgtaagtttacgcgtttgcttttttcgagaagtaagaatagccatatctgacgtcgctttaatctattttcccgtccgccaacgtcgtatcatgaaggttcaaagctggtctcaaagagattcaaattctgaacaagcttcgagacgccgacatggaagacaaaaagcatatcattcgactggagagaacgtttgagcatcggggtcatctgtgcatggtatttgagaacttgaggtttgtctgatgccatctttcctgcttggtgttcagtttcctatgatctacgcctatgtacagacaaatattgactttttgtggatgttttcacttatttatgcggatactatcctcctcccgttcagcatgaacctgagagacgtaatcaagaggtttggtaaagatgtcgggctcaacatgcgagccgtcaaggcgtatgctcatcaaatgttcctggccctctcactattgaagaagtgttcgattatgcatgcggatatcaaaccggataatatcctcgtaagttgtcttctatgtcccgggaagaaatgctttgtttatacacgtccaaactgacagggacattcccgttttggacgtatgtctgtctatgcgggtgttgccgctgatctaggttactgagaacaagtctttgctcaagatttgcgacttgggctctgcttcggacgagtccgagaacgaggtgaccccttacttggtatcccgattctatcgagctcccgagatcagtaagtctattcttgtctgattccttttcatgaatgtgttcatttaacatgaagatcaactttatgtttaatttgattagtcttgggccttccgtacgactgttcgctggacatttggtcgattgggtgcacactgtttgagctttatactggcaagattctcttccctgggcggacgaacaaccagatgctgcaccacatgatggagctcaagggtaaattcaacgtccgggccatcaagaagagtcaattcagagatatgcactttgacgagaacatgaacttcatcagtgtcgaggtggacaagattaccggacaggcgagtgttctaccttcgtagagtatctatccgagttgatagaaaacaagactgatattgatcttgtcttcctctccgaacagaacgtgactaaaatcttgccattcactaaaccgagtcgggatcttcgtgccagactgttgccttccactgcggctcaacaaaagatgaaggatgatgagttgaagaatctattgtcattcatcgatctgctcgacaagtgtcttactctggattccagcaagcgaatcactccgagagaggctctccaacatccgttcctgagatcgtgatcagcgccggccgtgtttccatgatttccccggttttcgatgtcgactcggaacgtcatatgtgcctgattcttaatgtcgcttttcttgctctcctctttcttctttctcggtttggatctatctttgctctcttgtccgctctctaaccacacttttcctaactcggttcttctgacccttctgctattgacttacctactaatgcatgcaaaagagctctgtttcttcccaatgttttattcatcttaaccgatttaagcatgaacatatgcggcgggatttgctcgttaaacgaaaaaaaacacctccaccatattttatgttcttgtcatcccgacctttaacgctcgtgcctccttcgggtcaaggttggccgatcttcaatcgaatcacaatcatcctagacgtaggttaaatctggagcttgtcaatcttgaccgtcagggcgaacgaacagtttcagccccgtcaaccttggcgcactctctgggttaatgacagattaaataaaaacctgtcagccggatatgcctggaacaagagaagaaagacaactgaccgagcgtcggacccgctctaggtcctgtctcatttgcattcacatctgccctgggccctgaatgctaagtcctgtgccctgctctctcgatcatctgccctgtcatgatttctgtccatgatcagtacctttgctttgagtttagatgacgacggcagggcacggccttcacagtcttgcattcactcacccacgctcctctttgtttatgaatcgacaggttggacaagctccggtctctcaagttgacagccaggcacagaagcaagcgatttcaggacattataagtacgacccaggtcttgccccttccccctttctcttccttccctttctccccttctttcttcccccttcttccacgacaagctcttcttactccctccttttctttgctcctcctattcaaccgcaccaagcttttttttctcccatcatcttcgaccctgcagacttcaacgcatccgagtctcaacgaagctctctttctttcgttcggtcgattctgaacgcttatcttgtcagctggacctgcagtacgttcctggatttaatttgccatttcttgtttacccttcatcccgagctcttatctgtcagcatgtatggctttatttctgacttgtttgctatcaccttctctttttcatttctgtgcttgccattcatattttccctttctccctcttccctgtctcttttttctctccttgattcaaatcttgctctggtcactcattgttaacaccataacctgtgtcatctcatccagtttactaattcaacctgattggttcatagccttttctctgccttcttcattcagctcccaacatgctttcccgacctcgaagagcgtccgcctcacatcctatcaactactctgaggcatcctacacccctggaccactcgcaatttgtccttcctaccataccccttcatcgtctacctcgaccgctcttgtggttaggcgccccaaagctgctgcccgaacgggtggcaaaacgtttcaatgcgtaggctacggagaatgtgagatgaagtttaccaggtcggagcatcttgctagacatattaggttcgttaagtcaaccacctggtcggatgctgcctaccttgtcgttaatacttttcttgctcctcatcctatccatgtatgcgctccgttttctccttacttggactgtttttcacttcacaggaagcacactggagagaagcctttcgtttgccactgcagcaaggcattctcgaggattgacaatcttcgtcagcactgcgcctccgtccactctaaccttgtcaaactgaatgaagtcactatccgagcactcatgcccgtccattcggcgctcagtcaacaagccggaagagacaaccaggcttacgtccggtacatcggtacaaaatctcccaaacccacactcaggttgactgaccgacgaatctcgtccatgcggggtactcgatcaatcactccacccgcattgtattctctccctccaactcccgtttcggccatgactcataataagaacatccgcatccaggattatgaagaatcgactccgggtgggacttatgcttccccaatgggctatcctggacacaacgactctgaactcaagtaccggtctatcacctggagagggaacgattcaatgattcctagcatcatccgtcacgggtttcaaactccagtctcagcaggcagcgctgtactcaaggagctgtcgaaagagtgtaccgaagcggacgaggaggaggaggaaaacggagaaggtgggagggtgtacagctatgagagcgaagactctggctcaagccactcagatgacgccgacggaaccgatccgacgagtgcctcatcttccaagatggatactaaacagaacatagcgtacccagaaaatcctgcttttctgctagcttctcaaattcggcctcgccatccacctttcttacagcagcggagtttttcatctcccgacatcttcacatcagtatccggctcaggcgactttcacactgctcctgctcttcatccagtacaacaacagcatcgccactcgattgcccaatgctcacccgattttcaggaccatcgttacgtccagggtgctcatagtcatgtttcacattctgtcgaagatgctcatagccctgctctctcgcaatatgccgggcttgcccaaggaccccaaggtggatacaatctgtatcgatcggacacacaatcccacgttgtgagtttcacgtactgattgctttgacaatgtgactatgatcaggcttactgatgatgttgagggcttgcgcaaacaagaagactgggttctcccacaaggctgaaccgtctcgagatggttcgagacaagtcgcggaggattaccaatcttatgacttcggacattcgtataactacactccggatttccatcagggaggtcaaccaggagtctcagattcgccccatgcttttggcgaacagggtttgtggggattttctcacaacaccaataatgcacatcaaacttccgtctctacggatcaatatattcatcccaatcatcctctacatcaccagcagcactaccaatcgcagcaacattctagtaccgcgtggagatcaactacggctatggcacacactccctggggacgtgatcacggacgtaccaggatgaatcaagtccagccgtcttatgcgccgcacacatcggctggtcctataacctccgcgactaacaacgccaatgtaggtcagccaaacccagctacaggttattatcctcagccatctctttacacaggccctcggcaccctccgtccaaatcaaagaactcagcaattgttcggccggaacctggactcagccatcatcctctgcatacttcttccaatcaaggaaatctctcctctgctgctggcttcccctctcatcaacccaatcgaaatttaacgatggttccatccacgacactttcctctttgtattctcctccgttcccgattcttcggactctgtctccaacgaatcatgaatctggaccccgagcttcggcatccgaagaacaaccttctgccatctcaggaaagaagaggtcggtttctccgcccgatggaggccattatactctagagaatgaaggatatacctatggagacgaagacggtcactctgggtcgaacgggaataagcgtctacggctgttctccgaagcagttgagatagaaaacccctcttatcatctggccaattaccagaatcaggatgaccaagcgtctcatccgaacccgactcaagcaaacctgaatatagtatcttcaactaattctacaggaaacactgttcccactttcaattctgattcttcccatgctccgcctgaggaagcggctacatcgtccagagagatgattgtcaacgaatctaacccgagcgcgttccccgcttcttcagaaggatcaagtaatcacagacctcgtggcgaaccggcgctgtcccaggcggcggaggccaagacagatggattggttgtttctttgtctgatttggcgaattcagtctttgtcaaacaagagatagaggatagattcccagaagaggaggaaccttgggcggtcatcacctcgaacgaggatgcaagcagggagtccaaccaggagcactttcaatcaggtcatactgacatgagtgatttcctgggagactcattcaaataggtttctctcttctcttctcttctctttcctttcttttccttttctttcttctttatctgcattactctttgatatctcatcttcataagtttcttaacttcctgactctcctctttctctctggtttgctttatatcctccttttctgcgtctcgtttccaaaaccaacgtattcgtgtcattcgttcatacccaacagcctatccgttgtaccatcagccaccgtatagctttctcgtcgactaatcttctggctcatttttttctttctatctgtgatctgcggcacctgtcatctggctgtgacctcctttttcttttatgtatcttgagttgctcgtctgttgaccgtactacaaaaccttaccgggttgtataccttcttgcaactgtttttcatgatgtgcttcttctgtactcgttcttacatctttcgttctcacacgtttctatatcatttagctttcatgttgtctttcttgttcgaggggtctgtactgttcatacggaacaaaactaggtgacgatccatggactgtggtttcactcggctcatcaatggtgtttgaagaatagcaagtgattaagcgaaagatcaatcagatggcttgacgtattgtttcctcggatccgaggaaagagcaacccagacgtctatggggatatgtcatgaatgtttcggatctatcacttggatgaatcctgatgagcctcctaatgcatccggccctcctcctttcctcatttctgcgaactgcttcttcatatactccatttcgagctcttgcttccgtctctctccaggtgtgggaagggccgagcctgaagctcgaggcgaaactgttgttttggtgtttggtgtgtctccaagatagacggtaccgagccagccgaaggccatgagaccaagtcccaggaggagtctagtttgaggaggaatagcttcttgttccgaacaaaagagaacgatcagtctttacatgtcacagaaaatactcgagaacaatccttctatagaagaaaaagcagaaatgacagagatgaactcacacatgtatgcagtcgaaagtgtagagaacggactgggtggttcggcctccttggtatcgataatgacatccttgtttcgtcgggtccgttcttcttgttctcttagctttcggacgacggtcggatgaggtttcggtggttgtcgatgaggcccgctaggatttaaaaaaacagagagtgtagtagagaaggcgagttgactaggtagaagcgcgtgtgatctaggcgactttgagaggatctgagagcgaaggatggagaacatcgctgctggcaacggttgatgactaccaacgacgacagtgataatggtgacgatgagggtgtggttgggatcataggaataagagatggacagaaggaggagcgcggggatggtgagcggggtaagtgaacgagaggaagcacggcgaaatcttaacgagcatcgcacgaacgaaacttttgattcaacgatctaatcagcaatctttcgttgccggtccgtttcgcactcaaaccatcatgtcttctttcgctagcgacctgactgctttcagctcgatcaaaccccagccggctgggtcgaacgtcgctttgtgtgctcaatgccaaactgtcgcttcaaagtatacctgtccgggatgtgctttcaaaacttgtgttcgtcaacgtccttcttctttctatctctcttccgtccactttctgctgcgtccgggctgactgtcgctttcggtacggcagtccttggcgtgctcaaaaatccataaagaatcgtcctcctgctcaggagtgagaaacccagcgacatttatacctccaaacaaatactcttattcctccctcgtctcggactacaccttcctctcctcggtcggccggaagacggacgaggtagctagggaccaggcagcctctgccttgtctgaagaagcaggaaagaacagtaaaaggagaatggacatgctgaagagagagcttaacaaggttgggctgggtggcataaagttcttaccagaaggaatggaaggtaggttggcgaacaagacgaggtgggatccaaagtacgtcttccctctctgcttctatatgcgcccacgcacgtcgctttccttatacaagagcgggttctcacatttggttttctcgatggcctgggacgttcttgttcggaatcacttatgatcaggactcaaacgattcaattgacaatatcttttaatgaccggtcgaattctttgcctcctactttgctacattctatcccacttcagcctcagacaacacttctttctctactccctagttctccgtcatctcagacatccccatcagcttcaagttcaaccactgtgcctgagtccaaaccttcatcagagctcacgtcaacatcttcactttcacctccaccactgttatctctgtcgacgactcctctatttcttcttccacatccgttcaataatccgactcaacctcaatattatccacctctctcgccaaccgagccgatcctatctgttctccaacacaaatcgttcatcgagtggcctcggatcgaactctgggatccttcagagtggtctcgtgcactagaaggagagaccgtccgagtcgttctgcctctgagcggagagaccggcgcgcagggcgaacagctagaagcagatcccagacgtgagagtggggacgggggaagaacggggaaacgaccgaggttcgatgatcaggtcgatagtggttggggcgcgagggctggaacgagagcgacagcggcagcgatatcaaccgacgaagataagacgacagacatccttcccgacaaagaacaaacagataagaccatgccgcctgcggtgatgcatgctctcgtcagggatggtctgggtctcttgggcgactatggaagtgacgatagcgacaacgaggttgaccagtctgtatgaattaactctgtagagcaaagagtcatgtattatcaagacgtgaaaagaggaagtcgctatcactacctgatgaggccaggctacagatatcggtgaacgttagaaaggataaaatcgttcactgcatgtaaaaggagagattgtggcaaaacacaaggaagatataggagacaaagatagtttgacaaacaaagaaaaaggtattgcagacttatttgagaaaagtgatcgtaagatagtcattcaagatagatgaagaaacaacaacaatgatagaagagaggaatatattcaagttcgacaagctgtctaatttagacatcgaaggcttccgatcgccatccctccttaccggcctcctctcgatgctccttcttggcgtgaagcgaagccttgttgacctctcgctgagcgtcaatcttaagaccgttgatttgagcggtggcagcgtcaattcctccaccggtttggagagcgctgacagcctggttgtaaagaccgtgtcgcttggagtgagcgttggaaggtccggccttaccagggaagagctgctcgtcaacgccgatagccaacaagaactctccctttcgaccgtacttcacgacacccttctgggtgaccttagtggaggtgccgtaagaggatagcagtgaatcgctaaagatcgccttgaggtagttggaaggcgagggtcgagcgttggtagcagcgatagctctctgttggagtccgtatagccggaaatcagcatccttgaggtactcggtgatctggtgctccaacgaagccttgaggttcttcctcaagagacccgacacgaacggccgagagaagtacaggagccaagagctgttcttggagatcgagtaggtgaaatcgctgatgtcaacatcgacatccttgacaatgaagaactgttctctgtcgtcctctccggcgttctcaagggtgacatcaaaggcaatacccttgttatcgaaagcaatctccaaaagaccttcatcctcaaaggtggggaatccgctcttcttgttgacccagtagctgatgtccttggcgtggaacttcagaccgtcaacgtggagcttgacggaagtatcgtagtcggcagcgaaagcggcgtatccctgggaagcccggaaatcattgtggttgatgattcgaatgttatcagggatgaaggaagcagactcgaaagagacgtcatcaatcacgagatcaacagcctcgctcttgaactctgtcctggggacaggaatctccttcacaagagcaatggctcgaggaaggacgacatcaaccaaatctcgccagagaccgagagattcggctgtatagtttggcgacaacaagaaacgtcagcatcttctaatcagatcaggtttgactttgaagcagaatcacgaacctcggagggcattggcaccggtctttcctgcgtgctcgacctcggtgatcaggttctcgatcttgaaggccaaatcaaccatggcgtcatcgtcggcaacggcgccaaagaagttttcaaggtgctcaaggaactctgaaatgtctttcttgtactgctcgtttccttgagcaaggtcctgtcctcgctgccaaagatcggagctgcgtcggtaggctcgctgggaggtcacgtaaccctcgaccttgagggaggcctccaagaatcgaccgatctcggagaagtaatccgagatctctcggtcgttctcgacgtccttcttcaaggtcttggcagaatcaaggacagggtcgaaggactcgccagaggcgaaagtctcaagaatgagcttgccttctccaagagactgctgcaagggctcctggtcagcctcttcactggccttctggctagcctggtcgacgagctgctcagccttggcaaagtacttcttgatgagaccaaggatggtgtcaattgcctgttggtattcctgtatgtgcagtcacaaaaacgaacaattattagtcgcacgatatatagcaggatgtggtataatttccacgtacaggctttgactgaatatccttgacgacagcattgagcttctcgaaaagcttatccttgacctcctggtcaccagtaagcttgtcctcaaagtactgtggatttgaagaaaagatgttattacgacaaacttgtatgtttgacaagagaattgtaccaacctcagcaagtccctcgaactgggctccgagctgctcctgagccttaccctggagtcgtccagaagcaagtcccttggcaaccttctttcccttcttcttctgagcctcaagatcgataggggtgttctgaaggtgaagtgaatgttagaacaagatcgtcagacacaatttataaatgacgtcatcgaaaaaaaaacacgaacatcgtctccagtctctcgagcctgcttctcgagctcagaagcctgctcggcaacggctccgctggcatcggcgacgatagaagcgaacaaagagatgacttggttgagaaccaatcggaactgtcccgaggtcaagaagagagacccaatctgttgaagcgagttaacggccttgtcggcgtccttggagagctctcgcttggccttggcagcctctcggttgttaacgagggtggaggtagaagcatcgagaccctgtcggacaggagaaggagcctcgatttgagtgacatggtaaaggaagttctggatcttgtcgtcacctataaacacccacagaggtagtagggcaaagcgcatgtagatgagcatccgctcagtggttctagacacaaagaaggagaacaaaacgaaccgttcttctcatttccgacgacaccgatagcactgacgacgtcccgaagagctcggacgactcggctaccctcctcgctcaatcgaccggtccttcctccgcctcgaccgataccgggagagaggagatctgaatcaagggccttggcgagcaaagcgttgagctggctctgggaaggcagcttgccagcctggaaggcggcgatggcagtagcaatcttgaagctggcctttcgagcctgatccttggcctgatcaaccgtttgctggttgggctggaggtgagtgggaagaagaggagatcgctcggtggacatagtgaaatgtatatggaatgtggtagtttagtaggtggtgggtgtagagtttcttaagcttgaagctgattcgttgcaggcgtttgtttgatggatacagttagattaaaaagacagggacagataagcaaaacaaatggaccacagcaagagagagtgaacgtcaagagatcgaagagatgtggaagagaacaagaaagggagaaagaaaagagggagagatggaaaccgatttgactggccagtatttatacggagcggacaaagaagatagcaggctgggcgacagtgagcaaccttttctttctctctctcgcgccaccgagcggacggatgatgatgatgatgaggagcacgtaccgaggaccgcccagggcccaggggcccggggctcagggcggggaggcttgtgcgttcgttcctcctatga

SEQ ID NO: 724 - DNA, 16211 bp, Xanthophyllomyces dendrorhous
cctatgacatcgagtgcgctcgtgcgctcggcttgtcgcgtcaccgatgcaaatagatgagggcacaggcacagattaagttgatcacacgatgacctcaccgacagcgagacgagcctgctcgcatttgcctctttctttttccccccctggtggcctagaatgtccacaatttgttcctggcgcgcgatcgagttccgagcggttgccgtcacgtggaaggctgacgtcatctctcatcttccttcccactcccctcgccgtgcctgatctacactttctggtctgcacccgtatccatccaagcactgctcaaacctcccacagagtcactgttctaacggcccattcagtctttctgcccatcataatcattcctctcaaaaaaaccttgcagccgttgaaatatctggtccgtgtcatgtcgtccaaagtcgcatctacccaagcaaagtcccatgaggacatcatcaacctggccaaacgcgtgagtggtttctgggagctttgccgatgagtatgactatagagcatagaacgacaatggtatctgccgctaacatacaaaatttcaacagtttgtgcctcctctcaggtatggacaagcaacaaacacagacagttagcaaagatcagttattcggctcaccttgatctcttcttcgtcaacttttagctcaaagctccataaaggacaggccggtaagcagaaagagatgtttcgttctctctgttcggatgcatccgttcaaggtagaacacggctcatcgatactactacttatccttccattttataggtcggatcggtgtcgtcggaggttcccaagactacactggcgccccattcttcagttcaatgtcttctatgcgaatcgtcagttcattgtctcattcacgacatacgttaacagacattcatcccttcaggatgcttattattctcgtcgtctttttctccttcattagggagccgacctggcccacgtcatctgcgagcctaaagcaggttcagtcataaagacgtactctcctgatctcatcgttcacaccgttcttgaccctgccaacccgccaacagaagaggtcctctccgggatcatctccagacttcacgctctcgttatcggtcccggtcttggaagggatgacgacatgcaaaagtttggaaaaatgtgtctcgaggtggccaaaaaaatgaagaaatgggtcgttttggatgcagagtgagttcttctatccgttccatgtcgacatatacctaggttgatactgaacgctatgcttgtctcgtgtcggatcagtggtctctacatggtcaccaacgagcctgatctcgtgaagggatatgaaaaggcaatcttatcacccaacaaaatggagttctctcgattgtgcgagaagttggtacgtgcggacgcatttggtttgacagtacttccaactctatatatcagatcaattctctcaacatgtgctttcctcgtaacagaatatcaagtctgatgccgacccgaagactctctgtccggatctagcatccgcccttggaaacgttacagtcatccaaaaaggagcaaccggtatgtgtcttccgcttgtctgccatatagctctccttcagccggatttgaacaccatcattcaatcacccccctcacctcatctcctcttcttacttacggattaaaaaagacatcatctccaacggacgcccgatcgagtttctcgacagctcggtcgagaacaacaagatattagaaaacaacaccaaaggcggcctcaagcgatgtggaggacagggcgacgtcttgagtggtacggttggctgcatggccgcttgggcaggaatgtgggcagaaggagattacaagttggtgtcatttcccatcgctatttctatcacttctaagcatgtcgagttcgactgaggaaatactgatccgtctgtattatgacagtgatgtgacaccgactcctccgggcaaaaaagaatccttcgcccctctagctttgctcgctaccgtaagtgttactcccagacctcttttccttcttcatcggatgaccgcttcacaacttaatccttggatctccatcatctgaaccattcatgccactcgatcagtacgctgctgcttcagtcactcgccaggcttcgagaaccggattttctaaacatggtcggtccatgcagacatcagatatgtacgtctcgcctatctcgtctcttcttgatgtttctacctccgtatcgctcgaattgttcctaaaatattgttatcctttgatgttggcccgggttcagtatacaaaacgtcggtcctagtttcgagatcatcatgggctcggacgacaaaggagagtctgaggactagatgagccctctccggatcctatatagaaccgggtctttccctctttgtgtatccttttctccttatgtagaccgaccagaagaaagagaaatatagttgttgttgttgttgttgttgttgttgtttttattgttttttgggagcggttttgcctgttatctcgtttttagaacgtatcatttgattcaaccgtatttattcccgttacgtccgtctgtttgcttcttcgagttaaattccatggccttcttggtctcgtctttcttttgaacgcgggtcagagtgggttttgatttgatacgatcagcgaacatccataaaatacttgagagcgctgaccgaatatcactgtaactatcagaatgggatacaacaaaagaagaaaacatctgaggactggtcctggatagacagagacctgcgtaggaggggagaaaagaacgatagaggagaactgaaaataacatatgttgaggaaaacattcctaatcatatatcgtcgagagcgccagggtgccaggtcaagcacattattggtaaccaacgatagacttcgggacgtaaggcttggagatactctcgatctcttcgtccgtcaatttgaggtgtattccatctaaatagccgcgtgttgaacagaaagaaggatgaaaatcatcacctcagccgtacattcaaaccaggttctctagctgcacttgaatcaaagaagaggaaaataagatagacaaaccgatgagttcctccaggtggctgatcgaagttgaaccgatgataggcgcagagatccccggttgagcgagactccaagcgagcgctacttggctcatcaacacacctcgctttttcgcgatagcctccactctgtacatcatttgttattagatatgagttgatccgtccggtagtcttaaaagggatactgtgaagaaagaaaaacatacgcttggttgatggcagttcctgcttccccaggctggtgcaggtttcgacccttgaatccgctgtcataggcgaaagtgtagaaagaagaggcggtaaacatgtgcttgggaggaaggccaccaagatggaatacacacgtatgaatcaacttacggatccgcctcgcttctctttgtctctttaccaataggtcgagtcaacatccctcgtgccaaaggctacacgaaagtataaataattcagctccgatcgaacccagctctcacacagtatcctttcatgattaacggtcccgacgtacagaccacgggatgataccgacgcctagctgtcgacacaaagggatcatctctctctctgaagaggaaccaaggggcgagacatataattcacaatgtctgtctttcagcgcacaaatagattgatgagtcaaccaatgagatgaacggtactaaccttcctctcgataaaaagcattatgaaagttctgcattgatataaaaggggtgagcttattattgatcgcatagttctgcatcgtatggactggacattctcattgaaaggcgcaacatcagtcagtcgatgttttatttaaataagtgaagatatgaataaggaaagaaaagaaaaaggctagaacatggaagaatcgtacattggtacgcataacagctagacatgccaacatatcgaacttttccagactggacgacgtcgtgcagagcctgcatggtctcctcaataggcgtgtcataatcgaaccggtggcattggagctgcgaaacaataacggataagacttttcgacatgctgttcgtgcaaagagagcgctaccaaaaaggacatactagatcgatgtagtccaactgaaggcgctccaaggatctataacatgaccagttgattcgtgaggatccaggtattcatctcgaccgatcatacgactcttggactgaaaacgatcaaggcatgtactgacctttcaacagaagcaaagatgtgctgtgatggaaaagatagaacaagatggaagatatttagaatctttcgtctctcaacttgtcacaaaaagacgtctatgaacaacctttctgcttagaccttgctggttgacatagcttcatatcatgagaaacacagaataaggcccaataagtttgacgcaattcactgcttgttgttcttttcaactatctctgcattgaacaaaatgacgaaccctttcttctcggcctccactctaccactaatcttctccccaggacttctggtggtcaaattgtaaacctggtgggatgtacaagttaaagaggattgtaagacttttggtcggtggccagataaatgagaacagatcaagtgtaatacgaactttggtcatgatgaccaggttgtctcgaggcaagtcatacttcttgatggcctatgagtgatttcaaaagacatatagaggtgagcgatcatggtcgagcatatctctgataaagaaacaggatacctttccaacaatgatctcggattgctgattgtcctcaacgcaacgtagatattgatgtcaacaaccttgttaactacagataaggaaatttcgtatgactcacacccatggagtatacatcggcggtatctatttttgacgaagtgttggagaggactattcatcagatatcatgtgctgcacaataaaatgtccgatgattatccgaacgaaccccatgtctgaacacctcggtcataagcaaacttgaaatgaggcaaggacgcttcttcatcgaggacctagagaacatttcggttattcttctctgcacgttcttgtcaaagagaagatgaaatacaagcttacccaatcttgccaatccgcatctccgtaggctgagatgggaaacaaacatccaccgaagagattgcaggtgtaccgttgtgtcagttgcgtttctaatcggtcagtcgatcagatagatatatgtcggtatatcacatacacatgcatcctctgatagagtgtgacacacaacaaagcagatgtttaactggacgactccaagcaaccagatctgagaaagatcaaaagctcttgagctcttacaggatgatcttggacaccttcaagcccgagtttcctaaccggacgtactccatctaacaccctcacgaggtcagtgagaactttcgtggatagaagagtatacatacaagctcactttgttctctgtctgttcatacatagtggatgtgttcttgcgatggctcaagtttaagaagagatatggtggtcgtcaaaagtcttacccaatgtcgattcgagggaaatcaatgaatcaatcgggttaggccgagggttgcaaagatgtgagggttattatatttgcttagtcagcttcagggtcaagctcttgtctttctctcaggcctgatgatgaacacggagacagctcaggtcttgatgtctaggagtggaacagagaataaagacattcattgtttgggttggatagcaacagatttgtacttgacgggatgacggttgaacatcggccacggaggaacaacgacctattcgtcgaggaacaggtgttagtgaatggaaggagtcgaaaccaaggagagattttaattgaaagaaggatatcgagggacgcaccaggagaaggacaaagaaagagaacccaaagatcaccaaagacatcctgatgtcctgcagtactagacccacaaggaaggcgatcgtctgagaaacagttgagagacaacgcagcagatatatgggtaagcgtatgggcgactagagcgtgtgaggagtatgtgcttacggccacaatccctaaagatagttgtgcggttcgatcgacgacatgctggccgtagtgatcctagagaaagaagaagcaaagaagcaaagaaggaaagaaggaaagaaggaaagaaggaaagaaggaagaccaagtcagtcgtttgagctgactggaatgaaagaatctcaaactcttacgattgttccctcgcacagatcagagacttgtttgatgaatgcatccatcctttgtgtgatctatagcagctaggagtcccgaaaagagatacaaaagacccgggaggtcgaaacgagatggttgttgatggtccggaggatgtttccatcttgatcgggcgagtccgaacgaaaactctcttttctcgaccaactttggttttcattcatctttctgtcgcttgaagctttcatcatacatactgttctcttcggtacaagatccatgggtatcatccggtcatctgactgctcaaagctactcttgactctagctgctgtcttctttatctcagccctgcctgtcatgggttcatcaggagaccgcttgccttccttccggatatgcctagaggactgcacacagagctgtacacctcatctaaaggctatcaccacaacagatcctttcctctggctgactagatggacctgtgtgagtgttgaaataatagaaatcttgatgtccggttgtcttgagctttgacatttctaaaatatgaattttgtatttgctcttctgaaacccgacatcatcctgtacgattctgtcgctcgacatcatatgaatccttcctgtggttctgatgatcgataaacacaaacttggttcgaaacaacctttaggaagacgaatgcaaatacgattgtatgaacgatgtcgttcagatcgaaggcgttcagcagttctatggaaaatggccattccgacggttcgtccgtcatttcgttctcttttgtccaagacaaagagctcactttggctttctgtcttcactcccctcttatgatcgcgctttgtatccaatcttgattcaccctccttgaaaacttcaataaaaacttgcgcgctgatctcaccggagagcaggctcctaggaatgcaagaaccggcgagcgtctttttcagcatagcaaacggtgtcatgcacttccgaggaatccgttcgtcaagtcgacggatcccaaaatcaagtcaattgaggggctggtacttggcttggggctatgcaggtctcaatacttgggtttggtccagtgttttccatacccgaggtctgtctacgttcttcctctcgtgcatttctttgggtgttcatctttgagagatacactgaagcagtgctgttcgttcgtctttcaacgacatgacagacaaaccatggacagaaaagatggattacttttctgctggatttgggatcacgttctcgcttctcctcgccatcgtccgaatttggcacctttacctccctccttcatccaccacttacaatctctcttccactaaaaatctgagcgcaggaaacagtttaggcgcgagtatcggccattcgagaagactacagtttaacccatgggctctcttttggacgatactgtttgggacaatgtttgtgtgtcatgtaagctatttgatgactcatgttccatttgactgtaagtcattttctcttttctttttccttcttcgcctctagtgacggacctctcaagaaggatggaagagaagatcgacgacactgagatcttgtttttgatattgcggggaatgaaatcaaagacggatacaatattgtgagcaatgtgatcatcggaagtacacataaccttctctggatgctctggtcttttttcccatccctcccgttctttcctcctccctacctttcttctccttccctttcttcctcttcggactcaagtccaaactcgaatatagaccgggaggagaggagaaagcgaccgtcccatatggcccggccagccctgattggtctcctcttcaccctcgccatgtccttcgagctctttgatttccctccgatactggataggacgtttgatgctcatagtctttggcatgcggctactgttggcatcgtcgggctttggtatagcttcctgaatgacgatgcgagatgggtaggcaggattggagagagggtttgaggtgcgctgtcatttaattaatcagatgaactatcagaaaaggagagtagagcaggaagaggttgaagaggagaaggccttctacaagatatgaatacattcctttctttcttatggaagggactaggtaagattacaaatcgacagttggaatacgcgggacaagaagaggaagatgagaagagaacactatatatctacaaacgaaaaacagcatgaaacacaagacaaaacacacaatattgatgaaatgataaaatacaagaaaaaaaaactacatgaaatgaaacgtcggacgaatcccacgttcggggacatgtcgaagggacaattgctggaatggttcagagttcaactgggcatataaaacacgaaagagcaagaagatgagtatcaggacagacagagtactgcaatctctacgtcgatcgcgcgaggttcgccacgccacaggccgtcttccacgagaacaaacggaaagaacatacatgatggaagtagaacccagtcatcagttccccaccacctatctcttcaccctcaccgtcttcactttcttcttcataccgctcatcatcctcatcatcaggttgaacatcggggccgacattgtttaattgtcggccccacgcgtccgttctaccccacgctcgatcttccgatatggtgcctctcctattagagccggcgcttgctcctccagcgtttgtcgatgatggaccaaaccatgtaacagattctcttctgttctgtccgaaatgactgatccctcgagaatccctcgcttgagcgctaatatccaagcctagattcggaataggaagacgtgaggcggaagttattgtatgccccatccatatgtctaaccctggacttgacgaggataatgcggagttccatcgacgccgtgttgactgaagggtagagaacggaggtaggggcggtgatgagggaggaagggaagatttggatatatttgttgatgacgaaggtgtaaagtcgatacagatactgcaatagaccgatgaaaatccgattagatagcagtagagagaagcgaggggtcaggcgatcgataagaacagacgaactagtagaatccagagaacgaagcgccttcgaccgaagactttttgtggtctgatagagcgataaaaccgaaacaaacacaagagtcaatcaagaccgatagatggatacgagatgggctaggtgatgctcaccaggcaccaaaaatttttccttccatctcatgaaaactccacctcttgcgcctgattcttcacctacgtcaccaaccacgccggccggtccgacgacacagtcatccatcttccgctcttcccgtctctgaaaaccggccttgaggggctgaaacagcgggaacttggaccaatgggccagatctgtctgagctgttgcttcccactgcgagaagagatcgagagagagaatgtgaagatgaataaacacgacaaagagacggatgacgagaaggaggcgaatgtactcacacgattggtctgaaagctgaatttggggccgatgatctccccttcgaaaaaggtggtgagcctgagaaaggagatcgcaattgaaatcgtcacgtctggagttagggaccatcgatgcggagaaacgcaagaagaggtacacaccaaggaaactcttctgtcaagccctgaatctccagaaagccgcagagtgtgccttcatcccagtcgacatctttgatgatgacttgaacgttgtaggcattcttacccgatctctgagttcctctaaatttagaacctggatatatgcatgcctgaagggagagggagagaacagcgatttcgtcaacttcaattcctcaactcaatagagcagtctacagaacgaatgccacgcacatgacctttctgaggagagggcattcgatggtttgaggaaggacaactctccggtggaggcagatacgatatggagggggacggcttgaacggcttaggctctatcgaggtcgatcttgtcgacgacgcgactgatgacgacggagaagaaggtgatgacgaagttgaagctgacgaggatgacaagaatgcagaaagagtggaagatgcgggagaggaggacagagcgtctggagaatgggtttcagacgtcggagaatcagaaacagacgaggaaggatgaaggagagatgactttgtagacgggacatccgttgtcatagaggtcctggatggcggaacattggaaagcaagctgatgggcgattggtcatgagagggtggagaatcacgagctgcttcatcctgggaaggtagacgaggctgtgacagagttggacatggcatataaacgtgttcttcagatgggtgcatatgaacatgagtggagcttgagggttctgattgctgctgctgctgctgtgagcttgctgtcttgtccagctcaccctccgcaagagggaacacgggtaagtctatcgatacaggggtcgatgcaagattcggaacggctgtgggagtggacgtaggcgtagaggtaagactaggagacagcagctctgtcagtgtctgtaagggttgaggcgagctgaacgatggcatggatgtcgatgtcaaagacgatggttggcagataggagattgaggaaccggtagaagcggtcagggcaggatgagcggggaaactgaacttaggtaagcgttatttgaattaccagattcaaatattagataagcctcgtagacttatctctacccgccgacgtcattcgttccgttgagccatcaagaaagcaagggagagagcaagcagagttttatcatcatacactcatcctttgactatatagatacacaggatgatccagctactatattcgttcgccaggttctacaatgattccttccgtcgttctcctggcacgactttggctctcaccaacggagcgctcaccgggtttgccgatgcggtcgttcgtcttttttcttctctctctcgcgccttctcagcctcgtcgtagatcactcacatcttctttcttttctcgtatcaggctcaaacgacccagataaaggtaaggttctgttcggattagaaatgttctgttgcgtttgtgttcgaaaacattcctaaccagatggctcatactttgacactccagtttcttcatacgggcacccacgagacaagaccgatctacgatccatggcggacgctgagattccttgcgttcggtgtcgccatcggcccattgagtgagtgttggccgaaaatcgaagtaacagctgaatagcttattgaatctttcttggtatttctctatcagtcggcaaatggaatgtcgttcgtccttcctcaaagccaatctctgtttctcatcatcgcctcttttaatcgttccactaacgagctacctcaaaatcttcccccaacagatccttgagaagaactttccccttcgaccagctacggccaaaagcatcctgacaccgtctaattctggagctaaagcggctggatcgattgatccaaagccaaaggtttccctcgccgctctcggaaagagagtctttgccgatcagagtacgtcgttggcgttgctctctgttcttcaatggccaacttgtgaccctgataatatctactttgtctctgtttgttctcagtcgttatggctccaatcggactggttctgttcatcggtacgatgggcgctctcgagggaaagtcgatcgatgagatcggaaataaatacaaggaaatgttcggcccagccatcgttgccaactggtccgtttggccggcgattcagctcatcaactttagatatatgcctcttgcctacagggtacgtctatcgttcatcttttcctccttcttgtggtttcgttctttgccttatcttctcgtcttttctttctgcatttgcttatccacgttttatccctataggtcccctttcaatcgtcttgtggagttctctggaacttgtacatctcgatcctcaactccaagaccgataaactcgccatagcggaagcagagaagaatgcgttgtctcttatctagctcctgaacgttctcgtctttccctctttcttttcactctcatcctccatcttgctctctgtcgctctctttcattagatccatgtcacttagagtagattgatcaagtagaaaccgtctctttctcccttatctccatagatgtctatccttctttctctctctctctctctctctctcttccttcctttcttttctctcattagctcattttgcctccatggtaaggtcagcctggacaaaagtcatagatcaatcgtctttaaaccattgactgttcgtttcttgttccgtttcacttcatcggatctgtgtttctccttgtgttcttagtagtgtggcgtagctcgcgataacacttttgtagttttcagaacttttggttgcctcaatatttcgtacctcccatcttgatatatctctcttcatccagctagaatcgaacgagaggccgaagcaaagaaaaacacatatatccatatcgctttttttttgtctgtctagtaaccaacagggttcacacggtgcgtcaactgtttcatgccaaggaccagaacacaacaaaaacagggtaagagaggaaggagtaagaatctgaaggatgtgaacatcgtgcaaagagtaaaacacagaacaaaccctggtgaacttgggaaccctgttgagcggtttcctgtatccaggccacgtcctcgagaaagtcgtgtacttgtctgtgcagttcagaaatgcaaagatattccgtcagtcgaccagtcatggaaagtcattctagacgacaagaaaggaacaagaggatagagttggttgtactgaccgatagcacgcatctcgctctccttaggcagggccaaacagttgtcctgttgttttgcccgtccccaaccaaattccaagataagtaaagacaaacaaaaagttatgatggatcaatggccattctgattgagtcgagcattgcatcaaatctgtccttaaatgaccgcagaaagcacgagacccgttccaaacaggacgaaatctctagcccttcatccaaagacgcaaagaggacaaagcaggcagacaaccaggggaagagacgatacgtacgagcaacttgagcttgacaccactggctctaacagcctcgatcacctcgtccaccgtcttgagtcgttttcgctgaccggccttttgacacggtgacatcttcgcgttcactttgctgttagtttgatgaaatgcattgtgaaagagggaattgatcgaattcaatcaaacggcgaagaagtcgggagaaatggtgagtaggataaagaaaagacatcggacgaatttgatcaagagttatataaagaagttgaactcgaaatcacttaaatcggaactccctgcttctcaagcaagccgtttgagagaaacaaaacttactggacaaggcctcctagccgggcaagagaagggaacatgttggatagagagactggttgtcgatatctgatggtcaaagcatgcgtttgaaatgtacggggtgaaggaggcaaggaagccagatacccttatataagatatttatgatattcaaaaatctatttgtgcccatcctcatccttctctttgctcgttttgaatactcgacttccatcccatcagacaaaggacgatcagtcttgaaacacgctacaccaatgtctctggttctacccgcacctgtgaatgatcatcaggaagagattcttccggtgtccagaccggaggaagggacggatgggaacgacgtcaacctctcagaaagtgaaaggttgaaagcaaagctgatttatcctccaccagagatcagaggtacggctcttctttctctcctcttcttgttttcttctttcgcccaagtctggtatcttgtgggactgaggttcatttatcgctcaaagatgaatatgtgtctagttgaaattgattgaatgcttacttgtgcttctcgtttcaccggcttgggtttcatcttccttttttcttaccctcttaaacgcgatattctagttctcatcgaccgaacctctgccgctcttcaccgatctgccaacccgacccagctcgagtccaaaattcgagaaggccaaaaatccgatcccaagttttccttcttgaactcttccgacccgtaccatacctactaccagtactcactcgcccgacttcgagaaggatttgcacaagacggagcggctaccgctgctggaacaggtgatggaggagatattgatggaacaggcgagagaaaatctggtgctggcaaagaagatgatctggcgggaagaccggttgagcccaggaatttggagtttttagtagaaaggccgggaatgccttctgtggatctgtgggttttgcttcaatccaacctttctgtcttcttttctcgctattgaacgccatgttcttgaactcacgcgtcttattttcgttaaacatgaccatcattatcttcagagatattcttaaacttaccgcccttttcaccgctcgtcgaggtcgatctttcctctcctcgctctcccaacgcgaaggtcgcaactatcaattcgactttcttcgaccgacgcactctctctatccagtatttaacaggatggtccagcagtatactagagtcctcgttcctccgcttgaggcccttgaggaactctctctgaacgctgagacaagaacgggaagggagaacgcgttgaaggactcaaagatcagattagaatgggagaaatggagagtcgatcgagcaaagaagagagaggatcagaaagaggcccaaagaggttcgtcgcgtcctcttcagagtgaccacaataggttggtgaatctgacctatcgattctattctgtttatactcttcgtagtcgcgttcgccgagattgattggcaagatttcgttgtcgtcgagaccatcgattttaccaccgccgatgagtcaaccgaactgcctacgcctacatcgattcatgacctcgagaacatgaccctcgcccagaaacgaatggcttcccaggtcaatgaagttccgctcacagctcaggagcaagctcagtatgcccaagaggaagctgccgaggaacaagtcgagattgttcagattgatgaacaatcggaggaagacaggttgaggaaagaagaggaagagagagagagagagagaaagaaggacgttcagagaaagtttgtcgagggtcaaggaccgataaagatccgaaaggattatgttcccaagtgtgagttggtctattattgatggatcggatagttctttgttcgctaactccgtctcgttcttctatactcgaattagctcgacaaacggcactggctgttccgacgacaatctgttcatactgtggacaggccatcccgattgacgagatcacggagcatattcgaatcgagttgctcgacccaaaatggaaggagaggaaagaagctttggatgccaggaaagctcaggccggtctgcttcagcaaggttcgccctcactcttgatttgtgtttatctaagaatcgaagactgattgtccgttttacttgcgcgccacgtatatatcaataggagccaacgtgtccgcctccctccgagatttggcctcggcacgaacagacatgtttggttcgacagaggacgagcaggcccgaaaggtcagagaagagcaggagaagttacagaggagggaaagagaaaagatgggttgggatggacagtccagcacaaaagtatctacaatggacaagttccagcaaaacgcaaacttcgacgaacaaatcgccgctatccacaaagcgaagggattggccatgttcgttcatat

SEQ ID NO: 725 - DNA, 33388 bp, Xanthophyllomyces dendrorhous
aaattagcttttcaaatcaaatcgaatcagtgtggaagatgccgctggtcccattggacctggtccgtccgccttccctgtctttaaccctgctgttccgcctcctcccatcacggcccctgttctcaatcctaatggtgccatacctccttcgatctaccctaactatcctcctcctcctttcaactctattggtgcacctactgcccttcccccagcatctactccgtcggccgctcctcaaggtgcgccgccctcgatccatccatccagaatggctgtcatcaacggaggagctccccatacctccacagaaggtgcaacaggagaaaacaccaatggcgcggctgctaccggatctgtcaggtccagagaggacgatgggacagaagggccggatgcgaagaggagcaaggttgaaaagttgccagacggtcaattgcattctgaagaagcatggatcgcttctcatccttatcccatcactcttcaaatccagcttcccaagattgacggcaagcctgaacttgatggttctttgtacgttaccatcttcttcactctccgatttttctctctaatgatgtgtatcggtagctgatccttcttcccctttaccactgacttgctcgaatgccaacagaattactctcccagctctctccctcacaacgaccgtcggaatccttcgagagaagattcaagaagccacccagacaacccttacgctttccaagatgagactcgacctgccgaatggaaaggtgctcaacaacaagagctcgcttgctagtctgaacttgacttctggggattcgcttactctgggagtcaggaagtagagcgttggtagatcgcgcttttctggagcttcctcctttttattttattttgttatttctccctttcttggttacggtgtttgcttggctgcagatcatgttgatttcccgtgaggctgagtatgttgacgatgaacttgggaacgaggtataccggtgatcaaattcccctaaaagttcacctctttgtatttgattgattttaaaaattatactttacatattttttttcttcctttatcatttcttccacgcttgataataaacggaaggggaaataggcttggttgaacttttctgtctgtgtacttgtcgtacgactgtaattcgtcttcaggcacaaaattcgctcattcgtggccaacaaggagaggatgtcatatccgactgttggctgatctctgacacaaggcttcccatggttcaaccatatatccatatacataagatcgtcaaatatggacggagcctcaagtccaatacacaagaaactttcatacgcccaggatacacccaactgaccaagcatacagcggaaggatcagattgtcattttggaatgagagggcttcgagcagacaagagagaacgacagataacgcgaatggaagatactgttgttttccgagatacatcatccggattgatagagagcaacgaaaaggtgtgagatcagagaatatcaggtcagtgggctagaaacagacttggacttacgttgagcgtctcgatgatgccgaaaagtcttaggattagagccggcccgtaaacacccacaaagaaggccatgctgccttcgattgtctttcctgatgaaaacgaccaacggcgttttccaatcgatcggcctacaacggaagcctagaacaacgttttaaaaacatcatacatcgaaaaaggaaaagaaaagtcagtcacagtttacaaataggagtgattgacttctcgaacgtacgatcgcatctcctattcccaaagtcagtacgccgacataagacagtattggcgacggactttgagagtcaaagccatggtcggcgacatgagtaaacacacttcgaacaaacaaaggaaagagtggaagataaacgaacctttccaaccaggcgcccatcgcgcagcctgtcaagagataaaagtggctcaaaattgccgtgcccgaatccttgtgatcgaggaattcgttcaagaatagatgaactgaggctccaaacggatacagcgcgaaatatcgaatatattcgacaaaaacaaacgaggcgaatgcaaaagagaaggccagatgagtgaacgccggctatcatacgtacacaaagtataattaagacgagagaagggttgatcagcttaaccattattatggcaatttcaaagatggataaggtagtgaagtttaggacgaacgtcaacatataatccaggaacgaacatgagtacagcgagtccatgaaagaattttcttcggccgtttagactgaggactggcacccgaccaatcatttccctataacctgatccaactggttctgttgacccacccgacggggtgactccagatgatgtactacctttgccaactgtaccagcttcatcgacaatatcccctcgtgtcttttctctcgatctctcaactggggactcattgatcccagcaggtgagcctgtcctagctcctcccactgcagacacaatgccttgcctggatcctggtccagatattccactccacggtcctcgcttcctagctttcgtcagctgcatctcccatcctccaacactaatcacagctaataggccccagtatcccaagagtgccagacgggtccaccatctttggccactaactgtccagagaacgacccatacccaaggatctctccatcctagttgccaccgggtccaagtcccaacagcgccaccgacgatgagtatcgtcccaccatagaacccggcagcgagcgctttacgttggcgctctttctgttcaggataccgcagtcgacggacaggtctttgagatatgtatcgtgaaaggacgaggagtggcgaaagaagaatgccgacaagaaaagagccgggaaggagggcgagttggaagatcaaaagaggagttgggagccgatatgtttgaaagtaggctgtggtaagaaatcgaagagagacctatgtgaagagggcttagatcatcagttacgtaccaacaatttaaaaacgagaacgaaggctaggagcttactctggctctcgttaaattgatagtttccatgaatagcgcggtcgaaaattgggaaacaatcccaagctcgccgagtgtgaaacctttccgggcaagtcggacacatacatacattgagaactgatgaaatagcgaagatagaaaaatgtctatgacgctgacacctggatgttcatcgttggtgttcgtcaagatcatcaccccaaatcagttgtttaactttgttctcaattttccgccaaaaaagctatacaaagcaaaacagagaagactcactatcccaaaggaagataccgaagtggctcatgaagccttgtaatatgcctagaaatagactgaccccgaaggcgagtgcgaccacacttccagttcttctccactcgctttttggcacccaatgtgacagcttcgtttcggatcccttctctgagaatttccctatacgtcgcgatggatgagattcggtcacacctcctggtacagattgattgattgaagacttcaataggtgctgctgctctcgtcgtcttgataagagaagatgcagaaggagaaccaaagatatgacggtagacagcgaaacgagagagcgcctcgatttggcgagagcctccagggcagttcgtggatttgaggtcaacactgcgcagggagagagaggagctgatgtattgacggacagaacaactggaggttcgattaaccatccggctggaagcgcgaaagtgagtttatcgtttgagagttgatgaagggtagagaggagtaatgaggccgacaggagagggccgaagagaagtgcgatcaaggcgccatcgtctggacagtctcgataatttcgttcatccgttccccaaacaaatccttgaagtccggcatatgtagctgaggagaaagttgatttagaagaaggatgcaggttgtgcgtttctctagagggtgagtgagctcgatgtcgagaagaggaagatggcggtatggtggcagcagtggtgatggatactgtgttcactgtaggagaagtaggcggcggaactgaagtaacactaaacggtctatagaccacatatactatgctaagagcaacaatcgtgaggagctctgcatatagttcattagagaatgatgagtgactttaccgactagtctccagggcaaaagagaaggagtactcgacgtacctaatactttgtaacggtcctcgtctccaccctcgcaatatagtccaactgcggctcccaagactggagtgacgaccaagattgcctcaccccatgctcttgttaattggaatcccgaaaagttgagaggaaaaatggctgatgaaggttgcgctgtgaagggatgacgtggtcgactacccgccagcaagttcgcgacccctttgaatctcgataccgctgccgccttggatgtcgagttcggttgcagttccatggaagcacgcaaaggaggtgaatctgcagacctgggtatgcgggcattgctctgaccggtgaaatttgaccaagaggtgtcgggaagcagaccagatgaccggcgttggcctggtaaccatgcatggatgggatctgagagcttattaagagggctttcgaggtcgtcggaagtactgccaccttcccggtctgcagctgaagtgtccccagtggtccatctgacatggcttccactaggatcaggagtatgattgacctggtgattggttgaccctcttcttgtacttacagattgcgccctggacccgactttgtagccatgagtgcgaccgtgactatgtccatggttaagcttaggtccagggatggtgctcgattttctctgggacagaccaccagacttgccgtcggatgagccctggctacccgcattccgcctaagagggggtgaatgatcttcctcatccgacgaagaagatgcttgagtggaaggagaagaaggtgctggagaaggaatccggatgtgcccgttgccagtcggtttggcgtgaagcgagctaggatgaaacctctttgtcttgtttgaagcggaaatggtgggagctgtatgtgagagtgtgaatatgtgtctgttagtgggtctagactcttattgaagagagttcgccgttattctttcggtgatagttggtagtgttgatgatgttggtggtggtgaggagttaagagatatttatattgagggttcccgaagatgaacgtcaccatctaccatcagccatcaacggcaacaacagcaacaaaaacaataccatgcctctttactttgttactgcttcatccagaggaatcggtctcgagctggttcgtcagctatcgaccaatccagacgtcactatcatcgctgccgccagaaaaccgaccgagtcagccggtctgatggagatcgtcaagaacgcgaatggcagagtcgaaaccttggagttggatgtgaccaacccagccagtatcaaagtaacaaccttgttcctctctgtctctagactggtgatcatgggcttgacatgttctcgactcttctcaggctgctgttgatggaatcccgaaactaaacatcgtcaaggcgaacaatggcacgatcgataccgttctgtacggccagttctttcagttctaccaactctcttttgccgtgtttcgtactgaacggtgacaacggtatctatcattcgatgaaccatgcagacatgtagcaggaaccatgtcatccggctggaaacctgcaactcgagtgttcgtgttttctcgtcaaccattcttatggttaccatccatctccttgaaggtatactgacatatgctgaaacgacgcctgataggtctatcgaagagcttgagttagacaccaagaccaactaccatggccctattcttctcaccatcgcccttttaccgattcttactttatcacctcccaagccacagacggctaaggttctggtcatctcgtccctcatgggatccacaggagcattggacaagacgggtgactacgcggcctgctactctagcacaaaggtcgcggtcaacatgtggttccgaaagctggccattgagattgcgaccggcgcagccggggtcgatgcaagaaacggtggctggtgcataggttgcttacatcccgggctcgtcaagacggtatgtcaaatctcctgtatgaattgagtcagacggtatctcgatcactgtagtctcatctcggttgatggttattgctgtaaaggacatgactcgaatgagaggtgacatcacagttgaggagagctgtagtggaatgtgcgtcttggaatagtcttttaccttaaccttgaatattctttcctttctgatggttctgactgactctttttgtcgacgatgatactccatggactatcaggatcaaggtgatcgatcgactgtccgaatcagagaccggaaagttctttgattggcgaggggaggaggttccctggtagagctccggaagtccatgatattcaatgtattgcgtttatcttttgctccatacatcggcagagttatattcgaatgaactgttatgcctattctcttctccaactgccttgtatgtgtacgaaacgaaggtcagatggatctatgatcgcaagagggatctgatgaacgtcgtcactaccaggacataagaaggaaatcagtcgcgtcctttcaaaacacgcgttcaagactttcggctactttgtctcctctcttcatccaaaacatctctcttcgctatccatctcctcctccctctgtcttgtgaggttgcctgtatcttcgcgatgggttcttcgaggaagcgttctctgacattgccgacatccaaaataaaccgtttgtttcggcctttcctctccaaaatctctcacctcctagcactctatcctacgtcagctccaccatcacccagccttcgagctaccctaggtcctacctctaccaaaacatactctcgctcagtcaagaccgagccaacaccaagtgtatggaccggaactgccacaggtctaccaatatttcagccgggtaggtgtatgagacggcgtccgccgggtccgatcccaagagaattgattcctatagcttctccggcctcgagagcgaaaggggccgcgaaaggagtcgtccaggctgcccaccatcctggtgtaccttctggggttgatatcgacgaactttcgtacgttgatatctttgggtgcctgtgttcttccgattttcgggtctttcatagcgaatttcagccatgatgcacaatagctaaatgacgactgtgcctctccctgcccctccactactttaaacataacaaaggaaacggatacacggcgtcgtcgaggctttcagaaatattctcgagattgcttatccttcacaggatgaaggaacttcatttgaaccgcttggtgtggtctgcgcacggaatgtaggaggaaacatagaaggttggattaaagaccagctggacgaagagttaggcgaggaaggacctggagttggtgatgatgttgatcaaaagagggagggacggagcgtcagtctgagagacgaatggtgggaaagcataccggaacattttcgaaggtaagtcggttcttgtgagaccatgcaagtctgtcctatatagcagtctgatcgtgaagaaatgttggttgcttgtttggtctcccagatacgctatccccgtccacgctctctctatcctgatttatgccgacattccgcttcacagcttctatgaactcattctagatgcttgcattaaacaatctgctgtctatgaggtaggtgtgggttaaacttgggcgggttgagtcagctgagacctctctaactcgtatcctcaagggatttctcttgtccattctttgatcttcagatctctctagttttgccccacttgattcttcaggcatacatgttaccttcgacactccatcctcctggcccttcctacctccctacacttgctcggaaagttccttctgtagaacatccgctctctgatcgctggccccaaattctatcgaaatctgtcgttcgtcttcatcggtggttggacgaagaagagagagcagtatgtctacctttcgggtctgattaccgtgaggttcgttggctgggtgctccaatcgatggcttaatacgagacggtccgaagaagaacagttccggcgctgccttcctcgttcacttgctcgatgggttcctagaagaggtcactctgacaagtccaccattgtctgataagtttgccatcaggttgagctcttgggtacagtaccagatatggctgagcaaaaagttgagcattcaagaagattcagcctcggttgtcaaggaaattgatgggtcgctcacccagctggctgctcttatgcgtgaacgtcttcctccttcgacttccaaagtcctttctggcgcgctcctcgctttgaaccttcatgtcctttgtttggacaattcaacactcaagaacgaagatcgtatatctgtagtatcgctcttcgaagacaccatcgattcagatacggccaccttcatactctcctctcattcgacattatcgactgtatacactctgtcgtcatgtcttcgatcactctctcttcccaatcttgaatttaccatcttacgacgcgccatgaatgaatacgatcgactcagcatctttgatacaaaatccaaactatcggctggcgaccaaacccttcaaactactgaatgggaaagtctgcgcgacttgacaatttcagcccaagcccgatgtgctgctcaggcgactgctacacctggaaatcccgtgaacggaattcgttgggaagaactcgttggagactgggtcgaggtcacaccaaatatttccaaacctagccgaatgggtacaagaaagaatccgcgtgcaaggtctctttctgtcgagtcggatttgtctgtagatgaaagttctgacgatgaagactcaagtgaaacgtatgggtcaagagcattcagcttgaaatcaagacgaagatgtcgaacgactatccgtccagatcctctctcgccttctagttcatcttctgaatccttatcgacttgttcaatcagcggatcaacgcgctccgagaggaccactcaacaaagcgatcgtgccatttatatcaacccacattccaatctctacgatacccataccaacgctccaacgaacactccaaaatctgtgactattcaacaacgtacactctacactccgtacgtgcctccctcatctccttggctccgatcgatcaatcgaatccctagatcaaccatctgccctccaatctcacccgctccgagccgtcctcccaagcgacaaacagtcgcatctccaagtcctgctcgggctttgtctctcaagacagccaggcttgtttctcctccgagaatgtccatcctaaaacaaacctttactacccgtacggaaacgattccggggtctgaatcgtgcaaacagatgataacaaagttgagaaaggtgatagatgaagatgaaggaagttctgatgagatggatttgttcatggcggactcaccagtgaagccactttcgaaatcgaccaacgacaacagaaaaccgaactattctgtccatagcacggtccgatcaagatcttccttgcctggccctgacaagttgagaagagatggggcgaagaaaggttcagggaacccattcaaagagatacgtccgagagcggtccttgatagcttctccgatctgtagatagatgatgatgaggaggaaatggcgcgcgtgtgtatgctctatgacttcttgtgatgcctcgataatgtctcctcgtaacgatcttatttctttcattcatctcttctctctcaagcaatgtttcttgtagaaacatatttttcccgctatataatgtgatgttacctgctgtcccacgtttataaagagggagttgtctgtcttactcactatgtaccggaaatgagcaatcaagaacgatcagctctgtattaacttctattatacatgttatatttttcctctcatctgctggatttctaagctcttatgatggcgctctcggctgcttccttctgctctcgctcttgaacaccctcgatcaacgactgagtcacgacagcgtggatgtcctttgctttctccatcagagtgtccatcacctgtgtggcagattttcggaggaagcgtacaacatcgtagatgacaagttcagttgatatatcagtctttcgtcttgcaaggctagataaagaggaaacagagaaagagattcaagtaaacaagaaacacaagggaacactaacctcaacgagttgctcgctcccaatctttccggtctgccagatgttggtgaccacgccaagagcgggcatgcacgccagacttactcgggatgatgctaggaaggactcgtgcgaggtcggatcgagatgcagtttcgaaccaatcgtcgcctaccaaccatttataagacaaagttatcacacaaccaatcaattgtaaacatcaggtttgttcgatgcctccgaaataaaataagaagctgaagaaagaggcacgcaccgagctgacaccaacgaccaacccactcatctcaactgtgcctcctacggcagctaaagcagcccccgccactgtcgctcctgcactgactataccttccatcccatcagactccaatacaagcaagtagacgtccaattgtgatttgggaaggaggtgcaatcgaagagcgggtaggagagattggctaagcaaagtagcaggtgtgggaggttcggtgtcctacacgagtaagatccgcgtttgatatcacggagaggagctaaggtttagccagaatgatcgtttatgatagcacttggaattcaagcatgaaaacacgtacccgaaggggaaaccgacgagggtcagacgcgaacggagcgtatttgacttcgatgttaagaactccagaagcagagtaaggaggaggtttgggacgaggtccatatctatcgcatggaagagttgttgtacatgagttgagagtctgacaatgtattcggagcagactgaatcctttcagattattactcacacagcacaggcaatcttggtgttctccatttctatgtaggccgatccattagcttggctgatgagtccagtcttcaaaactatgtgaacagtatcaaaatgggaagtgagtgatcgaatccgacagccacaagatcacttatgaacaacttccatctgttagaagaccaaaaagcacatacagacaggccggacgtcacccggactacgtccttgtcgctgatatgcgagagcagcctcctggagggaggcgaaaggagcgacggttgtgtttgcgttcgaattcaaagtcgacatcgaggttgaggctgcaggctgaggcaactcgtcttcgtagagcggcggaaaggacacctcaggcccattaacacgtcttcgatcgaagaggctggttgtcattacttgtttctatttggtggttgacgaggtgaacagaagagtgaggtgtacgttggtggctgttgtaagtgggtcagtgaagtttgaaatatttcgtagtcttttctttgaatttgatacaaagttgactacacacaatcgtaatgaaaatcactgtgtactaccatcagagattgtatggctttggccactagacggtaatttcaactgatggtggtcgatacgtgatacttcaggacttgggtatcctcaaaccacagaccaccgacatattattaactaataagatttgtttacttctgtctgtggagcaacctcagcttcagcctcagcagtcagagcagcagcggcagtgtcaaacaccagcattctcgcaccctggtccgctttctggtgaagggctagaggcagtatgttgcgcgacgcattagaatttctgattcatcaagtctgagagcaagcagagaaaatgacaagcatttgagacatcattttaggacactattctgagatatataatacacccagctttttcggcagaagcttcgacactctctaatcgcctacatcttactcatcaccggagactcgccatagcacttagcacacacacttgacgtcgggaactcccgaacttcgagaacttaaatcagcggggaggaccttagtttgagaaacagtattcttactgagccagaagcatacacaagagaagacgatgagaaggcgctgtcgccgaaggccaggaaggtgcgtagacgtccttccgacagacggagtgccccgctgtggtacgcttgctctcggccgatgtgcccactccattgaggaagtctgtaacgtcatgtaacgaagaccgttaaaagccgaaagcaatattgatcaagcgaggcgagagcagcgcggagaccgtcgagactggcagttttgaatgaaggaaggtctgaggaaagagaccgaagcgagcaaataaggtgaggagggtagctcacgaggccagcctgagcgtgagaagcacttaccacggagagctgttgatactgccgcttagatcttcatccaaagttgctgtttctgatgatctcggtcgatccccgcaagatgcttacacgacttgaccgacagcgatcactgagtaccctcttcagccagagcgccattgtctagagacatgtccagtcctcctgtggccatcgagagaagcgtttgatgagccggttgagcagagctcttcacggtgaaggcaactgacaattattcaacgcggacggttgtcctcatcagtccgacttctttatgtcttataagctgtcgagattggtgcatccttctttgctcaagatccaatttcaaaggttcgacttgccatgggccatgacgaaaaaatcgtgaacgctttatagtctaccaaaaagaaacatgaacagactgtcagatcatcttcaatcgaggtgcctgcagttaaacccagcgatatctatatagacgcctggtgtcaggtgtatagcataaacatcagagcagtcgagccaaccgatggtcttgcagttgttctcaatctctcatcgtacaagctcaagcgtactgagcaaatatctgcattgatctatcattaccacagtatctacaccttggtgacccaacggagagactgtcactccagatggctgtatcgagtatcagccctcgattcagctctctctaggaaggcacaaacacataggattgattgcctgccagcgtaggttatctttccaaccatcaacaatcgctccggcatgtattctgcaacattctccatagacctgcgttcttcttctctctgagacacctatgttttcttttcccttcaatgtcgcaaaagaacaaactcttaaaccatcatgaaatgaaggaagtggttgttggaattgagtgacgtcataaacaaactcgccaagccagcagcatacacatcttttcctcaaccgtacatacaagaatactcccatcatctcatacaaccacatccctagattcatagatccaaatctcttgacatgttctccaaatctaatcagaacgttccggctactgtagacaatattctcgagcagattccagctttcaatcttctggtggttgatccttcttcgacattcacaaccgatacacttccggtcttgctacaatccgtctttggaatcaatgatctggtgcgtccgggagctacatagtttgtatagctatacggttctttttttggatctccgtgtgctctatcgtatcgtcctgatcaccatgagaacgaattctatccggtctctagcatatttctccccagtccgatatagcggcttttgtcaagtctccgaccaacatacggatcaccatcagttccaccacttcaacggccaaagccagtcaatatattcattccaactctaatctacctcttggtcaaagagtccatgctgtctggttcttttctcctccagatctctttgaatccgaaatgaagctcctagctcaagatctcaagcttatcaccggttggtagttgattcaagactgatcgcaacagggccagggttacaagtgttgactctaccacatgtgttgcgctttctttggaatcaatctagttccgactttggtgctcgtcgctgcttctgacagtgattttagaaattggtccatcgctctcagacatcagggagtagagcgtcctctcttgaatatcaacacctcaggtgagccatctgtcatctgtcatctgtaggtttcatcaactgagcatatgtttgtcgtcccctttgaatctagatccatcttcattggccgttctttcaaaacgaacagagacggctttggttgacaaacccgagttgcgattgttatgggtggctgctcagagaatcagccgagatgaaaaagtccgttcatgtatctgtaaattccttttggcgaacgtatagtgacgacccttattgatgatctgttgcgttgcagataaacacctcgatcgtcaagggaatgaaattatttttggtcgctgttggagcatcagctcaacctattcctgtgagcatctttctttctttaccttacccttgatggccgtttcaagtagagcacgaattagactcatttgtgtcgatcagtttgtcggcggagctaccggagtcacggcccttggtttgcttcaaagggatattgtcgacatatataactttcaagatccaggaagagtaggtcgaggtttcctagtctttgcaatctcagaatgctgatgacggttatccatacaattgaaaattgttataggtcctgtttggaaaattgctaggcaatttgttcttcgaagtggctacagcgcttcctgttaagtggctcgtttctgctgtgggcgtaagcggaccgtctctttctgtttctcggtgtaagatgctcaacaggtcagtattggacaatcactcacgtgcaatttggattatggaacctacagctgtcgaccatctctggtctttgggaaagcagtgcgagcgctagaagtatcatgatggctatcgctggtatgtccttctgacaagcagcacttgtcatgacaacgagttctgaccactgtttgtaatcagatcttgttttggtacttgacgcgctgttactccatacccaatacctttctcccacatcaaagaagatcactgctgaagaagttcaaaagataatcaaacgatatgagcaaggtcctccgaccattggttctggcctcatccctagctttcttccaggctcgaagagactggtagaccaacctgggagtggatcccccttgttttccaggagtctggtccatcaggctttaggaaaagacaacattggaacattcaacgtctggaagagcttccgtatgtgaagtgtctgctctgttcattatttcattgaactatgttctgatttctaacttgggttgattcggtcgtgcatccttgatttgtgtttggtctggggtcaaactgcagaacgacaagaagctcaaaaattcttgaccgaggtcattgagtgagttcattcgtttttctgaatgaatgaacgatggcttttactgatttcactctgaattgatcaacaatttcgacgcttaggaaacatcggttccgaggctgattggtccattgaaaggcttcttcttcactcttcatacgtgtctcgtttctcttctggtcttctgataaaatttgtcttagttgtatatatgcgtctctttgatgaacgcttagggatgacttgtgatttgatcgacaagagcatccacaggctagatgaagtacggatagggagagtggtcaaagttgaatgacgtcatagacaaactcaccaagccaacagcatacatacatcatacacacagccacggcccagacgaagcctacaattcccagcacaaaccttcccgttaacagccatcctctcgaaaaagtaacccgcttgaaagcttctttaaaaatgggtgcgtatgtgtgtatcggatgtgtgtgtcatgtttgcccggattaatgatgcttggatgtttgggtgtttgaatgttgttagcttgcgttcccattgtgagcatttcctcttcaaagatacttcctccgatgcatcgggatcgaggttggcataggagctaactctataatcaaaaatcaactttgacttcttccagctactcggttgttccaccaaagtttgtatcttctgcctcttgactttttaggttgatggattgaccgatggctaaacgggaacaccttttgatttagatcacgtacatccagattctttctctttcttgtctcgtgtaaagaagttgaggttatggaggtctgaacgcttacttagctgttttattggcgtcatgatgcctcatttgtgtcatcttctccaacgtgtctcttggtgttcgggtccgacgggtgagatagtcaagaagacggagataatccacccagaatatgcgcgaaatgcaataacggtacgcttatatctttcttaccttttcgaatcgagtgtatagaatgttgatagtagagttgcacgtgaacttgagtaaactagcttcggtcttgaaatgcaaggtatagtcaaacttgacccactgtttgacctcgaacatcggcttcaagaataatggtctttctttcatgggcaatgaattagagtcgaacatggtttgaagcgttctgcatcccgctcttcccgttcacaaattccgtaagtcgtttattttctatgcctttgaacttttctcgatctcctcttcaccttttttcatattgaaaggagcgggacggaacaatgtctgatctatctgtttgtttgcttctgggcgattgctgcgaattagcatatatatagatgttcgatctgcggtccgtcaatctctcttttgtcctattcctcatagcgagtcatatctatattgatggctgattctcccattttgaactcatggcatcgttgtctttggggatcaacaggatgggaagtcaaacagaacgcagggttcgaacctcctatcgccggccgtcaaccgttcgtctcttgtcctgattttctacatcttcctctttgcgtcgcttcatccttatgtttatcgacatattaatttactcatttcctcacatgtcatatatcatgctacgccgcattataactatactaactcaaccggatgaatgtttccaggcaatatcaaccggggtacgcgccaaaccctaaccacggatatccacctaaccagggcatgcagtataaagctcattgatccaactacaggatgaaattttgtatgatgtgaatagttcaaattttctaattctcgagacttcaggctttcgagttcttgttcttcccaaaaaccaatttgttcagtttgcgcgaattcgagagagtttgatcgattcttaggacaaaggagtgctgcttttctcccttgcttggatgcacctgtttcttctcgttttgtactcttctatctgttttttgcctcgcgtgctctccaaatgttcttagtcttttttaaatcgatcatgtatatacagccgtctttaggagatcagaactcagatcatgaatacaagtaaagagaaagatacaagtttatgattccaccagacaaaaaatatatccgtccaggagaaaggaaaaatcgggaaaagttcatgatcctgatgactgagaatgagaacaagaagaatcagtgaagggcagatgttgaagaccaggctgatcatgacaaaaagccggtatctcgccaaacgttgatccattgtaagattctgtcataaccaggggttcgtttgtcgagattggaaataaattcaagatccttatcagtctccacgcgttctatcttcagtatacatagacgagagttcaagaagagatataaaaggaacgtacacatcctgatcgactagccgagaaatggccaacgtaggcgaagccttcactgtcttcctaatatctgcctttggaatcgccttttgtacttgattgtacatctctgtgttatcaaatacgttgttttcgacaatggtcaaatggaacgaaaagtcaagtttgatgcgtcagtttggtcgagagagggtatggttccttaacaaaagaacgtaagaaacatgaagaaagatagaacgaactatcgtaatagccgatcagtaatcttgtcgggttctccaactccccctctttctctctgaccaagttgacccaggtctttccatcgacgacatcaaagttaagtcctccttttctcaatgagctcagcacgtctttccattcgaccgattctggttgtaagacatggaagcatgggacgaccgtttgctgcgatgggtcggtggaagtagaggtcatgatgggtggggtgagtgcacactcgaggataatcttggcgcagtcatcgaccggtaaccaggccctattggaaaagctgtctggcagagcgtgaattgtatcggccgactttgaacgggagatcaggtgggagagtatccgttagtcaggtctcatcttctgactcgagtggcttaaagaggaaagagaaaccaaagagaaaacgaaccttgataagaagcggaatggcctctgtctcattccaaactccattctttccgccgatgatctggccaacccttaacacgtttgctctgagtccattctcatgatgcgcgatctcgcagagcttttcgacaacccatttcgaactgtactctcggaatatgttctgagtaagcccatgtatttcgcaaggaaaattaggtatcaaagaagatagatagatgcagctcaccgagcataacccatgggcagacagagttcgggtccaaggactcgttctggaatagtcccccactcttccttccaaccagcgacggtggagatggaggatgaaaagaagaaagaagcaggctgggtctttggtcggagggacagttggatcaagttgtgtgcgcctcgaatgagtgaatcgaacgattgagtttgtttattgaaattgacactccacgcgagcttgcgagacggacgaagacagttttgagtgatttttccaacaaaagatagcaaacagaacagcatagaagagagtaaaggaggatacacacatgaaggaccatagtgacctcgttctccaggtctttgaacacttcattcgacagtcccagatctcgtctggccaaatctgcagccctacaatccactctgtcatcgttcctatcaaacagaggcagccttctagttttcaaagagtctaatacacgatctgtcgcttcgctgtccgtagaagcacggacgagacaggtgatccgaatcgaaggatctgatctagtctggaggaaagagagcacgttggcgcctagagagcctgaggcgcctgtcagtacgacctgttttgttgaaagcgcgttagcatagatgttcaaggacaaggggaacgacacgtagatcatgaggaatgaaaaagaaaactcactcgagacaaagaaggactctcagaagacttcggactagagccttcaaactttcggtacttctcgaccagcgccagctgttctttaactctttcttgggcttcctcagcttcagaaattgagttatcgttggcgaaatcttgaggacgtgtcaagtaagtggcgatctgctggatggtgggatgttcaaacacaaagttcgatgagagctcgaaaccttttaagtcgaatgtctggtgtgatataatagagctcccctatcagtttcatgttgccactcaacacggaacgaggaagatgtacacaccgttttaattcttgactttatgatctctgcgtgtagactgctgagaccacactcgaataaatcatcctctgttcccactcttatctttttggatttaagcaacccagagatgatttccatcaaccaagactccaattgatcgctagacttgatcttttgtttcggttttccgccattcctaccgtcggctgaattcccgttctcgaattgttcgtaggcggttttgatctctttttcaaaagcaacgtacacctttcgacgcatgatacttcctttgtcacttttgggcacgaccgttcccttcggaacgatgacgaccatctctagtggaacgtacgaatgactctgagattctgcattggccacattcagagctgattggatgacggattgaatctcctgttgggagagtgtgtaagaagaggggttcagactgatgagagcgccaaggtatgggcggttttcaccaaagacaacggcatccttgatgtgcgcactggaagcgatcagattgttttcaattggctatcaaggaaagggcgttttactggcatcagtctcaaacatcaaactttcaagaaaggatgcagactgacgagagggttggtcttttctccgttaacaagaaccaaggtatcatcttgtctccccacataggcccaggcatctttaatatccggatgctgaagagaaaacacacaagagaacataccaagatcagctaaatgtacgggtcaataaaggaggctcatcatgagaaaggaggacatgcctgaacatagagatcgcccgtggcataatccccattaggcctattccgagcggtcaacgagcgccatgtttgctgatcaagatcgtatgcgtcaaaccaaggtcagtccagaagtcaaagacgaccgaaggaatatgatgtaggtagtcgagaggaaggatagatgttgaaatgagtcatagacggaccttaacgatcaattcatatacgtcatcttctttgtgttcgaaaaaagcatggtccatgatggccgtctgatgatgaggaccagagaaccggtagtaatcccaagcggtatcagttttgtagtctctgtgagtactagctacctgtgcaggcgataggacatcgataaatgggatgatcttatcagaatatgttcaagcgggagaaggtaaagaagcaagggtaagaaaaagaacggacataaccgatctcagtagagccaatggcacctctgaggtggacgcctcggctggtgagcctgtcgcctacggctttcggaaacgaactccccgaccactcgcattgggctaactctgccataagcttgaccgcgtgttcatcttctgagagcagcttgtacatgtatgaaaccgcaatcaacattaccgcttcgcccatagcgagctctatgtatttgctcaaattggctgacgtcattgctagttcggtcgcgggaaagaggtaaaagggaacgacactccagagagcgcaccaggtgcacaagtgtccgtacatgtgggataatggcactggacacaaactcggaactcggttgatggcggttgagacagcgacctttcggtgagtcattggaattaattttggcattccagtcgtcccactcgagtgcatctaggaaggatgggtttggaaaagccgacgatgaagtgagcagccggatggaaaaagaagagaaaaaggaagtgatatcaaacactcaccaggacggctaaaagatcggcctcttggtctggggtcaatggccaatcccactcgagcttggcttggacagcggcctcgactttgtccgacgagtagacatcgggagagggcatgtcgaaaatatcgcattgaaagccctgtggataatgagctgcgccatccgatgcgacctggtatgatgtcgaatgggcaagtaaatattttgcgctggtcagcgacagtaggtgagcgttcactgccgggctattgttgggtctggagagggaggagagacgtcccttggtttagcgctggcgagaggacgtgtcagggaaggaagatagaagaaagacatacgaaaggagcaggacagcgtagcccatcttgagaagggcgagctcaaagatgaaaaagtcgacgccagatggcatgacgacggccgcgacaagtttcgattgtgtgtctcctttacgtctggttgttatttgggtagacagctcgagagccaatagagtggacgcagtctcgagctgcttgatggtgtacggaacaaccgagtcgagcgacttgtttgctagcttgaacaacggcttgtccgggtgagtctctgatcttgatctgatgacttggttcaacgatatgaacggtttgggagtcgtggtcgacattagtgactggaggggtaagcaggatgggcagagctagtcggttagtatgtcagtagaagaagacagagaggaatgttgaagacaaaagagaagagaagagaagaaggaagaaagacgaaatcagcgacgtctataataaggcaagagatacgagaaaactgttcgacaagatccggttcggagggaagagaaagagaagaaggaggaagagtggaaccattggcccagggcagacggcgagtgacgtgagaacggcgaagggtgaatagggaacggtggcttgggacttatagtttaaggttcaatctcgtttaattttcggttcggtgccggtgccggtgccggtgccggtgccggtgcctgtgccctggcctgagcgctgtaatcaaaacctgtcagtgaacgaacaaacaagagcaaaaagtgcgctggctcccagagctttcttccatcgtcgaaccttgtggctgttattcgaacggagtttgtgatgggcacgtggtccaattccgtgcagatctcttccaccagctgtgctgcagatcacggtctttttcatggtcgtgtgttctacagacgccggaattatagaagcttagtcagctgtttttatgtaaccatccgtagccatctgtgccttgagtcccttcacccacactcaccgtccccacagacccgatgcttgcactctctgcccggtatatttgaagggcctactagatgtatattcgtatgaagcctgatcgccatgtttgttgtgtatgattctgtctacaggtgtaccatatcaatggcttagtaatgaagagcaagcgcccaggtggatcagagctcagagcgatatggcatgaatgatacaacgaacggcctagatggatatatctggaactgtgtcataccatccggactgccagatgaaccgctatggacctactaccgctctactaggctgggactgtgaacacactgacgctttctcatctttgagggactcgttgtagatcaaaggattgattccctactgaagcaacagcggcaacgacagcagcagcaaagattttctcgcgccttctttttttctttcttctttttttcttctttttttttgttttttaattcgctcttcatctcgtcatcttgcttgcgttcttgcattctcacatcctatcacatcgctctacgtctattcagcatacacacacatacacatacgcacacatgtccatctcgttctccctcaaaggccagggcctcaagctgacatcggcacaggacgcacagccacacatcgacgcactcgtcgcactcgggccggacgtacaagagattcacctcggtggaaacacccttgggatcgaggcttccaaggcgtttgcagaggttttcaagggattgcacaagttgaaggtgggatcatagttcaagattctccctctgttctgttcaatttcttctatttcgttctattctctctcctctctttccttgtcttttactcgctcttgctttcctttgtttcggctagggctaacaacgcttctctctctctctctctctctctctctctctcacgctcgcttacacctactaggtcgccgactttgccgatatctttacaggacgactgatttctgaaattccggaagctctgtctgcgctttgtgattctcttgcccatactacctcgcttgagacactcgacctgtccgacaacgcctttggcggccgatgcgctgaaccgattgttccgttcctcaaaacgaacctgaacgtctctcactttatcctcaacaacaacggacttggacctaccggtggaaacatcatcgcccaggccctgctcgattcggccaacgcatcagaggcaaagggtcaacgctcggcattgaggacgttcgtctgtggtcgaaaccggctcgaaaacggaactgctgacctgctcgccaaagctttcgccgctcacggtctccttcaagtcgtccggcttcctcagaatggaatccgaatggagggtattcaggccatctccaaaggtcttgctcagaatccggagctcgccaagctagatttgcaggacaacacaatgaccctcaaaggctccagagctgtcgcccaagctctgccctcttggccaaagcttaaagaactcaacctatcggactgtctcctgggcagacgaggtggtctcattctcaccaccgcccttgccaacggttcaaacaaagagcttgagtcggtcaagattcagtacggagagatggacagtcggtcgttcgtccaattggctaccgccatcaagttgcacctgtccagcttgacccagctcgagttgaacggaaatatcgtcgacccggaggatgagagcgtggaaaagatcaaggacgctttggactctcatggacatcaggatgctttagatgagcgtaagtcccaggaaaggttttctttgatcttgaatttcttgttcctgacgaatcgtcaaactgacggagtgtttttttgatgccttcatatccttctctttactgtgtgttcgtcattctcttttcttttctcgcagttgacgacatggaagaggatgaaggagaagatgaggaggaggatgaggaagaagaagaagaggaagacgaagaggaggaggagaaggaagacgaggaaaaggatgccgacaaaggaacaaaacagcaagaggagaaagacacagaggtcccatcccaaccgtcgattctagacatgtctgtagacgccatggcagatgcactctcaaagatgtcggtcatccctcccacttctgcctcgaactcggtagatccgaaatcgagttctagctagttggctttctcttcttgccgttctcgtgcctacaagtttttcttcaccatcatcatcatgtacgttgaatagtcaagaaacaggttggaatgttcagagcctcttcttccctctttcatctgctttccctcctctgctttctcttctccttctaattaatgtaaacaagtatttggtggtttccatcatagatcaacgaatgatcatcttgtaacgagaaagccaaaacgaaagcagaccgagctagagagagaaagatagaataggagattttgaacaacgattaaattgggccaagtcagagttcgatcggatttttccgcccgtcttaattggatgatcccattccgtcccatcgactccatcagccctccgtacaaccatcataaccatcacatcccatcacacatctcgacacactctacactactctactccattttgtttacaagaaaatgtcggtctcgatccaatgggggaaattcagtctctttatggctggcagtcagtcttcttattgtttctctctttcccctttcttctggatttgagttcttgtgtcgtttcccgtttcctttacaaaggcttccggatgtcgatcgagagataccttgtttcgatttgaatgaagtgcattgcatcatgtcgcattccgtttcacctctgaaatgaagctgatattgtgattctgttttctttttgaaccgaccggatttgattggacttggtgggatgggtatgatcaatagtgatcgctactggttatggaattatgaaacgtgagatctttctcttccttatgtttcctttcgcttctatcgcttcggttttttggtcttgtcgtctttgccttctcgcctgtttgataacgacatgagagaacggatcgggcgaccagagaaagaaacaaaagatctgactatccatcatattgtatatgcatatatagtgacaactccgacggaagaacagctctatagtgtatgcttcttttccttcctctcttatcctcttactccttcgctcaacgctttatcttggcttttttcttctcatcgtttgatcgtatgtcaattggtgggtgtaatcttgattctttgggtaatcgcacagcggttgtcacccgatttacaacgaagggtcgatgagaagagagcgcagaaagcagaggaggaagcgtcgagacatatcaagaccgtatgttccattgctatgtatctttcctacgggtttgacaagtaaacttacacgccaacgtatcttttgttctgggaataggacattaaatcatcctcgaggatcatctgggcggcagatcgggaaccggagttacctttctcgactcgacctcccaagagtcattaaatggatctcttctttccctttcctttttttttctctcccttataatcattctcgctttcgatcttgtccgcactggcgttccttgacctcttccatctgttcgttcgcttcctttgcacgcacgcatccacacatacaaacacacatatacattcttcttttacacctgctgtattcaagtccgtcagtggtctctcctattttttttctctcctttcttgcaagtcgattttgtatcctacaggaagaagaaatcctccaaaactttcgtatatcgtctatttttccattatggatgtttcatgcatctttctcgcgtcgtgctttctcaaaaggcggataaaccggaatggattccgcaaacgagagggggaggaagaagatattcccatcgaatcaaccgctttcgaattcactctataatccagcgttctccacagccaggcctgctcgtttcctgaactcatccaaggctttcagcgcaccaccttcgttcatgctctttctcgcgagctctacgccttgcttgaacgtctgggccttgccggcaacgaccaatgtggcagaagcattgatcaggataaagtctctgattgcatcatacgatggcgagctcgaatccgaggcggtcgaaggagagaagacagacggaggagcgggtgaatcagaaagcagggccaacaagacaaccgcgttctgatcggaaggtccgcctctcacggtcgacagtgggtgggtcggcaaaccgaaatctgtagttgggtgaagagtctgttcggtgatcaaatcgttttctaaagaccagacctgttggatatgaacacaagtaggttgattcatgttggttcagaagcgcgcaacttggagacgtccaggcaaacagaaagaaaaagaaaagagaataggaaacccgagagactcacccaggtctcgccggcaggactgatctcatctagaccttcctttccacaaacgaccaaagcgcgtttcattcctagatccttcaaagcttgggcgaataccattccgagcttgtaagaatgaacaccgatcaccattccttgaggtctagctgggttcaccaatgggcctaggacattgtagatcgttcggaaaggaagtgtctttcggataggtgccagctgaccgagtgaagggtggtaaagggatgcaaacaggaaggcaaactttgaagacggagtgaggatctgggagagtgtgccgggcgggaacgttaatggacatgagagagagagtaacaggtcggctgagccagacgtagaagtcgacgcccggtttccgtgctagtttttcatttttacaagaggtttcatatgaagagaccctccaagaagatcagtctttgttctcaagctaccttgtccttcgtatcgaaacaaacacgaccacgagtcgggatcaacaccagaaagaaagcctacgactggacataccttgcaaacgaccgctccggctccagcagcgacaattccagcactcgtcgacacgttgaatgtgtcatgaccatctcctccggttcctacgatgtcaaccaccgtttcttcttgatgtaaaccggcgatatcaacctgaacggcgtacttgcgcatcacctttgcgcaagcagccacgatatctggacgttggtccactccggaaagcgtcagtgcagttaggaaagatccgacttgagcctcggatgcacctgtcggaccggaagccagatgttcgaatgcgagcgtagcatcttgagcggtgaacgcagaaggttcagacacgatctttttgagcaacggcttgaataactcttgagtgagaaggtcggtcgacatgatgagcacgttgattctagtgataggtgaggtacagatatagcaattgccagctgtggtcccggaagaagagcaagtgatggtgagttggtcggagaggacagaaagaaagaaaaacgggatgactcaaaaaagaaaagaagttcacctccaagtcactcaccgccatcgaagcgaaacataccgttttccccaatactcaacctccattctcactcccatccgtgctgccttacgttccagagatgagtctgtcaacagtagccgagcctcttgatctcgttaagctctccctttcagaacgagtgcatgtcaagctgagaggtgacagagagctcaccggtgtcttgcacgtaagtttcttccgtttcatacagacaatcatccagtctttccttgattgacctttgtctccttcttcgttcattcatccacttgtctccgcgtatctcttatcctggtcttgtttggttgtttgttttttctcgcaaaaccgtttggaaaacacgaaaaggcatatgacaatcacatgaacttgatcatgtcggatgtcgaggagaccatcaccatcgttgatatcgatgaggcttcaggcagcgagaacttgcgggtccgttcaccatctttcctccttcttcttactgacttccattgttaatctggtggagaggatggctaggctaactatgtcggatcgtttgattccttcgatagactgctcgccggaatgttgatatgctcttcgttcgaggggatggtgtcatcctcgtcagttctttccttccttgaacatattttcattctacatcacccaaatcacagaaactgatgagttctctccaccccacaaaacgtctcctaggtctcccctccctcgcgataatcgaacgaagaaaagtttagaggaaaacaagaagaaactcggttgtgtagatctctagatccatcatgttatataaatactattctctcagacagataagaaacaacggaaagctggaggttatcgctttatattaggcctgtgattaccttccagtcagaatgcaccatcagatgtagctcctttggcagaagtcttagctggggttgtcgcgtatggtcttgttgttctgacagagacgtggatactcttctcggtcgtttatcacatgtgcaattttgacctcagatggagataagtctttttatgaaagattataatgtgcaataggcaaagaaaagtattgaaagaagtgaataaaatggtagggaaaagaaaaaggaaggagaaaagagatacgtggttttgatcttacctatggaaggaggggtagacgaagatgtacatgaacgatacggaaggacatgatgctgagatagtgtataagaaagcaacctataggaagaaacacccctacaatacgcgggggtgcatgacccagaacgacgaaagctatacgactgcaggcgaggaaaagcaggggaataagaaagatagacctaacgtaaagacatgtgccctttttgagtagtgagatttatgcgagagatcacaagaaagaaagatgtaaagattctgcagtgacaagttcgagatcgggccatcgctgatctagagaatgagttgaaaaggagacggaagaaaagaaacaggaagaaacagagaagaagaacagtgaaggatgtaaggcggaaaatccagagatgaaatgaatttgaaggaaagaaggcctaggtcaacgctagacaagcctctctcctacgttctcttcgctcctcgcctggccaacggccgaatcggtcgacctccaggtccaacccgtccaggcgaaggagccacatcacccgtgcccatgctgaacaatgctggcgctcctcctggagcaggggattgaggtccagggctctcgaaccgtggaggagtcgccactcctatcggtccggctccgaaagcgaacgtcgctcctgtaggcgtagtcgttccactcggagcgactccgaagggcgaagcagtaggcgcggaggaagatgccccaaaggtaaaggtcgaagcaggcggcgcggatccgaacgggttgctcgaaggagcaggagctccgaacccagtgttggcagaaggaccagccgggttagaggacgatccaaagctaaacccaccagacgatggtaatccggcgttggcggatccgttgaccggcgcaccaaaagcgaatggggaggaagaagcaggagctgggggagcagaacccgtagatccaaacgtgaacgaggtcgaagcaggcgcaggctgaccaaacgccggactacttgaggacgatgatggtggtgcttgaccgaaagctggagaggcagattgaccgaacggaggagcatttgaagcggaaccagcgccaaatggagacgcggttggctgggccggcttgtcgaaagtgaacgaagaagctgaagccggagccgcaggggcaggtgcaggagctgaaccaaatcccccaaacgaaggagcgacggaaggtgccccgcctacgttggaagatccaggagcaggagcagccgcaggagtaggggcggtttgcccaaagctgaaaccgcttgaaggtccggcagcggcatttccaaacggattggtagacgccgctgcggttgatgaactgccgaaagggttcgctgccggcttcggaggttcagcagggatggatgcggaggctccaaaactgaaaggggtagaagatggtgcggagcttggagcagcgccaaatgaaaatcctgtggatgtaggtgcagaaggcgcctgggttgcaggcttgggagcctcactgggagctccgaaggtgaacggcttgggcgccgcaggggcgctactaccacctgacggagcaccaaaggaaaatgtagaaggagcaggagcaggggcagcaggaattgaagcaggagcgggggcggcaggcttagaagcctctgtgctagcagaagaagctccaaaggagaaaggagaagatgtcgcggttgtggctgcaggagcggtagtcgcaggcgtagatccgaaagagaatccagtcgaggacgtcgaagcagcaggggctgaggaagcagcggcaggggcaggtgcagcagccggggtagctccaaaagcaaacgaagacgacccagctggtttggctgcgggtgctccaaaagagaaagttgaaggagcagtcgcaggagccggagtcgacgttttggtggtttcaccagaagtcttctcagaagtctcatccatcgtatccattcctccgtcagaaacctttcgggaagcctttggcgccgagccgaaagagaatgatggaacggacagccctgttgcaacaggtttgctttgggcaaacggattagctgaaggagctgaatctgcctttggtggctccttcggggtgatcttgagctctgctggtttgctggtgtaggaacaaacaccagcaaaagggttgctcccagatgaagaggccgacggagccacagaagtgggagcagcaggagtggaagcagatgaatcaggagtggtgaatgtcaaactttgaggtctagaagcagcgaaagggttggaaggcgcttgagcggcaggagcaggtgcgggagactcggctgccggcttggagaagaagttaggaattgaaggaggaggtgtagactgaggggtcgttgatccaaaggaaggagctccgtttcctaaacctaaaaatgatttcttaggcgtagactcaatggcagccttcgagagtggagcatcggtcttcttactaagggtcgaagcaaagaagttgggaactccactagaagccgttttcgatccggggttgctggcaagagctgcgaaagcagaggtcgaagaggatgcgggaagaggagctccgaacgagaatgaagattcttttgatttttcagtatccttgggcttttcggcatccttgggtttctcggattccttggtaccttgtcctaggggcgaaggaatagctggagctgcaaacgggttgacagtcttgcttgtcaaatccttcttctccgcctccaatcgggatagcaaagagtcacccgaaacaggctccttcttgacgggagggatgttcagacctccagcgggcatgacaaacttgatcttgcccagatcttcatcatccggaagatcttcctctcttgcagaaaaccgaccactcgagctctcaacgggtgtttgtccacgggagccagcggcagacacgtgttttctggaggaggtagacttggctcggagggaagagcgagagcgagaagatgaatcaatgtttgtgttgggaggtagaggtcggaagtcatctacaggtttgctcggggctgcagccgaagcggaagacttgataggcttgttcggaggactacataaaggtagaatgaagtaaaattaggcgtattcggaacatgagctttatttgagaacagaggagcacatacgcttcttcagaatcattcgacatcatagaatcgctatcttcttgctcgatctgcttcttggtagatcgtcgcgttgctacttaacgttgacgtatggaacattggttaggagatgcctttcgacaagaggaaatcaatcaattctagaaggaatcataactcacaatatctctttacttcgtcactttccgcctcatcttcactctgctgccttcgcttgttgttcgctttacgtcctttgcttttggtgttcctgttctcttctctgtcccttcgatcctccatctctgttgattcttcaccctcactgtcactatcatctctgccgttttgcttgcctgccatgctgagcatatttctcaatcgacttcctccggttcgccccatcttttccttctccaagtctctccttactttaccacgtccataaggggagatcatcaggtccgcccttcgggtctctttctccttcgccccatgctccttcgaagcggtagggatatgaattcgaccgagagagaatgaccgggggagatcagatagttgagaggtggtggcagatgtaggaaggtgtcgtctagcttcagtcagaggagatcgcatagactctagggcctgcaaaattctctcagctgcgttggtagacggagggggagggggagggc

SEQ ID NO: 726 - DNA, 106409 bp, Xanthophyllomyces dendrorhous
atatatgtgtgagtttaaactgggtttggcacagtggtatgcgtcgcaaaccagattaaaacataccagcccgaagttcagcagtcttctgagacataaagcctgcatctggttcccagaccatctggccgaggccaggtcgaccgcctccaggggttcgcgttctttgtcgaggctgaggctgtgataaatcaggatttgaaaagatttgagaatgcatctagggctggcaacaccaacggataagggcgtacctcaatgctctcacttctacgcgactgatctaaaccagagaacacggaagaagactttgacatcccacggtactgagtgggctggggcaaagatagaagggtgttggaccttgggagagactttcagagataaagttaacttgagagttagttacttcacactctcaaccctggatatgaatggagcataggcgttggcggctcaaactcggcaaaggcaatcaaatctacgtacatcctctggcgcagggctgatctcacccctttgggagtatctttcaatccacctgctgcttccgcccaaccgactttttgagttgatcgacccatacagcgattcgttgtttgtcgcgatctctctgagcgatccatcccggccagctgtcgggaaagccatagtggaagatctagtcattcccgacacaggagcaggagcaggagcaggggagaagtgtcgagtggaagacagcgatggagcggctcgagttgacctggggggaggcaacggttgatcttcaacaggagcatccagatagttcatcgagtaggaagtgggaaggtatcgctttgcagcagaagaacgagctaccgctgaagacgcaggaggaggaggaggagggggggggaatgctcgagatggctccaggctgtactgtctggggtgcctaggttccagatctctataagtcaaagcaggagcgaaaggaggagatgaaggaggtgagaccctagtgtcgtatcgcttgttggatgttttttgctgtttgcttggctttccatttgctgatccgctggacgaaagacccatccatcctagaggagcagtgatgaaactcctgataccagcaagcaggccatccggttgcgattgatgatgagtcgcgactagcgagggagcaacagcggaagagttcgataccttggattttcggttatgaacaggctgggagtcgattccagacggaaccgacagctctggtcgagcgtatggcttccgagtgtgggtctttgtaatgttggagccacgagctggatgttgaccaggagcgtaggaggccatttttttttcttttgctttttagatctgtttatatagtctcccaataaggaaacgggggggctagagggagattatcctatccacgttcagcagatgaaagaaacccaacttcttgtcgttgtcgttgtcgttgttgtcgtcgtgttttctcgtgtcgggggttaacgtctaacactggtaagttctttttgttcagggctcgtcccgtcgactatgacggatcgtctaggttgcatgctcaaaagctggacccaatcgttttgcttgttctggccgaatctcgtctgttgacaagcgctgcccacgcgctataaccagaatgccactcaactggaccctcgaaggttttcatcacgatgcttgagatctgtttcagcttcacctcgacgaggagcgcaccagccaagatgatcgtctctgcggacgatgccttgacacaagcagatttacctccttccgctaatggattgcatatcaactatgcatgctgtgtttctcagcgcacttgctcccgcagttcctccatatcatgatacaaagaacagcaaagacagtcaacaagaaagccaacacacagccagcagagatcagcagaaagaagacgatggtgacgcataaccctaaccaagtttgaagatacacacggtgatcgacagagatcaacttccaggcttgcctctaacgatcaccttcccaatgagacctcttcagagaaagatagtccgttctctgccatcagaacttcccgttctccttatcggaggtggcctggccaacctttccctagctcagacatttcatcggaatggattagttcccaaggtcgactatcggatttttgactcgtacagcgcgacgtccaagccaaactattcgctcaccttacacgaatggtcactccggccgatggagaagctgtttcgaaaaaagaactggctagacaaggcagcagtagatcgtgccgctggtggagtcggtatggtcgagtccaagatatttgatctagagagtgggaaacctgttggggagctcgagctggaaaacggaggaagaagcgtgagagccaacaggggtagcttgaaggacttattaacggacggtttagaggtcgaatacaagaaggtgtttaaaaggtttgaacatgtcaaggatggtactggcagagaaggaatccaggcgttcttcgacgacggatcccatgcgtttggctcggcactcatcggagctgatggcgtccactctacgggtatgttctttgtttccgtcgatttccttatcgtatagatagtcttgagacttgctgacttgttcactccatcttgtttctacctctgcagtcagaaaacagcttctcccttcggtcgagccgaccgtgtcacctgtggtgtgtttcaccggccaatggacgcttccttctccgaccctcctcaccggtccgattccgtaccacctccgggtcgacaacgatacctaccgggtcgacgtcgcttcctacactgccttttctacaacatacaaccgatttgacaaggataaagctcagatgcaatggatctatcttcgattgcctaccggatcagacgaccctctctggacgcccgatagatctttggacaaagcgagagagataccagacgagctctacatagaattagaggacctaggtaaaaagaccgagaaggagtattcaagatttgtgctgggtgttaagaagggagatggtgatgctcaatacaactggtcagtttgtctctctttgccccttttgactttaacatgaacgcaacaataggatatactgattgagttttcgacttgcaatctgaaacacgaacgttataggctgatgaggtgtttaagacttcctccgctagatgaactcaacaagctcaagtctcaagtcgaagggggtgatcgagtattcctgatcggtgatgctgcacacgccatgcccatctgttcgtcaaactttcttctgtcaaccatccatcacgaagagacttccatctgacgcgcgttctgtcatcctttctctctgtcgtcaaccaccatcttcagtcatgggtgacggcgggaaccacgctctcaaagacggacatgacctcggccaggtgctctcgaaagtcatccgagctcaggatcaagcccactatgagtctcgatctaccgaaccaaaatcgagcgaacccgtcttgaccgcacttcgtgaattcgaggcgggtgcattggacagatggggtaaggcggtcgataagagcgagttgaggctgttgagtctgttcaagccgattgaggagtggagaacggcttctggagttgaggctggggagggggaggaaggcagtaagcctcaagagattacgctttgaaagaggcaaaaagcatagagaatatcaaaagcatcacgtgatagatcagatgggttcaacaagaagaacaaaacaaagccacgactcgattgtgtcatctttgcactgtacgaaggagaagaagaagaagaagaagaagaagaagaagaagaaaaactttgtaggatgtcatgctttccaaacggatcatgaaccgggtttggtctgtttcaatcttcttcaaacaagcgatcggtacagcctatacgtcatctttgaagtagagatcatgttgcgagaaacccagttccgatgatatgaaagaatgcaacatatattgaatgatcaacagagagaaacaaagttgtctagaggtatcgaagaaccagatgggtctgaagaagattgagaaaaggaagggagaataagttgatgagagagtacaaggtaggaaatgatgaagcatgcaaatcgaaaatgatgattggtaaggggtcgcaagatcgatgaatcgtcttcaatcattcatgccctggtaaagtgacgaatgcagaaaggtaagtgacctacacgaagaggtgtcaaccatagtaaacaaattcagaaaaagaaactcacagcttccgttgagcttcattcgatcagcctttgccataaacctggccttgataggctcctccgggatagggttaatcttgtcccagggctttccaccaccgctcagtcgccagtcgacatcgttggcctttgaggtgtgaacgagagtataggtcctgtattggtaattcaccagaatcgctcttgtcagtcagaccgtgtcgtcaaggcgcaagtttagaatgatgggagcatacatgaaagacagtgagaaggcaacgaccccgagaatagggtaagcttccacaggaatgatgcgcattcgaccaagctgagttcggagagtgtgaggagacattttgcaagatgtgttagggttgagataggtataggcgtggaagtggaagtagtgtgagtgagttatcagtatgtgtaagtgtggagatgtgtgagtgaatgaagaggcaggatcagcacttgaggtcagcaacgggtcagcttttatgggtctcatgagagttcaatcgatgagcaaaatcaacggatgtggtgtatgtttcttgcgcgcgcacacggatccaatctgtaggtgtggtttccgtcgcgggatgtccggtcagtcggttaatcaacttctcgggattttttcgacccgacaagaatgttgatgattagcgaatctagcgccgcgcgccgaaattgagggaacaaagatctctgtcaacgggtaagcccggttagcggtgacgataaagagatgaaggattcaagaaatctctagaagtcgtcgagtcaagaaggatcaagacgaccacagaggaaatgaaaacgttggaagaagccagatttaagaacaagcgcgaagaatgtgcgacaaccttcttgcgtcttctggttgagattatataagcagagtagcttaagtaagcgaactatgcttagtaagcaatctgatcggcgataacgcgatccaagcgcagcaggacactaatcatcatcacctccaccctccctccgtcgttggtcatcaaaagtctatgaaaagctcaaatgagatgatgactccgaggattctcctttcatgctatcaagatctatcacccatcctcaatccatcctcagaaagatacacaacatggcttctatcaccttgaacgatggcgctaaacttccggttcttgctttcggaactggaacaaacctctttaacaaggatgcagagattcaggtgaagcaagcgatcgacgctggcttcgttcatatcgactgtgcttcttgtacgtttgttccgttcctatctcatccttctaggatctgatgtggtggcagattccttctgtcgtcccttttcattgtcttactccatgcttctttcttggtttgtctggttcatggttgacacacagtctacggtaatgaagagtctgtaggacaagccatcaagggaatccctagagagaagctattcatcactaccaaggtcggaaacaaggatccacgggccagtctagaagacagtctgaaagcggttcgttcctcggtatacgcatacatgtccgagagcgcagatacttatgttctcattactctgtctgctactctttgtctccgtagcttggccttgactatgtcgatcttttcttgattcatactcctatcggaactcctcccaaggagaattggccgataatggaaggttggtctggcataaactctgtttgatctagtatgcagcttgctgatcatgtgcaatatgtttttgtgtcttaacaaaagccttgcaagccgaaggaaagaccaagagtattggtgtttccaacttcagaactcaagacttggaagaactgttcaaagtcagcaaagtcgttcctgccatcaaccaggtcagtcaatctattgtttcaactccagttctcttcttctctcttatcttgaaattctctccattcctctgtgtttccaacagatcgaggtccacccatactgcatcaactccatcctaccccttttggatctcatgaagaagcacaacatccacgccgcttgttacggacctcttacctcgctattcagagagaagggtggacctgtcgacaccctggtaaaggagtatgcagagaagcgaggtgtttcagaaggaaacgtccttctccgatgggctcttcagagaactggtcagttgatctacagtcccgtcaactctcccttgcgcataagcatggcctaacttggcttaacattttcctcccttatttcacccggtgatcctgttcttattcgtaacaggtggagaaattgtcacgtctgttccttcatttactatttcttctttcggaaaagcactggctttcttttcatgcatgactcatgccctttccctactttcatcaacaatcacagtacctccaacaagccagagcggctgcaagaaatccttcgagtccctgagatcgagcctctcacggaagaggagatcaaatcgattgaagaggccggaaaggataaacatttccgagttttcgtgagtttttattcttcgtcctctgtttccgagtttagtaaagaaattatatgattctaaccattcggtttctcatgtttgtgatccaaacaaaaacgaaatcaacccaacgtgatatacgtcagatgaagcacatggacgagtgatcagtttgaccggcgatgtccgatcatttgcctttgtaagacgagattggctggtatggtcatactgccatttagcactttatcaacactacgattcatgtataaatgactaaacataaggagcgagaagggcaatcgaagagtatagacatcgaacaaggtatagcaagaacatatcgaacgagatcagtaggaaaagcaaggaatgtcaaagaacaatttacgtcacatgcttgatgtagcacacatcctacacttcaataattgattataaggaacagaaaaagagaaagagagaggagaagacgtatgtaacgttcgcgatggtcctaccatcacctgtatttatcctcttatcaacgcaactctctactcgagatcggatccttgaatgggtcagctcctttatcaggtccagaagctactccatctgtatctagtccaccgacgttctcatgattcgcctcattatcaaaatcaaagggaacctcaaccgttcgctgtgggtatgccggttcgggcgtagccaatctaactgtcgatgtcgatgctgatgccggcggaagcatttgaggcgttggcacatggaacgagagatcggtcactgactgatgatggagcgaggaagaggacgacgcaaagtcatgttgatctgcgaggtcataaggatggttcgtcctgatcgtccggctgtatgtctttccgtcctctcctcccgtagacgggaagtaactgctgccttgtgctccggatgttggtacactgggcgagtaggttccgctggaagagtatggagaccgggggtctcttatatgagacgacataggcgaaggcgagctaaactgtccgtttgcagagtacaattgatgttcttcttgtctccctggaatcgaatatgaagaattggctcgactaagttttgctgacggtgcgttccgagggtaaagttcttcctcatcatctccaacagcagtccagtcggtcgtgctcgagtgaagccatcctcttttagaagcagccgttgagttcggtcgagaaccacggtgtgctcccgatcggaacgggttccagaagaacgaggaagagccgctagtttgattattactacgtcgacgccggcgtcgaaggcaaaaccaaacaatcagacccgtgatagttacaaaagcgaccagaccccagactgatgatcagagaaataaaccgaggaaaagatgtcatcaggttgattctcctcgtttctctgatttttttttttttttacaattgcaaatcactacgtacgaagaccccagaagccacctgtcgaaccggccaccttgggtatttttggtcctcgatactttgtctatatacacacgcgaaaaagaagaaccttcagcatgcgaggcaagaaaaggcagagacacaatatggactcacgtctgtcgaggatggaggatggtttggaacctatctcgttacccaataatcacaaccgaatcagcaatagttccgttgggtgtgacactcttttgcttctatgcccgctcaaaaaatggcctcaccgttccagtcactgtcccggcccctccctgtacatcagttgagaaacaaacaagcaatcgttgtcagcgcttcagaatgacaacccaaagcttgaaaacagaatagaatcgaggatcacgaacaccccgtcgttctatcggcctatcaaaacggttcaaaactttgtcaattctcacgtcggctataggagaagacgaatgagcaaagaatgggacgaacacatcaaacagtcgagcagctccttgcattgttctcgaggtcaatcgctgggcgatgcgtgttggcgaatctgtagactggttgtgcaatatcatgaacattttatgattgatatttgaagtgatccgagaaaaagaaaccatcagcgaagcacacaaacgagactaggaagacgatggcagtctttcatttatagaacgaaagaagcagaaagccgcatgtaaatctgtacgcacatcgcgtatcaactcaatttgatcagacatcttttcaaagagtcgtgttaactgtagtcgtgagtgttgcaggtaagtcgattatcgtgtcgactgtctgtgagcttgggagatcgaccgacggcggataattcacctggctgacgtttgatgtcaacacgggatctctcggtcttacgctcggcaagaaaggttagtcacctcgttgtatcaactgtcacgatcatctatccgggcgacactaagtcttgtcgtgtgagaccaagaacacagagagaccagaagatatattcatataaaataggcaagataagaaagtgatccacgatttgacatatacactcgaactactgatcggccgatgcagcagaaagaacctctctcagtcttcggaccatgatggacacataggactgtcggacgttcacttcggaaccaaagagctctatgggaagatcgacactctctagcttgcccaacgcaggactcaactcctcgctggatctttcccacatctcccttgccacacccttccggccccctgaagtaccgaacatttcacctggcgactggttttggctgaatcgaagagagacagaagagggtacgatagcattccaattaggctctgagcttccatctttgagtgagttgttgaggaagtgaaggaagtggcgccagatgaggagaagtaacgtatcgaccaggaaaagagcagaacaaccttgctggtgagaagacgtttgaagcttcgaaagctgttggagagccaaccgttttcgttgggctgtactgtacttcgaagtttcttctgtagtggaggagagaataatctcctcaatgtcatccgtgctaagcaactcgggttgagatagcttgagtgcaatatcctggaactggtcgaccgtcgatctgagatggatcactgtttcgtagaacaaagcgatagctgcagagatcgttggcgctccgtgtttgggctctcggctgcttatggaaggagatagcacaggctgaatctgctgaccaccgcccgtttcggttgttgcaacatagtatgccaaaaggttcttgtgcagatcctcaacagtcaggttcatgttgtactcgaacaggttttcagcccggttggtcccaggcgaaggccgttggctatcagcttgctcagcgtcgtttgtcggcacaaccaaatcttcccatttctctcgaaggaagaatctacctccgagagcgagaagagcggcgtggaaggcaccgaacccagacaggagtgactgtagacccgacgtaaaaaattcagtgcttgcgcgtctaatgaatcagcaaaacttaaggcgcaatcgaactaacaagatcttcttgagccacccttggcaacacatgagtaaacagagagacaagcaagctcagctctttgatagagatcaaagatgtcacagaaggagtgtccttcaagagagcaaggatcgtctctcgatgagcgttaatgaatccaagagcctgtgaatatttgagccaagaggtggacggggttttaggtctatggttcatcaactgttctttcgatattcgaacaggagcacctacctcagtaattccgactggggatgtcgagccaacgcttgacaggacaccggttgtcagctgtagcacaggaatcaagatctgatggtatctctcaatcgcagggggaaggaaagagtcgtagtctgcgagtcacgcagtaagaatgatgataaatttgagcgaccgtatctcatgtttcaaacgatagtttaggttggacttaccagtcatactgtcctcggcttcaggtcgatcttcgaacatgtagcattggctgagggtttcgaaaaggcgcgcttcaagaagacgctctgctccattccgggtgagtgaaatctggatgagcaatgagctcttggcctcgaatacatagaacgcgttgaggtcatctatataaaacaaaatgtgaacgacgccgtcagttcgacatacagacacaagtagatgacgttcgcttcaaagagataaaacttacccggatcaggaacgaggactcttcgtaactcctcctcagtatctttgagtgactgaacaaagtttcggaggtatccatgccgagcaagcagattgagcaatttgtgacttcgatccgtcctcgaggcggtgaccaaagactccaacgcagtgtaggccactgttttccaaatctgacttccgtccaacgcatccttgcatatgataggcgctagtctgtccatcgcgcctaccaagatggatagtgagccagactccaagactgatgactgagcggctgatttaaaggtcagtccagactcctcctcgatagcgttcgacgctgagtgattctcagtggtagaagagagcgtgacaagctgaaggtaattggccaagacagtgtaaagatttccacggaaaagctcggtcgttcctgctctgatgatcaactcaatgattcgtcgaagcaaggactgtaacttctcgctgggcagcgatccgttcacttttccatcctctactcgaagagtctgctcttgtcgaccttgacggagcttggtgaccaaagagagaagagtttgtcccaaaagctcactatcctgaggagtacaatctggaagggaaagatggtggaagatagcttgaaggagatcaaagatgagagactctcgctggtcaatgggaaccaactcgaatgacttgaaaagacagacgtccaaagctcgctgccacgagatcaggcactgctgcttggcgtaggcgacctcacgtcggtggttctcagcagcgagcgtcaaaagaatccctcgagtctctgctctgatagccttctgctgaggatcggacgaaagcgcgcccatctgttggtgttttcttcgaaccgcgttcatggctgatagcaaggcccgaatgtcgtacacttcgcaccctcgatcattcacctggaggcatgtgttgaagtcgattttcgcaaagaaaaccagcttcatgtcggcatcgtcgatagagtctttccactcaaagtcgagcgagagcaagacatcaatgatcttcgccaacggctgcccgtgagtgtccataccagctacatgagcgacatatgcgtcctgaacgctgagggggctcttgaagaggatgtcaaccagtttggtagcgtgcagtccagtcgggttgataatatgtaattcgagcgaaaccgtgtcgagaacaaacgatcggaaacgaaggaacgatgccaaatcagcggctgaacaaggaatctgctgtccattcgggtagatgattgatccagagatccctctcgagactgaaggagccactagagggaacgaagcgagctgtcgggcacagtaatcctctctggttcggatataccgggtggtagcttgaccagtgaattcatgcacacaaagctggtacaccaatctcgcgcacttctcggccaagctagggttttgctcccataagacgatcttgtccaagtcagcctcctcatcatcagtatccctcttggctccctgtgcgagcagttcgaatacaatgtgaagacaagagagtgtggtaccctgagcttgaggatcgtcgattgcaagctcggatgaagacttgttcaagttgaatccggacaagaagtgggcgatatttggtccaggacagctggccgctgtgttttggatgagcagatccaatatagatgatcggatgacctcagtgtaatcctcgtctgagattgacgaggtcggagcgagcaaagactctagagggtcctcgggagaccaaccatcgattgcgttgacctccagctttcggacgaaaccatccaagattcggagcgactcatcggatgagtcaatgattcctacgagcctgttcatgtgggagctgtaaacattctcgaaccgatcagttgccatgaagaaagccgactggctgagaagggaaatgatcttgacggccagaagggagaactcaagatcctcggcatagttgacaaacaaggcaatctgaacgacgacaggatgtgaatagagaaggtgctgatccagaggcgcgatagcagaaagaagagaagccgtgttgaaaccaaaggagttggaagattcagccaatgtaggcaagagaacctcgatgaagagagactgaatctgcaggatgcggtagacgattcggagcgatcgaagaacagccttggtcatcgagcttgttcgaccagaatcttccgccaaaccatccagaccgacagacacgacctcgaacaatcccttgagcaaggcaggctctgtcaagaattttctcaagacctcgaagccaggatgcaaggctaatacaaccacagccgagcgttgttggccgccagcctttccaaacgatcctccagggtatcctccaacggcttcctctgccaacagcgggctcaggtcgtagctcgcgagacacttttcgatgaagcagagcgatcgctcggtcagattccacctctcggcaggattagagtagacaagcttaggagctttgaggaaaacatcctcaagaacgaatcgaacataggcggagattccaggagttcgagaaccagaacccatagaatcaggcagggtgggtgaatcgatctcaaagccggtgatcagggacgacgatttagcgggggtatgaatcagggaatcgaggaggtgaacaaaggaagtggtagccgggtaagtcttggcagaggattcagctaaaggttgagtttgttggagttcgagatcatgttagtgaccgtgctttcttcgacatgagacaaaagaaaagagaggattaggcaagaagaaaaagcttaccatcctggaactcggtgatgattccgcccgaggataagctcgatctggaagccccgaacgaactcgacctgtagagacttccttctccaaatgcagtcgcgtttctgggcgaaggaacgatctccaagcgatctaatgcaacccacatctgtttcgagatgtccgcccccaagggtccggcctctggtccgcaaaacgcagcaagcgtgtcaaacaacgcggccttgaagccaatagagacgttgctgttgatgagcaacagaagggtagggattgatttgaattgttggttctcatacaaagctgctcgggcgacaggagagtagagcaccacgttcttgagtagaagcaagaacgacttgaggagggtgatctcatctggaggaattgtcgagggcgagtttgagtctcttcggggttgggaagccatgtttacactttgagtaagcgatgtctgggagttggtggtgattttgggcagctgggtagcgtaaaaggacaaagcggcgaataaactagaccaagagcatactcttagtgagttttctgagctagagtcgacatcgatacgttctccctcatcggtagcaagaaagtcaaaggcaaatgtcgaactttgtggtccaaccgagagggaagccaacatttcaaacaatgctcggatcattccggctgttcgagaatcagccgcccacctaaggaaagcaaagagtcgtccttccttgtcgttccagaatttgagtcctgcatctgctgggcaatctctgtagacggcagctaccaagatgaacagagcttcgacatcggcccgaggaggcgatgaaggagcggccgtggcgcttgagtttggaccatggctcgcgcttgctcccaacgatctacgggatgagctagccggatttggattcaagattgcgtcctcttccttgtgtttgatctttcggagaataggagacattgtggttacaaagttaccgattaacaggtcgacctgggtaagaatgtaccacttgaaactcgggtccaccacgttttcctgcctcgtcttggaaccagaattttgagtatcattggaagccgcacccgaagacgtatcagaggcaaggacgaggctgttggtagcagaggtcgaagaggaagtatcggaagagagagaggaggatccggacacaaccgtgctcgtcaggaattggaaggcatcatttctgatggcgttcgaagccatgctttccacagcctcttccgttaacctggtctcttgctcgaggtttcggttgtgtcggaaggcttctactaagaagagagcccattgaagggtgatagcagactgaagaggagcgaacttccaaggacgttcaacctgttgagttggccatgtaagcaaagacgcatcagttcacggcgtgcggatgacagctatatttatgaaattctactaacaatctcggaagtcatgattttgatgaattgagtatctctaaggaacctctcttggatgatctggtgatagtatggacaagacgttaggtcgaaacacgatgagaaaaaacgtggaaaaagactcaccttgtcatgatcaacatccgcaagcttgatgtcattcaaatcgaaagcagctagcgccgtactacaaagatcgttacacctggccgtcagttctgattgcgctcaatacaagaggtgaagagcaaatgtgagagaacgggaaagaacagatggtggacactcacgtgaccaagtagccaaccagccccctttcttcgccctcaacgtcgtccttctccaacttggccagccagcgaatcaagctctgaacctccttcttgcgcatgtttcgcgtgtagctcatcaggaacaaaaagtgaccaagcgcgtttctctctcctttgagagagaacactcgctcttgaataacttctggcgagagttttgggccagcaggcgtggctgaagaagtggcagttggagtagagttgaaagaataaccggtcgtgagagctcctcgcccggaaacggaatcgatcgagccttgtagcttcttgattgaatcctttgtgtggtccagatcgagtaacgctctctccaccaagcttccttcctttccaccatcaagctcggctatgctacccttcaaatcctttccaaatgctctgagaccgtcgagggcggatccatccacgccttctgtcatcaccgcggggtcgaatatcagatgaagacaggcaagcatatccagtcgctccatatggaaaagaaggacggctgtttcggtggccggtcggttaccatatctggactgaagcttgatacctgctcgtagcagatgagcacagtaaagctctgagagggacaattctgtcgacaagaagagtgtctctgcgatgaactctgggttgagggttgatgattttcctttgatcttgatggagcctaaagcgcgttacagacaaaaatgcaggagaagaatgatagcatttgtcaatgactgcatcaagaacaatgtttcaaggtatgagaattgaactgacccttctcgacctcagtcttttcctcagctttcggagggggcactcttagcaagtttaggaaccatggcttggccttctctagctcggtatatatctccctggtgacatgaggagtggaagaagcggttggactaaacaaggatgacagaagcgatcgaagcttgttgaaccgatcaggctgatacgattgaagcagggctgccgtcgaagtggacatagtggaaggagagagtgtaggtatacgcgggcgatttgatgaccccaagtctagcctttttgagagatttttcgactgttcctccttcttttcttatcaaaaaggtagaaagagatccagaaggccgtctactagatggtatatgggtgtatgcggcctggaaagaaagaagagtgagaaacaaagaggatgaaaggtggagagaatgaacgagagaaggagaaagacttgtaagagcttgaaaaacaaagatctctgagctgtaaccattttgtaaccggtgtgaccagccggatcgagcgttctaatcacggactacgatcaatttgtagttggttacgccaatttctctaatacttttcaccagcccttctttcctctgcctcaccttctctccctttcctttccatctctccatcatcatctcaaatactcaatcacatcattctcttcatcttcagtcatgagagctctccagaaggccttggttcctgtgccaagtacaaaaagagcaagccttatcagatgtctttcgtatatatcctcagcccgaccagctgctcctccatttctgcccaaagcgtcaactgggccgccatctcaggccgcttcgtcttgtagcttacctgatagccaaggggattggaaagaaccatttcagcgctcacctatccttcctcatatggacccttcgttctcatctgcttccctgcctccattaccagctaaaccgttcacaaagaatcgtacgtccagctactccgctgtttccacaatatggaacttcaactgatcatctcggagggcttcaaccgggcatgcatataaccatacacggctgatatagcactggaatccatcaaatcgtacatggaagtctcaaacaaggtgcatccggagtcgtcttcgcctgtcttgattccttcgttccaaccacaggtcgatactacatactctgtcatgctctgcaatcttcctcataccgcccaatcacaagacgtctatgccttcttgtctagagccttggacgatgatagggatctccccacatgtaagctcgcaagtttgcaattcattctaatgatttatttacagggtttctaacgtgttcttgatctgccaatcaccgactacgtagtctcttttgttacatctcccctggctgatccttcggtgccccggactgtcgtcgtttacgccagagatgtagtgcagttcgaacagctgctcgcactacttccccggaacggcccttcttccgccaacccgtttgatcttataccgccagcgtcgcctccactacctcaatggcgtcaaattggcggccgaactatctacgcacatgatccgcaacccaaaaaatcaaaatggagatcgctcgaacgaacaaaggacagattcgtggatgaggacgggtatcatttcttgctttctggcgtgtcgacaacctttggtctcgcgaaggtgagaagggtgttaaaccggttttgtcagtgggaaggcgaccttgaaggcagtcgaagtgagtaatgacaatgggaatttgaaccgaccaaggcggtagatattgactttatctttgatttttttttagtccgagctctgggaccagaggacgcaccgtcgaggccatatcatgtcattctacccatcagagcggttttacttcaacccgtattcgatcaactgtttcagtcttcgaccactgtcttccagccccgatcagaacatcccagtgagggctatctctcgagtaatggacccatttggttatccaatacgaatcctatcgagctcaacattcttgaacgatcactttcgcctcaccgtacgtctgtccgtcccccagtactaagggtagagcttcgggccgaggacaatcaacctagatcatcgtcgatctcagcggctacttcgtctgataggaactttcggccagttcgtccaccggagacatatcaagactggtggaagccatctttccagtcgctcaaagcgctgtcttatctccaaaatctatctttcctcacttcgttctcgttatcttcactctccactcgaatcgcttctcctgggttttcctcatcctcgtcatccgctcagttcggaaaaggggtttccagatcgtattggaaacatcacgtctatcggcgagacagattcaatctagagcggagcgccccagcctggcgaagaacatatcttccaatatactctgcccttcttctccctctcgtgcctgcatcactcctatccgctcaaaatcactcgttcacagatctatatcccgtctcatccgtacatgcatatccacccgccctggagtcatacgtgaagccccatctaaaccgggtggctgtcgagaagaagaaaaattgcgaagcagcgagagtcgtcgtctcgggtctgccccattcgttacaagagggagaacttgttcgttggatgaaggcccaaaggttgggagattggctccagatcatcaggcgggaacctacaaaagaccgaatcaaatctttttggtctgccgctcgacttctcggagggtccgagcaggctgagccgagcaaaggaaaagaagcgggaaagacggaaggatggttgggtgacggtctcacaagtgcttccgtctttaagttgactcaaaatacatcacgaacgacctcggactttttgatcatcctgccaacaaagaacgaagcgttcagattggctagggcattggatgatgcagaatttagattctcaaagcaaaattatacaatatacaagctgagggctagagtttggcatgtttaatctttctgtctctactcccttccttttttcaccttttataattccctttcactcttggtcatctctctcgttgtaaaaaattgtaggttacgtttctctttgttttttctcctgtaccgtggactgttttttattgcctgcctctcgttgtatacctttcttgaattgtacccaaccaaaatatcacgctctcgattggccccttgggttgtaaaaagtgcacctcgttgagtcagacagaccctgagctgaggaactacatcgataaatgaccaagaggaaagaaaagaccagacaaaagccgacgtaggcaagcaagaatgaggaagaagacaaaaagaaaagaaaacaacagagaagacaaagaacgaccagggataatttgtgaagaaagaaatatttggtcacaattttgagaggttggtggagaagatcaatagattctatatttaagaaaagggatcgagatggtattcaggaggaaagacgaatgggtatggcttttgcttaagcgaagatcttgcgcacgctctgtcaagattggcgtgccgtaagaaaggcaacaacgtcagtggaagtcatacagatccataaagaaaagaagagaagagaagagatgagacggaccttcttgtccttcttctccgagtcggcatggctgataaactcgacttcggtctggaacccaccaagcaagctatcctcctcgttgaatccaaggaccgaggttttgaagtgtttaccaatggccacgatcctcttcaaaatctcatccgtggcgggatcagcatctggtccaggagcaaatctggtccagatagagattcggtagaacgagtttcgggtcgagaagatcacaccggtgatgaggtccgaggtcgagggaaggggatcggcattctcctgttcgggcatcggagtctcgaacgtctctccaatagccgcaagcatctacaaatgatcatccgaggtatatatgttcagtgttgcaaaagttgattggagacgtaaagcacgtgcataaaggaagcaaccgactcacagtgtacatccacatctggtccacgccagctcgagtcttgtccttgggcatctggaaagaccattttcctccgtgcttgtttgcttcgtcctcccatgccgggatgatactctcctggaaaggccagattgaagtgaaatccgattgagtttcatggtgtttgatcgaaatataatgaaattgctcataaaaagcaaagacgtaccttgaagaggtagtagttggccttctggggcagaagagacggaggaacaatgttattgtacaatctgttgattgagcaattggagaaaaggtaacaatcagtttgtcaatactttctttgttatatactgttcgcaatcaagatgggtatgacgcagagcaaaaagagcggaacttacccccaaaactcttccacgctgttgaagctgaccacaggtcggacgttgtccatccatcctcctcctgcaggagccggagtcgaaggtgcacttccaggctgtaggtgttcgatgaatacattccgtgtttgtccgagacgaaacaaatagtcgaattgtcagcatacaaacagttttagctgccagtcgagatacatattgcaggctggccgaaacagagtttgaacgaacagcaggagcaggcttaggcaggttctttgactgttgcgactcaaaccacaaggtccagggagagtataatgggtgctattgaaaattaaacgttaagcatacagagtcaatcacaaaacatcacagcgatcagtaacagcctgccacatagatcgcccgagtaaaggattaaagaactgtgagaagcgacgcaatgagtagtctcaccttcacgttgaacttggtcggcgagtcaaacacagtcttgacagctccatcgactttttcaacagtctcagttgtttcatcggtggtgatattggcagctggatttccaacaatgagaagaaaaagcttcaaggtaagttgacagattgacatatccggtggaacaaagattgtaggcccaagagaaagggtacttaccctccagagcatcattcagagcctgagtagcagcagcgatcgcagactcaggcatttgaactgttgtaggagcaacagaggtagcagctggagcaacgggagcagaggattcgacttcggccatgatgattaggtgtttaggacgtgtaagaagagtggcagaacgggtcaaaggtcggtgtgggcaagagagaagcagaaatggaaaacgtgatgggttgtcggaggttggttacgagacggcacagaatgctgtgtgcgtaagttgatcacactagcacgtgaatttgtcatctctttgctcgccacccagatcgttagactacggttacttttcatatacgcatcatcaatcaagagatcgagaggtatgagtgaggagcatttatgatcgatgcgtcatcaggctaggacaggtgatgcgtttgtatgaagacatgagacaagataatgcggtggatgaggtgaaatcacactgataggtataactttggaccgctgcctcctcattggagggattagttcatcttccctcctttatatgagtggcttgaatccagcgcaaagaaggtcaatgtatatgcaggagagatgtctcaggaatatcgtaggagagaaggaaatactgaacgtcaacggacccaaagagctgtcgtatgtgtgtgaaggcgatggctacgcgacagtctcgtaatcagatattgaagcctcgtcgatttatctgattggccatttatcgtctccttttttaccttctccgatttcagagctcctccccttgagttcatccttccacccttcttcatacatctactcaaagacacacatcatgacagaattgccagaggtcgattcattgatcaagacgctggtcgcaccacatcacggaggaaaggagtcgaatcctaatgaccctgctcgaaaggttaggcccgaacgctcttttgccgttatctttttacatttatcttcgctgtggttgttcatctttcagacgataatccttaatttcccatcgttaaactgatgaactgttttgctccatggtatttcactgtcagatatcgatagaacaacatgagttgattgacctgttctcggcagactatcaatatctcttcgttgctatctgtcttgtactagcactcgcccactggtcaccgttgagtctcagtcgagtgtctaacaaaatgaacgctagaatatcaagtgtcagaaactttttcgctcgaaacgtattcatccgaaaatgggatcttcgaggaaatagagctatggttcttgtctggctcgtctggttgatttataacgccctgtcgattttcgtgagtgtttttcttttccctctttgattatatacagccctgatccattgtgtgtacacatgtaatgcttacgaccgacgaatttgtgcttgtcatgatttcaacagtatcgcacaaaccctaagattgacaagaagctcttgcgaaagccccacatgcctgtccgatgggtagccaaccgggctggctgtctctgcttgtgaatcctttcattttttctttcaattcattcgatcttggactaccgtggcgatcgctttcagattcacttcggcacagtccttcatttctgtcgcactgctgaccaaaatttaccatgcttcttacttccaaattgacccagcgcaaacttcccagtactctttatactcgttatgcgaatggactatttgacttggctgactagtattcctgtccaggtgtgtccattatgcttagttttgataaacaagttgtctacgctgactgcttctccttatgatctgatggcgcaactctctgctgataccatatctgataggatttcaactggtttcaccgatggatcggatggggcacgttcgctttgggaatgacacatggtatgtcaacttcctctctcacagagattaaatactcatatacatcattgagctaaaactgatatatctgatctgttgtgaacagtcgttttatacgtaagtcatcttacgagttcttgatcaaagcaagtacgcaactgaccggataaaatatttgtatttccatcttaatctcagattatctggtactttctgaccttcagagctgagacatggcacgtgttttggctgtccttgcatcaactctattggttttctggtgtgatcgcgagttagtggcattagtactctagactgtgttcagttctttctctgacgttgatctttcgtatccactagctcttgctttcgttcttctggccgttttaagcacaaaaagaataagaacaagatgccatgaattgtttattacttctcatgtcattctttcaattatctttttgtaagtctcgggtcttgttctgtttccaaatttagttcaagagatgtgctgattcactgattaaaatcttatcgttctgtagaggtgcctgttggttgcattggtttgtcttgtcctctacgcactctatcacagatatctcagcatccgacttacctgtttgtttctgctcttctcctgatccaaaggtctccgaagggcatctggcctctcaccgccgcttttgtctttacctcctctcgagttcatcgaatagttactgttaccaggaatgggcttttgattcctctgttgtcccgttggcgtggaagttcggcttctactgaaccgctgaagaagacctctgaggtccaggcgatcattgagccgctagatgagaaatgtgtcaaggtcagacttttagttgacaagaacttaaagtggaaaagtggagactgggtcaagctacattttggaaatgggctaggaccctatcaatggtttgtttgtttcttatcatcaagccgcgcagacgatgaatgaagtcttaccatctctgagtaaaacctatcgtaggcatccgttcactatcaccaacacgcctgctatccagcctaggatcggggcagaagaagaaggaactttcaagtcttattcttccacctcatcgactccttcgatccattctcaatcatccacactgtcagccagttccccgtactcgtcctcatctgcgacgacactgccaagaatcacatcgtcagattaccctcttgaacttgatccgctccttgcacgttccaacgaaactacagtccagaacgagatgcagttcatcattgccgcttatgaatccctcacgaggaaactccatgacgtcgcgcccactacagtaccggttttgattgaagggccgtacggaatggcgcatgaccttaaaggagtggatacgttgatactagtcggaggtggaacggttcgtttcttgtttcgaggcgagtgcattcatatttacttgagtcacagtaaactgaaatcatggcctacgacttgaatcaccctagggagttgcgtatgtgcagtctacctgggaagaagttatcaagaatgagaagagtacaatcagaaagctcatggtcgtgtggtctgttcgagagcggcgtacgtctttcctccgattttcccaccgcctttgttggactcatccgcaaatctaatcagtgattcaatcaactacagaccacttcaattggttacccctacaagccctgacgcaagcatccccctccagcttgatgacacctcaatcggatctcaaactgcactgtacatcgcacaagccttcggatggaccgtatgttcatcctgagactggggtcaacgtacgtgctggaagaccacaatggaatagtatcatcggtgaaggagtagatcaagccaaaggacgggtactcgtattaggtgcgttggagttgtaacctttcggtcgtcacaactcgctgaaactgattgtttgtgaacgtgtgatttttgatcctttagtctgcggaccggttcagctcacgaatgctggtaagattttcctttttttactgctctcgttatctgatttacaatgagacacgaaactcatgttgcttgcatcttggtccatactcatagtcgccgaagccgctctgaacgcgtatgatcctgagaaaatcagacagggtgatctcagcggagacgtgcgagtgggagtcgagctcttcgattgattatcttttttctttacgttttcagtgacaatgcttttttatatttattctagagtttttttattatctttctcctttctctttttctgctccacaatttgtatgccttgatctcgtcatcaacatcgatccctgaatcacatagaatcttgctcccccttcttcattgcctgttcccaatgtcttgcgtgaatatccacttaacgatccttttcacttgatgatttcgtctcaccgtaactcatcgttcctctccttgtattcttcattatatcaatttccttctctttcgctgttcctcctatcttctctacggaatatggtgacaaagacatttgacgattcatgtagtttggtttggatgtgaacccattcatagaaagaaggcgcttgatacatttgtacacgctttgaaacctgaagaatcttgagcctcaatgatcgaggtctcagctataaaaagatgacgattgttggtggataacaacaaaaaagaaggaagaaactcaattgaaagttcaataaatcacacaatacatcaagagggctagagagagaagagtcaagctaatggaaacggaagagatggatcagccttctaatcgttggcatcaaaaggatttcgggtgtatgtcagatcgtcgtcactatcctcctgatgtttcttgtccgtcgactttatatccttttcagtagtactattcagtaaagcagcctcgtcaagtttcctgaccgcgcttctggagtcaggcacgaatgatgctgggatgggagagctagaaggagacggaacgccaggcgaaggcttgccgtctagggagatcttttgtttaggaagaagtccaaatttagctgcgcacccacggaaaagatcgagtgtgataagtgaacggctggttttcaagtcttgagaaagaaggaataagcgcgctaaccgaaatcgatcttattgttaacaggagaggtactgatgcctactcctgatctgggactagttcccaacattcctgacgatgggctcatccgaccaccagtgtttcggatgtactcatctgatcttctcgtagcagtcgacgaaggaaggggagatgataggtttccgtttgagactgaaggaaaaggacctgaatcgttcagaggtgcgttcgtgggaagtggggtggctggattgatttggattttggtagacgctgtagagtaagaaagcaatcagcacagcgcaacgagcaaaggtcgccaacgttctatcttgccacatacaaaacattcaggctacacgagaggaaacaaactgacgagcaacatgccaatcttcatctggccagtctgggttttttgtttgaggtcgatgtggttcagaaggagatcgataattgttgttgtatccgcttatctgattggtgctgtgatcctcggtcgattgggcgttattttgcacagaggacgctaacgccggtagagaggcaagcttggcctgcgcagtaactccagcactgtatcgaacgtcacaataagtagcccgttttgcttttgatgaagaattctagctctctgattttaacataaaaaaaactcactaggcaactttatccttgacgttcttcataaagctactacccatgaacccgtcgaacttctgttttccctgagtggccaatttctggaactgctcctccaggcctatgctttccgcatgctggtcatggtattggttctcggatcgatatccgtaattttgttctcccgccgcttgattatcatgatgctgcgtggaagacgaagggttaaaaccttgctgatattgataaccttgcttattctttcgaacccgtggctgataaggaatattggatggatcaaagattggttcagagggatgctgagtggcaggccgctgggatctttgttgcatccgcagggcgtgcatatggttttcatcttcgagtgcaagtgcacgggcgacgctagcatcatagtcggactgtgattggagctagtagatgataatgaaagcgaagaacgccaagttgatgggttaatattcgctctgaagctcagattaatgctgatgtaatcattgagagacaatgaacgtacgacatcagcccctggccgttcatctccaacataggtctcatccgtcatcctcagaagacttccgactgctttttcttcatcgccataatgagcctcgaggatattttcgataacaaccgtttcgacggtgggaaaaattgccttgagcgaggtgaccttggggttaactgccggaggcagtgggtcaggtgcgatcggaggagccatggctatctttgatgtctgctgtaagaatgtgatgggtgaatcatcaagctagtggcagtaccgaaagttgaacgggccggggcggtgtaatgtggcgcgcattgcacacgtgacaaggataagtagtcttcaaggcagtgtgatcactgccctgcgggtcaacagatgacatctccgccggctccggtccgaagaatctatggatatattatacctgccggtcagaaaatcaaggctttcttcataattgttctttctcatcctcactcagtcatctatcgacattcaagcagatgtccattcctgtccgaaaatcatctcaaggcgctgtcctgatctcttatcatgacttggttgaaaatcctttggctcttcgtcagagtatagaggctgggtttggaagcggagaagacgcgcttggaatagtagttattgaaggtatggtccaagcaatgctttccaacatgttgctaagctcaaacgagtccttaactaatcgtgtttttgtccttcctgttggaagatcttccctctgagtttcctcatttgagagagcgactgctccgactgattaattcctatgccaacctgccagaggaagcaaaggcgagctcgttggcaaacaagtctaacggatattccttcgggtggagtcatggtgtagagatcatgaacggggtaaggcgacttattctcactcttcatcagttctcctttgaactgacagatgatatgtttgtatccatcatccgactattacgttcatgcgataaacaggttccagatttgttcaaaggttcatactacaataatccgttgacagacaacccggacgtttctgccgccgagcgggccgcttatcccatgtactactcgaacaacgtctggccggatgcacgagagcgcgacgtcgatggcttcgagtcatctttcaaagagtgtgtccatatatctccctatttcaatctgtctagagcgattactcgcgatacaagcaactaatggctgaaccacatacaaaacttggtcacacagattgggcaaattcgtttttaatgtcggatgtttactttctaaagcgtgcgaatctttcggtaagtatctagtcatatcttcgtcgcttcctggtgggaacgaagtctcaatcgcttgcatttaattatctcgatagtatctgaggctctcgtagatgcttctcagacgatcgaaaacctgatctcaacgtctcagtgcaacaaggtggagccgatttctactttgatataggctatgttactcgttcaataacttaaatgtttcggctcataccgtgtgttcaatggatataaataggcccgcttgctccattacttctcgcctcaagatacagtgaagccgaagaaagagggggtggatgatgatctttgtggtattcatctggatcattctcttttgaccggactctgtaggtccattgcttaccacatggtcttttagatttgttgttgctgactatctgttatctttcaaaaggttctgcgctttatctgttccatcctgaaggcgtcaagtctactgaagatctacctccaaaggctgtacccgctccttatccaaattcgggtaagctctgttgaatctacattcagacattaaggtagctcgtctgagtgtctcttggttgtatttccgacacaaataccatttaggattgtacattataccccgatcgagcacgacgcccgtgagggtatcaatccctgctgattgtctggcttttcaaacaggtgaagctctacaactatgcacaggttcgtgtttttgttcatcaatgtttctctctctctgagttttgtcgttatagtaatgttggtaacgagtgttcttaggtggaaaacttcgagcgacccctcattatgtgcgttattcttgtctattcaatgattcagtagtagtatcagtctgttgacttatctaaatcatttctttcctcttatttccgttaatatgctcccaatttgcaaatgtaggtccaagcgggatctccagatatacatggagagaagattacgatagacgggcaaaaggggacggtcactcgtgagacatttgccttttttctccaacctgatgtgggagcgattgtttccaagagaccagacggttcgcaggaatcattcggcgagttctcgaagagaatattggtgagcgagataacactgtagatcttttcggaacacgaagactcatcgagactgatcatcgctctttgttctgatgccccacggacccatatttcgaaacatcaggataagcatcactcgttctaaacttgtattgtacaaaacaaagtcaagaacgaccacgctgtgtgtgtgtgtgtgtgtgtgtgtctttgcatctacatatctgtatctgcgtctgtatctgtatcctttgagattatggaatgaatgtgactgatggacagacatcagcttgcgagtaagcatgcgccatattagaagtaggcatgtatgtcatgatgagcaaagatgcgttaagaataatcccttgactgtccaggtcctcgattttctctccatccgctttcctctcactctcatgttgcggatcatccgctcgtgagacaacttctgaatgatagtacagctaatgaaccggtcattcactcgacatcgttcaccggtcatgtttggtgaaaaacttcatgagcaacagcagcaacatcagcatcagtatcaacaacatcaacagcagtctttaccgcaatgctatcaggtcatatgctgcgatcaacctcatcacggtgaaccttctaatacttcgtctcattctccgacaacaatctctcccaaaaacttttcggtttcccctgcagcgacctatctgtctgcagttcctcctacggatgtctccatgcattgctgctctcctcccgtgtcgtttgatccagagtgctatgattgttcgttcgagtgcatcgaagtcaactttccgaactgttcggtcgcacttgattctgcctctgcctctgcctctgcctcgccagctcaggcagtcgattgtgtggattgctccatggccatggaggaacattctacgaccggttggccgtttatcaatcctcaagagatagggtgctgtttcgaaccggattgctcggatgaaccgccaaagacggtttgtgaacaagccgaaacgagagctgaagaatcgggcgaatcaagctactgtcatggctgcccaagcggagctgacaaacgaggagcaggatcagaaggcgaagaagaggaaatactggattgctgtggacggatctgtggacatcaacatagttggaactgtggtttcgacaaaccggaggccggctttgatcatattgtgcgttctctctccgactctctttctacttcacaggagggcagtatgaattgttgacatgcttgaacatttctttccttgaaatttgccatcgctcccgttcagtttgcatgttatcatcccaacacaacgcctttctcgacgccatcagagcttctttccaatcagaacgcttcgggatgcgcatctcctagtcattctcttccgggtccctccccttcgcaatgtcaagatcctcaatttcatttaccatatcccagtctcgggtcatcggctgatggtcctctctcggccctgaacgtacttcttcatgctgccaacgctgcttctaccgatgttcacgtttcatcgtccagctccgtttctttatccaacactcatgccaacccttccgaatacaactttcccatggattcccttacgggatctcttcctgatcctgatctatcatccccttcatctatcgcggctattaccgtcaccgatggcgatgcttatcaaagctacactctgactcccaatctgtcagcttctcctcgggcgacaccaccctcggatctagaaccattaacagaatcctcattcatgaattgtcaatggtccgattgccacgaaacgttcccctcgttggacgaactcatcgagcatttcaggacaacctcgtcccatgttccccttgcttgtttgacctcaacggaaaccccaatgggcgccgtaaatgctccggcagagaccatggaatcagtatcgttgcaaacgacagcagcggctgaagaagcgagaagcatcatattccaacagacttctacagatgaagatcctttcggaagggcccaaccagtttcatcgcaaccggtgcatctgcattgtcagtgggggcaagatcatgctttcaccctctctggctatccaacagtgtttcccccggcacattcgaccttggattcatttagtatagacgctcaacaatcgttggacgatcagttgtcacctaaccaagtggattttcttctcaaacatcttttggaagagcacctcaccggtaacactaatcatcgaaatctaatccaaccgactcagtccgaatcagcacagggttcttactactttcctaattacccaggaaccatcccagcaaagccaatgacttcttacgatatgatgtatggtcacacattaggttctgcactcaacggaacctcatcctggaacccttctatcgatagcctctcctcgccctcttctccttcatctctatcttctttgtcgttagatcgttcatccggaaaggcttcaacgagtccaaatacagtcgctcgtatctcccagagtcatccttaccgttcaaggacgacactacccgtgccatgcgcctcgagaccacaacctcaaccttcatccagccggcagatcagatcatcgtcccacacagggaaagaaaacgctgcagaccatggtcttgttcgacgtatcaagagcgaagagaacgatgagctcaaggcagagagatttttgaaagcagaggaagaacatgtgtgtggatacctgggatgtaaaaagacgttttccgacaccgcgagcttgaccgatcatttgaacaacgtgcatgttggaagtgggaaagacgtttatcagtgtgggtgggaaggctgtgagcgggcgatgcacggtcgtaagcattcttcattgtctcttgttgcgcatatgtcttgttttggtccaaacagaactcctgatgactatctgttcaatttcattcccttttggcttctaagctgtattcaaatcaaaacaaaaggtcagcgcacaatcatagcttgcattgtatcgaacgcaactgatttcctccgctatcattcattgacttcaactccagatcatgcgacatttacaatctcacacgaaccacaaaccgttcgtgtgcgagctttgtaatcagacattctcagaggcagcaacacttcaacaacatatcagacggcattcgaatgagagtacgtactgagccttgttgtcaattccttctcggatggaccaacagaactactgttgatgatatgtcattgcaccctgtgtattgataaccaaaacaacacaaaaaaagaaccgtttgtgtgtgactttccaggttgtgataaagcgttcgctttgatcggctcgcttacgattcacaaaagaacgtacgtgtattcatctgttcgagcaaagcatccttggttgttttgtcacttaactcttcacccttcttgaaaactaatcggatgaggatggccatacagtcatgacggaattaaaccttttagatgctcgttctgcgacaaatcattcgttgaggcgagtaatctaaacaaacatgttcgtcttctcgcaattcttcaatctgtacgacatggaagtcttagctgataagcaactatccatggacttggttgcgcatagatccgaacacacacgggggaaagaccacacaagtgtgaatatctcggttgtgacaaagttagtctgaaaccatcatcgtatcccttttcgattagattgattcacgccaacggtcgttccaacttgatatcctgttctctcttgcagagattcgccaggccggaccaactaagcagacatcaaaatgtccatcggaagaaagaagccaaggcgctggctttgaagaacggaataagcactaccgtatgagactcgaagtacacatttcaaaacacgaaggagatcgggacctgttcaaatgattcggacattgacatctatatacttgagattctgagatgatcaaggtgcatatttattttgcagccacgatcaaatagattcgatccttcttgcccttcacctagtcccgcatgatcatttattgttaatcacttcttgatcatctcaagcaagctctttctttgctttgcctaaaagaccgtcaatttctttggtgtatttatcggtgacttcttgtagctaaaaacgagatccgattatcgataatacgtcagctcgtgaatcaatactaaaatgaagagagacggcgaaaagataggagagatgaatcgatcagacagaagtgaaatcgacaaggctcacctctgaggaaccgtcctttccgaggatcttcatgcttgccattctagcctgtcgaacgttctgctttgagctctctgccaggctcatcagattttttagcatcgacgcccgatctgacgaagacggcctgcccaagcgatgtacagattagaaaaacaaagaaacaaaatcagaatcctcaagacgctcatttgaaaaggccttccaggtcaagaaacaagtaagcgcaatcaaacttacctggggacggtgatcttgattgtccgagcatccgtcgaggaaggactcatcccgggcaagttggctttgtggatcgcattctcgatcgtcttggtgtgctgttttgaagcaaatcaagttatggacggtgttgtgcatgagtagctggggtttcgcttgagaatattgagtgaatatagagcaaagagacgcacactctcatcgaatacgtttatgatcaaggcgtttgctttgattgagatcgtagagatcgcgctcagcgagagctcatttgtcgttttgggaaggactacccgaatagaatccaaggcggctggccgacgaggaagaggcaggtgtaaggaatcaaagagaatgccgttgctttagtcctgccgacatcatacacgattcatctgggctagaggatgcaaagcacacttacagcttgagaccttgcctcttcctcgatcaatagcctcctgggtcttttcgctgaaccactgagagaaacccttcatcttgattcctgccttcttcacttcagtcgcagtgttatcgacctcgatttgttcagacctaggagttctcttttgagaccaatcgtcatcgtcgtcatcttcgtcctcttctactgctttggagcccttcttcttggaagcgatcttctcggcaagtttaatcgcccccttggactttttcttggctttgacttctcgaccaccttgaccggaagcctgaagaagagccgaattggtgaatgttcgaacggcgggaacaaacacgggtgttgccggtaaacgagcgagcacaagagctgctggctgtctgactgaaaggcttcgaagtgcgagtcggggtaggaaggacatttgaggttgaagaccggcgagaggtatggtatggtatgatatggtatggtatggtaccgagtggatgaggggaaaatagaaactcaaattgatcaacgatctgatattcgactacaacaacgaccatcatcaccatcagcagcagcaacgacatacacgcgttcaaacacctgtatttacacactcattcccatctgttcgaggctgatcatatacatagataccactcatatcctcctaaattaattcgccgccatgtctgaagagtacaagaagaaggagctcgctgcgagtacgtccgcctccttcattcatccagcctggtagagtgaaaggcccgaggttggctggttcgaggaagacatcttcaactttgacctttctttgcttgctttgttcaaacagtgatcaagcttccaggcaacaacagtgagcggccgtttcttgtcagaagtcatcaacggccgatatagcaatcggattgagctgaagatccatcgccaggtgaggttctgatggcccgagctgaccatgtttgcttgtgtttttatcgattcgcccgtcagtttgcaatgattgtccggcgcccaatcctcagtgggcttctctgtcgttcggtacattcatctgccttgaatgctccggggttcatcgtggattcggtgtgcacatcaggtgagctgagtccttctcgttcctcggtttcctatatatgaagagggatgctgattcaacacgtccgtggtgtatgtctacaatttgtcgttcttcctcatagttttgtgcgaagtatctcaatggataagtggtccgactctcagatgctcaagatgaaggttcgttccgtgtccttgttgatacttgcaatccacccgtcgcctgaaacgactaacacgtttaatgttctgcgcttgggtagcttggaggaaatacgaactttcaagacttcatcaacgcttacggtcccgaaggaggttacaagaaaggcatgggcatcaaggaaaagtacttttcttgggcagcgatgcaataccgggacaaactaagcgcgatgacggcctcacctccaaccgaatggtcgccttctcctccaccgcctccgtccgcctcgtcaacactctctccgcccggatctaacgcgtcgtccagaccttcttctgcccaaggagttaggaaaccaagaggtatgggtgcatcatcttctcctttaggctatcaggatgacgcgaatagtcgaagggaagcgaacgaggactttttcgccagcatgggcgcaaagaatgaagctcgatcgaccgatctgccccctagccaaggtacaatatcaagtttacttctaactttctgcactgctttactttcaggctttttcttcttcttgtttggttttctaacttggatatggtcatttgttgggttaggtggaaagtatgccggctttggaagcggaggagttcaacatgacgagcagcagccaaggcgtcaagccaacgagagcttcttcgccaacttgggttcccgaaaccagtttcgatctgctgatcttcctcccaaccagggtaagcgctttctatctcttggttctttgccatcttactgctatgggtttccgttctgaccgagacccaatgttcctctgtcttcttaaggagggagataccaaggttttggaagcactccagaaccctcatcttctcaacatccttcctttgctctctcttcccacaatgctccttccctcgacgagcttcgaacagatccgttagcagctgcagctaagggttggggtcttttctcagccgccctaggtgcagcaggccggactgttcaatcctccatcgtcgatcctactcttcatcaactcgccgacccgaatctccagtcaagcttccggagtggactatcgtctctcgcggagaatgctcagcggttgggagcgaatgccggtggttttgtcaaagagcgggccggtgtcgacctgacagggcaatttggaaacatgggtttgggaggagggcgaggaaacagaggaggatattcatcggcgtcggtttcgaacggggactcttggggaaacgggcccgcatcatacagtgattatccagaggaggacgactatagctcgaactcggtacgttgtcttttgatgagcactccatctgtttgaaagaattcaacgacaactcaatctttttcttgttcttgtttccttttctgctcaatctcatgtccacgattttagtacggtaattacaactcggcttcaagaccggctgcccatgcgccagctgctaagaaatctgtcactcctgcctctgccaacaagaagaatgaggattgggacgactttgaagacttctaaaaaaaaattggattcttgctctttcgttttttttttcttttgttcctgtttccggattcctcaagtctcttcttaatttgttatctcctctctcagagctctttcctttacaattctccaatctagtcaatagtgataccgtcaagggaaaaaaattcaaaactccccgaatatcctcctatctcatatcttaccatctttccttctgtcttctggcgtttccgcgtagatgtataaatctgatatcagcgaatagagaaagcccttgaaaagtgcggatctgacttatggttcaatgtcatgtgatacagtatgaaaccaatgaacaagtaggaagagacaaagatcagaagaaggagaggaaagaaaaaaagaaaagaaagaacgatcctcctcaagtcacatggcgtagggaatgttgaacgggaacaagaggaatatcgtcgaaccaataacgttctcaaacacaacttaagtaacataaaaacaagatcgtcggtgaagacgaagactcttaaacctccagtctatcagctatgccgaataacaactcggctaccttgtccgcttcgctttgggcttcctcgaccgacgcatccaatgtcagagcctctgtgatcgaagggaacgtggtagctccataacccaaccaccgacctggtgccgtcccagtgtgtttgtaccactctcttcctttgaggccatcaccaaggaaaccggcttcaaacttggaaatcttccggttgatcgtttggatctctttgagaaccttgcgaatcttgtgaagctgtttcttgcagggagcttttgaatgcgctccaacatgctttctgtcaccgtgatgggtcaaccggctaagtttgtcaagcgcagcactggtctgggcgttgagtttgacagtggcagcctggacggaggagatgccttggtcaagcttggtaagattgagcggagtagaatagtggaaggttttgtgaatgtattcgaccctttgatagttatacggtgaaaagtgttgagggcatcaagtcagtcatcgtcctgctcacctcagctcttatgacggtacgtatgaaaaactaaacatacttgttcttgtagtcggatagttcgaatgcatactgagtgatgttcaaaggaaccaccaaactatcggccacacggagcaagaccaaacccactgtgacatccgagatgcaaagcgatggcagtcagctagtcatgtcttctacatattggtacaaattgacttacagatcttggcagtcacgatatgtctggagaatccaggatctccgtacttttccatccagtactggttgtcatacaccgagtgatagtgatacactgcatcacctgggccaggagaaaaccctggtccatcgctggaagcaactcctaaatgttgtaagaatggctagaacgagggagaagttcaatcagtcaaggtttctcggtacatacagtttatctcaaaaagagcttaccgtgtaatctgatccagatccaagggaagggattccggtctgactggcggtgaagagcgcctcgaatccgtcatcgctccgttcgggcttgatgttcttgtaagcgctccaactcgcggcctcctgtccagcagcccaaacggagagcctgtcacttcctggataaagaatttcctgagaggtcgctttcatcaggtttgccaatgaaggagaggcagctacgagatcacacgcaaaagagatgtcagcgaccgatgtgtatgtacatgatcgagttgacctgaacaaaaaaacatcgaaaagacttacatgcgccaaaaattgttcctgctccggatgaatccaggttcaagtacgcgacaaggttttctggaatccaggaagcaaagtcctctgcaaattcggtctgtggagagttgtacgaatcagaacagataggtcaatacttcaaatctgttgaacgccagcaaatctgtcaactcacagatcccattagtccatattcctcggcatcccaagcacctatatagatagttcggagaggtttccagcccttggcagtgagagttcccagacctttgtagatctcatgggtcaccgccgtacccgagttgggatcggcggcacctagtgtccaagcgtcgatatggtttccgatgagaacagcctcatcagaaaggtatccagggatgacggccatgacgttccagactgatttattgcaagaaacggtcgttagtgaacattcagtatgatagaaggaaaaatctacaaagctgtgagaagaaactgactgggcatgactttagtatccacttcgttaacaactctaacggttctctcagaaggacctgtccagtattcgactcggtgcttcaagcctccttcccaggtctctcccaggtcggcacctttgatacctttcttctctaatagcttcaacaaagggattgcatccgaataagaaataggaagagaaggaatctgtggaatgttcccgccctcgatacgagtcgcattagggtaggcaggagtattgggggtactgatagttcgaattgtaatgatggtttgatcagggacgttgagggaaagacacgcgcttcaagaaagtcaatcgacggcttacgtagggtctccagggtataatgagaggtattgaacggatcctcgctggacggagttaggctgtcgagctttacctagcgtacaaagaggtgttgtagaacagttagtctaatgagaaaatacattcgagacagtgagaaaactgatgcgaattaaccatcagggtagggcttctctccattctcctcagtcatcggcccatcatcacctgggtctgagtagatcaagcaagcaagtgctcctgcatcctcggctcctttgacctgtaagggaaggcgatgagcatttcaagagatcagaccttcctcaattatgcagcctgtacgagcagacatacttttaatcctctgaatatagctccgtacttcaccaaaacgatttttcctttaacttcgactccggctttagcaagcgcatcaaagtcggcttttcgtccatatccagcgtaaactacctgagcggtaacgtttccagaggtgctctagatatttgtacgcaagtgatgggttagatggttgattcttatgattgtcaggagaacctaacaaaacatgacttcgagagaaagggagggacagaccagaccgtggaagacagggacactatctctgaacttggagaacggatcttcatcaatgatgtcctctctaagtttcccagaccattccgtcagtcggccatcctccgataagatggacaactctctagagacaggctcgttcatcacagggtagtactacgttgaatgaagaatacacgatatctgagttgcgatctcttgaaatcgaaaacaggtttcacaaaagcagctacgtacggtatcgatccatacttgaggggtcttctgagtctctctgatccgacgctggctctcttccgaaccagcgtcgaaaacattctcgaaaggaccagtcacagggagtccaaagctataatacgatgacaggtgatatcaggtcgatgatctggtcataaaaaatcgagagagcctcatgaaagaagcgtctgtaaggctgagacatacaactgttcaaactcctgcttgagtcgcaaggcaaggatatgctggttgccagaagcggctttgtgatcctgatacgtgtatcgtcgagatgccctgtggtcgtgatacaaggaaagagaagtggatcagaatatcaaacaagtagatctagatgaagagatctgaagctcactccatacagcttgtttcattagggactttgagaaagatctgtggatacatcagaaaatcagtcactgttccgcgaattagaaagtggatgaagcgacggagctgaagaacatactccttcggccaccttaggaggaatagggaagtgcttcggatgcttggtcgtcttgtggtggcatcccttttgctttcggtgcaagttttccatttcatcggcaagatatatcgcaggatgaactttcatggcaggaggatcagcaatgtaggcaggagcgagcttgaaagcatcattgataaagcctatgaaaatacagaaaagatcagatgagtaaacttgaacatgatcaagacacaaagtagacgacgaactctgaaggtaaccgtcgaccccggagttgtgctgatacttgagatccttcgctccgctcacatgcttctctcctgagagaaaagggacgacaccatgaactaacaactgggatgtaagcgcaccgccgacgagataccataaacgacgttttgatccggagcgactctgtttctctccggtcttaacggtgtgttcgacgccatcaccagaagtgggcagagtttctttttcagcgagggaatctccctgccaactaatagatttggtcttgaggcctagaaaggagaacaacatgatggctaatcagagaagacttggaaagaacgcttcctttcttccgtcttcttatatcatcttttttcctccgtgctatctggatgaggcggcttcggacgaagccgatggtttcagttagactaaattatttgaatttcagcagtattcatttatgttatctaaccttcgttcggcttcacccggctgctgcttagccgggtcggcctaatgagaatatcgagtgacctttccttctatcctttaaagcgtctcttgatggatgaggttgctcttggttcgactttcatctcatactaaatagttgtatacactttcaaactccctctcaaaccatgaccgatatatcttcctctgaagcagccgcctatggctcgcgtctcaaaaaccaaactgtagttttgacaggcgcggcctcaggaatcggtagggaagtggctattaggttcggcagctttggtgcaaacctcgtgttgggagacttgaatgaggacggactgaggaaggtctcgaaggaggtagaacaggctggagggtgagttgagtttcatcggattttctttgtgttttcgaagtacctagtaggtagattgtcattcgtcggtccagtttctaacgccatgatcggttcatcattcttcataacaaggaagagcgtctggtcgatatgtgatgtgaccaaatgggaggatcaagtcgaattgttcaagttgggattcaagacgtatgtcgttctggtgtctctactctctggccctgatcattaatgggatgactgattaaattcgcacgtttgcaggtttggaagcatcaacgtcgtccttcccaatgctggaggtcagtgaactttgcactcatacatatcctgcctaaatcagctccttccactcagatcaatctcacaagattagaactgactgttgttcttttgactttatttctgattctgtagtcaccgagctggctgaattcaaggaggaagatagtcagggcgagcgtacgtgatcaaccgaccacctctatacgaggatatgcattctccccgttagaagactgaccttctcgtgctgcatcgtttcagccctaccacccaacctcaagacgttagagatcaatcttcatgctcctctgtactcttcgtccctcgcatttcactatttcgctcgtcaaccggtatcgacagcctccctccgctcactcgtcatcacaggttccatggcgagcttatttgggactcgaccggaagccgttcagtattctgcctccaaggcgggagtgcttggtctgatgaatggaatgaaagaacgatcagagacggagaaggtcagactagggttgatctgtccatattatgtccagacacctctgctacctacggatttcaaacctcaagtaggaagtaagtggtgttctccttttactacttcagtgcctccaatattgacgtctgttgattcaatatttactgttcatcttcaaacatgtgcttaattgccgatcaccaataaaatcagacttctccaaaatccaagatgtcgtctctgccttcctccatgcaagcacccatccagatccaaagacctcggcctcgctatacaccattccagatgaacgaggggtgtttatgatcaaacagcgagaacagatcccagcaggtctggctcagagatggtctgccaagaaggctgcgaaatctcggctttgaaatattcttttgtacttatcgtcaggcaccttagtcaatatgggtgactgcgtcctcttcttttgtactggctatcgggattctagttcggcgtctttgtaaagtttgttagtcgtatcggcgtcttgtatctcattctatgcagattttgtctcttttcgtgctcaatctaatcactctctgtccatcggcggagacaaagacacaccactgagacaataaacatgcgagtcatctaacaaaactacatccagacctacccacacttaacccttcttctgaaattcacactcagatcttgcctctgtagacctccaactcacaagcctctcctcctactcccaacaactctccgtcccagtcacctcctagaagcttctccatacccttcttgtcctccttgagttctctcttcacgcctagcaaagcctgcttgggtgatcgagcatcccagatcttgatctgaccgtcgtgcccggcggtgaagagaaggtgggaggatgtcgggtgggatcggatgagcgggatagaagaggtgtgagcagaggggaaggacagcgagatgacggttgattctgatttacaacaggatggtccgagtaaaaagaaccgagaacagacatcagacgaagcgaaaacacaaatcgagacctaaagagaggaactaaccttctcgagtgtcccaaagagaaacagttcgatctgcatgggaggtggcgaggacattgcccgttccagccataaggtccatatcgagacagatcttatccgagggcccttgctgtaagagtcatagatagtttatccacggggtgtcagcgcttgtattaagaatgcgacgaaaggttagagcatgtcgaagaaaagggcgaactttggtcaagtgattcatctccaaatcgacatcccatcctctcacacttccgtcccatgcacaactccatactctaccttcttctcgtccccagatcgctctgccaaccctagcctggtggcccttcagcacgacttgaggtcccaatcgccaaccaccctgtccgacctcgagaccctcagtaacctctttagcttcgagttcctgctcctcgatcaacgcggtgtccaacttgcgtcgtttgctttccctgttggactgcttgatcggtgccggtacggaaggatcatgagccgtaggaaggggggagaggttgaagattgccagagtggaatcccaagaagacgtcagaatgaggctcgagccggaggacgaagactcggttgtgggtgaatttgactgaatggacgagatgggagacgtatggtggtggagctccagttgagctttggctttaagggtggacccttcaaggagagcagaagggttagcagttgaaagagagggaaacgaaaagactcgagtgattccgtccatgtttccggacgccaaccagtcttcgttggaagaaccagagaaggaaggcgaggacaaccagcagacatcagtgactccaccggtagaagatccggtagggatggtgcagatcaaattttgggcatgtgagaacactcgaagtcgagaatcatatgaacccgtaaggaagaatctgattaagcgggcaatcgaaagagaagcagggatttagcccagttgaatgcgcgtttaggatctgtagatagaatattgaacattgcgtgtcgccagctcgccatccctgtgaagaacgaccccgttgatacctcatacgggcgagacatagcaagatagcacatgataatggttgaacataaaactcaccctttcttttgagcggaaacagaagaaacccagtcgtcatgctggtaggtgttcaataatgtcggcggcagcacactctcaatatactcgatctccaacacactctctccaccatcaccctgtcctttgctttgactccagtcacccaagctacctctgaggagctctccgtcgatcacaaagtcgaacggaacaggcgaagtggaagctaggtcgagaaccttgttgatcaactgagagagctggaaccgcttccaatgggatgggatcaagtactgatctggtgggatggcatattttgtggacctagtgaagagtctgacgggaaggttgaccgtaggggtctgtgtggtggtcattataagagataggaagtttgtgcaagactattgagttcgccgtcagggtttaggtcttgtatccacgtaggaggttgaacaagaaattattaaaaaataatttggtgggaaattatttcgtcaccatggaaaccgcccgggcgataagccatttctccatcttctccttcctgcccgtccgcgtacagatcccttctcttccatctctgtcgcacctgttcttatactcttgattggtactctttgactcgtttaacatgcggcttttacccagggatcaagataagatccttcttcatcaagcgagtccttttttatttgccgtcaatatatcgtttaattcttatcgcccattgactgacacttcggatggctcgcgtctctgataatctctttcatatcttaacctcaggtaggattccttgcacagaagcgactggctagaggactcaaactcaaccaaaccgaagcaaccgctttgatcgctactcagcttcaggaatttattcgtgatggaaaccactcggttgcagagctgatgcagctcggaaaggagatgcttggaagacggcatgtcatgcctggcgttgtgcatttgttagaagaggtcatggtcgaaggaacctttccagatggttagttcttactctgtttcgctgttgatactatcgaaggctgaaccaaacttttctactccattgatcggactctccttgtcagggtgagttttaccaggatatcatggccacgtgatttgtcttcggaagagaaacactcattcaaattcattgtatcacaccgtatacttttcttggttcaagaacattccttgtgaccgtccatgagccaatttcgtcagacgatggcaatctttccaacgcgttgtatggttcatttttacccattccctcccaggatctcttccctctcgatgcaccggacgcgtactcggcagcacaggcggccggggcgatcgtctgcctcaagactggaattgagctcaacaaaggaagggatcgggttagaatcaaggtgacaaacgtaggagatagaccggttcaggttcgtatatgatcattaacaagatcctcatcatcatcaccattgatcttatagtttcagaatactctgaccattaatgtatcgatttgagaatctaccaggtcggatcacgtgagtatacttacagttcatgcttaatgtctgattgatagttgagcttcactgaaactccttgacttttcatacatagactacaacttccttgagaccaaccccaagctctcatttgaccgtcgactggcttacggaaagcatctagacattcctgcgtgcgttccatcgtttcatttattctaattcaaggatatttctgacgagttatggttctgacgatacatacatccctaaatcagtggaacagctgtgcgatttgaacgtgagtattgattgttatcaatctcttgacaaatcatcattatttgtttggactcaatctgatcgttctctccaaatcgcgcgcctaaaaattaagctggagagtcgcgcacagtcgctcttgtctccatctctgggaacaaaactatttatggtggatctagcctgggatcagggatatatgacccttctgatgctaagtgggctgagatcttggataacttgaccaaaggtggattcgaacatgtagtccaaacggaaggggtgaacaagggtgaaccaaaggttatttctagggaaacatgtgcgtctgatttgctttattttcttgaaacccatgaccaaatagtcagaacagaagcacaacatagaagactagttgatcttaacgatatcggctgttctattcgggttttagatgccagcatgtatggaccgactactggagaccgagttaggttagtgctcttgaaatcgatgcacaccaacatagttgacgaaccttgcggagatggatgagattctgatgctgcgtttccttgactgttcactcaatcttccagactaggtgacaccgagatgtggattgaagtcgaggacgatttaactgtttatgggtaaataccatttcaaatatccttgctttcatcctgaaaaagttctcgtgaaggcaaacttacgcgaactttgacctttctagtgatgaatgcaaattcggaggaggaaaatcactgcgagacggtcagggtcaggcaacaaacaagaaagatagcgagagtctcgattgcgtaatcaccaacgcgctcatcgtcgattggagtggaatttacaaggtccgtacggttggcatgcataccgaagacgataagagagagatgagggtcctcaatagccttacagagagggctgacttcaagtatcgaaatctgttcctgttctcggtaggcggatattggaatcaaaggcggcctcatccaagctattggaaaggctggaaatccggatatcatggagaacgtgacgcctggtatgattgtcggagtcaatactgaggttcgccatatttttcatgcgatctctgtcttgtccaacgatatgtcgtatagtgcacataattgatccaacctaatccttgtaactaccctgaatgaaaggtcatcgctggtgagaaatttattatcaccgctggagctatcgacgcacatgtgcattatatctgtccagatacttccattgaggttcgtcatgttttccacttcctcttttctttcggtctcatccgtacatcatcgaaacatcgtatttggctgctaactctttccctgacgttcgattgaaacatccaaaataggccctcgcttcgggaattacaacactcatcggaggaggtacaggtccggctgcgggaacatgcgcgacaacgtgtactccttcagagttttacatgaaggctatgatgttagtatagcttcactatctctgttcttatgtactaggctttaccacctgtccgaaaccacactcatgacgacatacttgtttctttcccttgtttcttgattatcattgatattttctcaggtctgctacggatggacttcccctgaactatgccttcacctccaaaggcaacgattcaggaaaagaagggttgagagatagcgtcagatcaggagcttgtgggctcaagcttcacgaggactggggaactactccaagcaatattgactgctgtctgtcaatcgcagatgagtacgacgtccaggtgagtgctgcttcctcggcatatgacactgaatttagttcattgtattgagctcgtgccgtatgaaactatctatatagaccaacatccacactgatacactcaatgaatccggctttgtcgaaagtaagtctcatatatgagcttgatacattcacaagggaagaagtgcgacttgctcgtataatctgacacgtcctacaactactttgttaaactgctaggtactatcgccgcctttaagggccgaacgattcacacgttggttgccttgtcttttcttcgctctagataggttctcattagctgatcaaacatctctggtcggcacctccttcaacacagttaccacaccgaaggtgccgggggtggacatgccccagatatcattgtcgtgtgtggtcaggagaatgtgttaccttcttcaacaaatccaacccggcctttcaccaacaacactctagacgagcatctggatgtaagttgatcaaataatgttctcttatcattacctgcaatacagttcccaagtgactaatcctccgtcaaacttcaaacgcacgtttgttcgcatatcgatgtagatgctgatggtctgccaccacttggagtaagcgtggttatccgtttacctccttacaagatcttcaatcagcgttctatcagcttatgcatctcatggtttcacagtaaatcaattcctgaagacattgcttttgcagattctcgaatcagagctggtacgtgacatatatatcgttttcgagattggcaacggctgatctagtatattgtggaacatggacgattgtacagaaactgtggccgctgaagatttgcttcaggacatgggagctatttgtaagtatctctcaacttggctgttagaaatccatcccagaatgagcgtttctgactcaagttctgtgttctatttataatgacagctatgatcaggtgagtacatgtcaaggttgtggatagaaataggatttgctctgctcacttgtctttgctcgttggataatctgtctgctcaaagttccgatgcccaagctatgggtcgaatcggagaagtcgtttctagaacctggcgaacagctgccaagatgcgcgagctcctcggtccgttgaaaggagatgagcagggaagagacaacaaccgagttaagcgatacatcgcaaagtacacgatcaacccgttagttttcttcctgctattgttctatcatgcaagacccgtactcttcgttgtcggtgctgacttcattttatactgtgcagggcaatcacacatggaatgtcgcatctcatcgggcaagtcgccccaggccagctggcggatctagtcgtctggaggccagaagttagtattcagaatgctatcttctatattggaaacacgaaaaaggagctgacgagggatattttctatagaacttcggacaaaagccagagatggtcatcaaaggtggtatcatcgcttgggcacaggtcaatttcatttatctgcctccttccatcttaaagatgcacgaactgacttgagacacatattcaacgggcaaacgaatatatttagatgggcgatgcaaacgcatctatcccaacggttcaaccaatctacggtcgaccgatgtgggcgtcattcccgaaagcagccgcgatgtcttcagttatttgggtatctgaatactcgattgcttccggtacgatcgcctcgtacggtctttctaaacgggcggaagccgttaagaactgtcgaaaggtgaccaagaaagatctcaaacataatgatatcactcctactatgcaaggttggtctcgatcttcttctgatttacccagatgtaagataaatctggctgaacatttcctttgcttatgcttgcttcaccgattcgatagtcgatgcggagacgtacgacgtccgtgcggatggagtcttatgcgacgttccccctgcaattaccttgccgctgacgaaggcgtacatgcttgtaagctacctcttttctgtctatcacaagatatttattcaatacttgactaatccatttttcgtcgatttttttacttttcgaagttctaatgtctatactctcatgttgttctttaacttctcatgaatatatcacttttcttttctgtctattgttcaacgatcgatgctccttatctttgatctgcagcagtccattgtttttttcttcttgcttcgctttcaatagactaaggtctgccggacaacacagagatctctacacaaaagttatcagaaaaagacagaccaaggatattagatcataacaagatcgggtatccccgaaggttagtcaccttggatatcctgtcgggcagtgagtacaatgttaatccagatcactcgtcgtatgtcagttgtcgatgtccatcacagacgttgtcatcttcctccttcaacatactatttccttctcaatagcgtgcaaatcttactgatatgctaacctatttgaatatgttcgacctgcgagaacgatactgggacgatgatgctgatcttctctgcatcagctatattcatgcaccatctattccatagcatcacttgtaaatatgcatcaatagagcatatacgccatacgatatctgtttaggaattagctaaccgcagatctgacaagatgagggtaacgctgggaaccccatcggtctggttctataagacgccagggatcgacgattccttcaggaatctctaaccatccccattctggcgtctgaaatgtcagatatcctgtctcgtcttcttccggagataagtcttcggatcatcctatctctttctttacccacactcgcctcgttcgaggctacatgcttgacctggtcacaactctttcgggaacatgaggatctgatatactcccggtcggctaaacgtcagattgcactggacgattgcaacacagaagatttgttgaaagaactacgtgtgaagctcgagaatagatcgtttaggaagttgacctggatagaggcatacagctggaaagcgctgtgtaagtttttcgaacgctctcttggtgatcagatcagggtcgacgttttatgttcgagacaacatctaaactgattgatgggtactatatttgcgttattttgcttgagaaggtgtcattcaaaacagaatgaatataaacaagtctgatgctgccatgtacctgtccagaatctatccaaacaagccacgccacagacgtttctggagattcaaagttgacctgaagaatcaacttctactgacgacattcatttcgtcagagatgagagtctatggccttgaatcgatggtccagctcttcgtgttccgcgaggtaagtattctttattccccctttcatctcagacttgctttatgttgaatcaggtattatttgtattcgatcggaatcgttgcccgaaggtgaaccattataatgctctagattatgatcctgatgcaggtgttggggtattcaacagaggagatactttggaaatctgaaaattaagacatttcccgcctgaacaaaatcctcgttacttcattcgagggcagttcgttaaatggggtataattcctgctatccctggaatgagagagtttcatctcaaaaacgggtaggtcaaacaaggtaactcgtctctgtcgtctgaaaatcacaaacgatttatgagacgatgtttgagttgtatagaatacttgttgtttcctctcgactgggcaccacgacgttctatgacctactagcttcatctgatcggccgactttccttcgaacgataaaccatgacgaaggtatcatgggtcacctagacaagacatctcttgtcctcgctcttcgccatcagcactcaatccgacgctactgctctctcactggttctctacttgatatatttcctctaccgcttactgtatctgttgcacattatactatttgtcgaccaggcgcgctagggttctcagatgagctcgcgagcgcgcaggtcgtgtacaaaggaatgatcgaaccagatgacttcgaagatatccgtccagcggcatcctatggtggaaatgaatgaattgcatgccaagtagatggtccatacctcgtcatactctcatacatgtccaggttgtttgtttgtacggactatcacgctgtgttgagagcgtcggaaggggaggaaaagctaaggatagtgaagagtacttgttgtttcttcgatatcgaggtcgagatcggggaaggagactttgatccgtttctggtcacaggtatggagagatatacgggcaatgtcaattggttgtcagtctacgatggacgtgcagctttcggagcaacgtacgctttctcgtatgtctgaaattactctgcatactgtctgactccgttaatctctttttgtttccctaatgaaatgtctttcaaatacacaaagtgatcatatcatcatccttcctcttccatcagcacttacaaccacttatttgacccctgccaatgcgctctgtcttccaacggccccatcggtagaagtctcctgtctcgtactcacccaagatgcgttgtttaccatatggggttacaagcaacatactcttctttcgcctcctcacatccagacgatcattagaaatgctatcaggatcgtttggttcgatgctaggcaagaaaaggtcaaagagaaggatagagcatcggcgcgctcatggacgctcactgattttcagttagaatatgaagagttcgacagcactgaaaccagtgacgaagaagaccatgaagaagcgttgattggtgaagcgttgactgatgaagcgtggttcgaggactttttgaatgtttgaacgtggccttataatgatacggatgagaatgatgaatacgatatgaataaaaaccagactacgaatgcgtcgttgtttaagggcaaaacataaccgaatcaagcacatgtttatcgcggagagtagaacagatcaactttcaagtcaggaggagtcaacgtctgacgactggagggacatccttaactgcaagtggagagtgaatagagtagactcggtcggtacgtctctcgtttccaagataccgtgtatatccgttaaaacatgttgttcagttgaattcgagaagttggaaacaaacgaaacaaagaaatgaatgaacattaaatgaatgaacatcaaatgaatgggtatcggatgttacacgagtagatggacggcacaaacgaaagggaatatgagcggaggaaggacttggataagcgagggattatgagaagtatgggaagagggatcgtgtggggaggagaaagaaagaaagaaggatcgaatggccaaaatagaaaaacagagattgaaagagatgatatgaagcaaggagagcctatgaggggatgacgctccaaagcgttcaaacagcagcaaccaacgacttgaaaacatccgaactcgagcgcgattcccactgccagtacataacccctcctaaacttccacccgacgcattagctgtcgacaaagcctctgacaggcaactagccatgagatccgaagacatgtacccattcgacgcttgcgctgatgtactaggttttccgatcaaaagcttctcgattggaattccttggttcgcaatctcgaacaaagaagaaccagggtaggtagacgaagaggtgtagagaaggccttggcaatcagtgtattcggatgaaccttggttgtagaactggacgttgaagaagtcaataccagatccggcggaagaatagactcctcggtagcctccatcggcgtaggtgctggctgaggtgaaccagggtgcgacaggggcgtgagaaatcaagtagggagagggaagggcggcacgtagtgcttgttggaaagtgatcaacctataaacatagattcgaaatcagcacgtcaactaacttcaaacgtgttctcctctgagatagcggaggagttgaaagactcaccaaggcatggcagttccagaagtgaacgcagggaagtcctcataatcgatatcgactccatccaggtcgtacttctcgacaaaagcagccagcttctgggctgtttgtgtcggatcgtatccggatgtcgtcggtgtatcggttgatccgaaagcgctaaccatgagatacttcccgttggctgcataatcagctttcagcgccgctcggtccgaatcagacatagagacccctttgaagaattccattgaaagcacgtctcaataaattagttggctgttccaatttcatcgtaaccatcgacagaatgaacttacaagcggcagcgttgtcgtaagcaccctcagaaaccaaccagaaagcaagaatgaaatgggtgatgtctcccaattcagcggaggaaggtggttgtgacatgaccggataatcggctacgtgtttgtgtgagatgataccgccagaaaaccaaggaagagacgatcgaaagactggtcaaaaacagtgtatataatgagaagctcgagaaagaaagtctgacgacgcacaataaacaacccatctcgatgcactagagctggatgtaccggagctagatgaagctgtgctcgatgcgactgaggcgcctgaggtcgttgccgtgcctgaagcggttgcagaaacggctgaagtcgtgccctgagcccaagctgtggatgatgatccagcagatacaaccgtggaagtcccggttgatgtagtagttgtatcccaccagtgagtctttgtcttcgtctttgtggaagacgaggaagaagaagaagcagaagcgactaaggatgcagttccagttccagtgccagcgccagaagtagtttgagcagcagaagtggtggcggtagcctgtgcggtggtagccaccgtcgaaactatccagccagaagataatgcgtgagtgacatcgaatggttcaagaagaggactcaaatgggtgtagatcgaggaataaacaaaccagaagcgccgtttcctccgacttgatccggccagacacatccgatgtttgcctgtacagagttagacgcgttgcagactgtatcagccgaacaaacttgaagggtcacccatttaccggatgtagcgcattctgttaaatatacagaccaaagcaaattataaagagaatgagctctacggtaatctataatcgaactcgtcaggtcacacatgagaacaagacctacgttttaaggtagacccgtcacattcgaaagatccaacttcgcaggaatccctggcggtaaggctgagtcctgctctatgatgatgccttcgacgaggttgatgcgctaatgtatatgtatggttgtttcgttcgttcgttgagtcaaattggttcgttcgatcgattgggtgcattaaaatcgatttgaaaagacaaagtcaagccacaacgccccgaagagaggaaaaaaagggttaatgcacgcgcacccaaaagcaggttcgttatacaaacaaaacctaagaccttgaaactcgagaacgaagaaacctaccagctgaaccaaaagaagtcgctatcaaagcgaacaaaatgaaatttgaaaagaccatgtttgaagaatgaaaaggacaggtagaggaaggtcaaagagcgacactgggaaggggatcaacgctgaaggaattcctagaaagaaatggtgaaattaaagatactgttcgtcgaaccaccacacatcaagtattcaagtgaagaaggagaaaaaagccaggacatcaaggaaggcgaagacattgtcagaatcatttcgacgtcatcaccacttccgttgttcgaaaaccaaaaacgcgagagaacgaaagtggaacaaccaggtcgaagcgagagttgaaagggaatggacgagaactggaaaaaaggggaaaagataaaacatacgagacaagtctgatcaaaggggtaagaagtttcggaatctggtcggccagcgacaagatggactttcgttctttctttctttccttttctttctgctttcccaatatcgtctcttttctgagagttgaggcagatggtagaggagaaagaagaagattgaaggtttaaaaaaaatggttgaaccaacttcaattgttcatggacgtggcgggtagagcggactagccccacgttttctagactcgattcccgcagtttttcgatcatctagatgttcttttttttttcttttttagctcttgccttcccatcttgtcttccaccttttagttctcaagtttcgacaaaggtcattcatagtgcgtcaatggatcaatacagataattcctttaatctcgatccacggatagcctgattgaccgaacgcaaacatacattcgttcgtacaaccggtcagccgggcctgtctaaataggaacacagatatatgaaagaaaatggaatgaaaggagcaaaagaaaggaacttaccccattgagctagccaagtcttgaccgaggccgatagacgaattttggacgagcctcgagctgcgtcctgcgtgcccgtgtgcttctgctcgcccacgattgcataagctagaaatagagattccagaaaacagatagacaaagaattagatcactacgcaatagacgctccgcttggaacttgtcaaatgaacttacccagtcccaaaaagctctctccctctaaagcgatcaagaatcgctccaacacatctactgcctctgttccatgaagcgcatgaagatccaacaacgcttcttctcgctcacctgatgtcaacccggccgcaccggctgtcgtcgaactggccacaccgagaatgacgccaagtccagccgcacattcttttcctttgcgagatctatcgagagggtctgaagaccagccttgacgattgcctttgaaaagagaacaaaaaccaaagagaccaatcatcagtaagctattcattcggatgtctgtcatggggtaagatatacatctttcagagagttatatgacaacagaggaaaggactaacgggcagcctcttgagcgatccgtcgtctctcccggaccaacctatcgattcggttcatcaaaactcttggattagatatctatcatgtgtaggtcaagcaagaagccaagtcctgaagagactcactttccggcggcctcagcgctctcaatggtcatcaactcgttcaacgcctgcccttcttgggagaacttctttgcacctgctccgtcctttttcttccaagcctcggccgccttggccaggcagacattccgctgcattccaagctggatagcacgagatcgagctgacaggtacatctggttcagacttgatcctgtaggtaacgtcgggagtagactaggcgctcggagattcaatcgaggagaaggccgagacgtcggggtaggggttgagacaggaagtagattgctactaatagagttgataccattggcggaagacaacccggcaagtgtggccttcccacctgaagatgaagtggctgccgaggtgtcatggataggtaccggtgcaaccgccggttttttcaccgcactagatggtatgaggaaatcaatagagccaaggggtcaataacaaagctggatgaatgagagaaggctgaaatggttcttacgatgagaaccgagtccgagaagcatcatgtttcgccggaccagacgcctttttagacattgttggggctcctagttgtgggaaatcttcttctggtgggggcgtcggagacttactctctggtcgaaggctcgcctcactatgagaaagattgatgttcgagaccgcctgcgagagcgcagtggcgtcgaacgtagatggtagattatggataaactcgcattggtcacctttggcgcattgccctcgaagccagaaccgacagagcgccctttcaatgtcatgactgaatcgacagtcagcccttctgcattccccgttaagataatatctgcagaccctgccgccgaacgagttgttgttcgccactcccgggctcttgctgagtccagagccgttcgagtttagcgcattgctcggtgggacgactgggatacctccattccggccaccggccacaacatagccttccttgggaacgaaaggctttggtgcattggcggcggagagcgaggcggaaggtagggtcgagacgtaggtggtgctcgagtcgttgatctgtccgggtgccgcagtcgaaccgagtaggcctcggatggtgagttcgagatcataaccgtacttgtgaagggcaacctcgagctcatgaggggtgagtgaggtaaagatggagccaagcacatcgagtggggtcatctgaagggttgaatcaagctcttcttcctggaggacggcgtcgaaatcgttatctgggtcgaacgtgggatcgaaagaggacgagtacgaggaggaggaagagtcctgccagctgggtccatctgcttccccagtcggggcgtacgccaaggtatcctgaccagagtagaacggggtggctccgcggggaagagaagtgccgaagggagaaaaatcatcctgatcctcttcctcgtcttcctcgtcatcgatccggggatgtccaatggaggatggaatagcaaatggagagggcctggatggactgacggataagattggcgcagcgatggccagattagaggatgatctggagagcacgtatggtgaagatgacctggcggaagcaccgacggaccaatcaaccgatgcggcgttggctactgatgcaaagggaatcgcgactggcagtctcggagagggcttgaactctatcgccttggctgatagaggccttgggctggagagcggagagagggtctcggaaggcagactggcgagcagtgtgcttggagaggaactactcagcgagccagaccgcacgaacgatggtttcgagggtgatgacccgaggagagttggctcggtgaacgaattggatgtcggcagggccgatgtcaaggcgctcggagatgaggtggacgatattgcggtgaatggccttcttgggattgtctttgctagagtgggagcgatcgacctggaagagtttctccgaggtgtcagagcggatggaaagaagggaacgttgttgttatcatctgtagagggatgcaaaagtagagagtcagttcgataatgttgataggtctcgcaagaagaagaggggagaccaggcacacggcgaatgatgacaaacaacaggtcaaagaataaggaggaaggagagggaaaaaagaactacttgcctctcaacgtgtgcatcaacgtgaggatgtgctggtcaagcgtagtatcattctgaaaaaacggatgatcgaaggatggggtagataaacggccgggtcagtcatgttgggcatatgcaatgtctatcaacgtaacccatctggatggacaaaaggtgtcaaccaattgggacttgcatgaatacccaactgtttcttcaagacgtccttcaatccatcctcgtcgtcttccttcagaaggccgaggactttctctcggaactctactcttgctgtctcaccgggaaggatatctggatgtaagttggattcgctcctgaacgaggacgggccggtgaaagtggcagcttcgacctcgcttggtcttctgtcggtagaagccgaaaaggtcggcgaggacgggtttcctggtttggcatactgacggaagagggacgacaagaaatgattcgtgtgtgggaaagggtctggcatttgagagtagagaatgtgtgtatgttggtcgaaggaaggaaaggataaggaaacagtgaagaggcaggcgagatgggacttccctagaaggcctacaacgttcacccacacaaacacggtcgagatggaagggcggtttgtgagggagatggttagggttggtgattaggtaatcatatacctcgactgtactcttctcctaatcatcttcgttagtatcgttagtctgtttgtctagtttgtccttggtgaaggcgctgatagtgtacatccatctgtccatcccgttgagtttgtcgtgcattttagagaaaggagaagacaagtagagagcaagacgagtaagagtggaggagtactagactaggcaggtggagaacaaaacaacatgaaatcatgaaagtactagcgagtatgagcatacatcacagccgatccgaaactgtgaagatcagagggcgaaacctagtgtatcactttcaatagcccttctgcaagtgttgtgcggacacgtacagtctcacaagccatatccagatgtatacgggacatctggctgaacaaagactggcgggatcggcgcgatgggacacccatcatctcggtggaggacaggctgctgattatattgcatttaccccttaattacattctgtagtattttttgttacgattttctattatcttttcctagtctttattagaatatttcttgtattttctcttgttctttttccatctcttttttcgtccccatctcttttctttccttttcttttcttttcctcctctcatttctcatcgtcgtttccctttaagcactcctcacatttgaatacccagacccagacccagacccacacactcacacacacccacacttacacacacatctctatacatatacatcatggttcgtgccgtccaatttctcatctgttctttctaccaccttgcttccttccctcgttcatcgtcgggaaaataaacaagaaacaatcaaaacattgaatattcaatgacatcttactgacgctcgatctctttcccatgtttcgctccctctttctgataatctgctataaaaccaacaggacgcgatcaagaacgttagtctgtgtctcctccgatctgaatcaatcttcgtcttctgcgcccaaccgtgtgccattcatctctgcagccgtttcctcttcagccatctctcttcgggctgacagcgaaagactgacgtgttctacatcgatctgctctcgatagaaactcaaatccctccgagacgaggcggacgcctccctcgctcgagctgaagaggccgagacgaagaacaagcaatatgagcaagatgtcctcacaaaggatcaggagatcgcttcgctctcccgaaaagtccagctgttggaggaagatctggagaaggccgagggcaagctctccgaggcaaaggacattggcgaggagtttgagaaccacaagggagcaagtgaaaacatgagccgaaaactccagctcttggaggaggagctcgacacagcagagaagaacttgaaggagaccgtcgagaagtatgtgtacctttcgtttcttcctttccctcaacgtacggcttctcatcatctctcctgatttaactatcccccactctcgctctatccacccaggctccgacaggtcgatgtcaaggccgagcactttgagcgacagatcacccgggtcgagcaagagcgagacaactgggaaaagaagtacgaggtccgtaacaaactcccgattatagtttctccctttcatctctgcgcacatactgtttcctgtccactcactcagaattctctgctctctctgtcattcatatgtcttttcaatacaacaggaggccttggcgcagtacaaagagtccaagcgcgagttggacgaggtggtcgctcagatggaggtttgtcctctcgtttgacctgggatcacatatcgagagagagaagagataactgatgtcccctactctcattttcttaaatccatggtttcgttgtgatttatatcctgtctctacagtccctctgaatatttacccatgcactctctccctcttctccttcttcccctgcctctgaatctattttctctacgtctaacgaaccttctgtctccacgtcttcttccctatcctcccttcctggcgcgtatacaccattgacctcgatacactctcccttcaaccattctttcgaatcaactttgatacgagatgatccggttgatggacaggcgtactttcagcctggagcaatcgtcctcactttggtcgtccccattctcatctatctggtttccgtttagaagcctccacaaggaacaaactctttctttcgcctatccgcctttcttcacccttgcttctacctccttcctctgttatcgatcttttatgttgttcacgacgtcgtgtgccttggcctatctgtcaacgtgtctctttcgtcacgggtctaaaaggaaaggaaaaagaaacagaaggagaaggctaatatctcaaacgagcacatattaacataggtccatctcagagcaagagaggtcacgtccacaagaatctttgtgttgctcttctttgtgagtatctatccgaacaccatccaatcaaacacaatgctgcaccaccaaggaaaccctcgaatcaaagggcagccagcgtagtggacatcgtaggcaaactcttcaccgcctctctgacaacgtcaccagcaggaatcgaagatgccgctaacaccgaggtcaaatgaggaccggagccggtcggggtcagactgctggaaatcggttcattgaaaaagtaggctataaggtttggtatagagtattcggatctggtgccatgtacatatcagaggttcgtcagataggaaagaagagaggagagagcaaaagttaggatcaaggtaagacctttgtacctgaaagaccatagaaggtcaattcagggagagaggaaggaggagaaagtacgtacccaaaaaagtgtatgaaaaagtgatagatcaaagccaatatacccatgaccatcgggaccttgaaggccgagtatatgtctgcaacgattttcatcatcagtttggtcggtcaacaaaaagctcatgatgtcaatacaaggaaccagggaaaggagaaaacaaagaagaagagagagagacgaaggcgaaccagaggtagtgtatccggtggtccgaccctgtttccataattctaaagatcgccctagtcgaggtttctgaaactcttccggacgagcgtaccggttgatcatcttgtgcgatggaagatggcttggtcatgtacatatgtgcgtgagaagagatcagctggcggcgcaaactgatgtgaggaagacaataaacggaaggtggggttcactagattgagattgtaggagaccgaagagcgttaaagtgagcaatcaacgccgctctcgacaatggtcgaacgtaagagtattcctgttgatcccaatcagaaagatgaagatgcacaaggttaagcaagacggtcgggcttaagaaagtctgatgaagactcactatcggatcatctatcccctccctaggcaagacatacccgtcctcgtactctgctgcagagacaaaatcttctcctcttaacagttcgctcacagcagccggcgccggtgtcttcgacatcggtgcaaaatccgagccgtcatggaacgtcttttggtttggatatcatgatatattaacgtcaaacgagcactgcaggagcaacaagtcgagagtagaaacgcgtcctcaccattcgtagccaaggcttctgttgaagagactggcgcatgtcggattccttggtatctcctgagacgtatctgtataaggttctattcagtctcctctttctgcttgtgactgtcctggattttgatcagagaatgacgcggcttacatgagagcaaggtcttgaccatgctttatcgtcagttcagtcaaattctataacagccggtcgttttacaattggatgtgaagtcagcttacatgaatatcctcaacattcgaaaacatgggatcagactgtgtaaaaatctgataaacgaaccttatgtgaagacttgaaagtgttgtcttcatccgacgatccaaaataaaacactatgattttctttccagcaaagtagctctttatatcatgaattggctgtccttttgggttctctaagcgaatcctatgcgcgatcatagccggttgattgaaatcaattagagaaaacagaatatgaacaagaagtaagcacttattgctataagtagaaggaaagggttcgaaggtaatgaacaaaccggcgcagaagaggatcaggatgagtatataccgcctggttgtgaactagatcatctggaatctcgactccttcaaatgagacattatttttcttctcggatgtttgcttgggtgccatcaggacagaaccacagtttattgaagtaggtgagtgattgaagtgagagaaagagagcgagatggagttgacgagtattctcgctgtgtggctgatttatacagcattggcatcacgtgcaatttattcggcgataccttctctaatctacatcattctctttcgttcatcgatgtgagtctttgttgctcactgaatcttttcactagccagtttgttgagcagcagcagcagaagaccactatgtccacagcagggaaggaaagcttaactgcctacccacttccatttgatgtcccgatattgagctcgaccgaagcctttgcgttttccttctttctcacagcaatctacgtcggatccctctatctttccaagtcatccagagtctttcgtcaagttctgtccgtccagtccacagaaaaagatcgcgtccgaaaagaacttggaagaaaccatccggatgttattcgagccagaattaaagccgtgatgggtgcaacattcatctgtgtgtttggcatatgggggctcgtccaatacggatcggaggctcacaaggatccatcggaaatcgtacgtgttcatcactggctaaacgaacctgattcaggctgatgcatgtttcggtggttcactcataaacggcccaaatatccttgcttcttatgacagagtgcagttccaaaaatcaaaactctcctccctacgctttctctgcttggcttcccgctcgccatcccagcttcccctcttcctctcgcagagctctactcgaccgagccgggcagacttatgcaagcgttcttctggcttccgtcacccctggttccgttcatgcttgcaccgatcttatttctcggaccattgtttaccgatgtcggtttggaaggatttaacccaaggcttgcgtttgagagcctaggatctatagtcggaattagaaactatattgtggtgcgtacactttttctagatagactatgatgagaacctgtctatctagtcggctcatacttcatatttgatgatatttcgggcaggctccattgacagaggagattgtgttcagagcttgcaccatcgctatcgcccagctttctggagcgtcctggactcaccaaatcttcatcactcctctatggtttgggctaggtcggtcgttggcttccttttctatgtcaatcaatccgagtttcatcagctagtactcgtgctcagttacaaagtactttgatccttccacgtatctatgaacagctcatgcgcatcatgcgtatgatgtgttcgcttctggcggaaagacaatgagagcttttcagatcgctttgggttcaagtagtgcgcatactttttttttccttcttgtttcgagtggtagactggatggactgaggtcatgatgatcaaacagttttccagtttatgtatacgacggtctttggttggtttgcagcctatctattcgtcactaccggtatgcgctctctacgttcccacctttagcccccttattcagcctatctattccttggttctgactgtctttttttcgttattgtcgggactgctgattatcgaatgaaggatcgattcttgctcccctgtttgctcatacattttgcaacatcatgtcccttcccaatcctgcttacgcgatgcagagacacccggaccgaaaattcgacatcatcgccacttacatcatgggggttctaggattttactatctcttacccaaaatccaatagaatgtctcttcttctcctttttgctgttgagctggttgtattaagagctcgaatctattatcatatcgaaattactgaaaagaaaaaacgtgacgccctaaacatacattccgacaccagaactcgatcgatctattttgagaatatcacacgcctccagtccctttccgcttggggattactacgtatttttcataatctggcaaaacctggctctctaccgaagggctgtaccaagaccagaccgcgaatatcgcatttaggaatttcgacagcacccccgtgctgagtatcgcaccgaatatctttgcaacatagcaaaataatttaacgcctctatcagtctcccagaatatgagccacggtataataggtgagataggttgagcttcttcaacgatgggtctcatgttggtctcataccccttcatagctgcttcgggatcgctcttgtttttggccatctcaccagctagaatgtaagcgccggctacagaaagagaggctcccaacccgatgaaaggggtaccgcaccaggcagcatcaccaaccaggatgactctaccggtttcggtgctccattttggagcatgcacttgaccaagatattcgaaatagagatcttgactgtcttggagacctcgaatcaaccgctctgcgtttgggccgccgtccgcaaacaagtccgcgatgatagctttctgttcgtccggagggagcttttcgtagcctttggattccggagcgacgaacgtcacaccggctcgactggcttgagccttaaagtcaggtcgaaagtacatcatccgtttgcgtgttagaggaacgatatgccattggtcggagtatggagtggtttcttcaagagggatactgaaatacgcggtatctattcacaaggaagatgatgtaagcgtgttagaattgctctatccgtgctaatgtttttcgacttttgagaaagaagagcgtaatcaattctcacaatacccaatggaccggtaatcaaacccgctttctccaaagacaaccttcctggtcctactcctcgatccgtcggctaagatgacgaaatcgtagacggcctccttgccggtttggaaccctatcttgacctttcccccttcaatctgctcctcgacgctgacgatgtgatctccaaacacccactcagtctcatccttggtttcttcgtagagcatctctgcgaaatctcctcgaaggatctcaaactcgttagtaggcccgtttcctacgggtagctgcatgtacatctttccatctttgtcggtcactgttgtgccttgttcgccagtgaaccgagatcggattgctgactcgaggcccatgcgacggatcgcttccagctattgaaagtaacacgatatgcagacagtcagatctccatacctaaacagataaaacggcatgacgagccaagatgagaacagaaccaagagagatataggcatacgccgtaatgagaaacatcaacactctggccaccaggtcttagctctggccatctctctacgattgtcgtctgaaatccgaatcgatttaaccaatacgcagttgctgggccggctatactgccgcctgatatgagaactgtcttcttgtctttaagttgttctgtcatgaagaggtaatgatgatgacgacgatgagccgtgttccggagaaagaggacaatctcagcggttccgcatatattttatactgaaaagattgtgatcgaatactcggcatcgagataagcttcgtcatccggccggctgctacgatcgtttgacctcggtacttcttatttcccgcatccgtatatctggacacacacgcgttctttctctttctataccgggcacaaatatcatgaatcagtcgtcatcggctaaacagctcgatggcccagtaagataactataaggtgatgattgagagttgagaattgttcatatgatcatctataagcgaaagctgcccttgaggtcgatcaacctgtccatgatatacaagatatagtgttccgatacttcgcccaacatcaggtacctaaggaatcgattttttgaaaccaggaaagtgactgtcggttctggtgtagacaaaaagagagcaacgtagaagaagaagcagttgtatgtgttagttgttatttgtcgagttcatacggccatagaactaagaaagaagaagagatcaaagcacggaagacgaggagagggctagaagggaaaaggctggataaagggatcatattagatcatattacgtcgtcacgaggtccctccgtttcacctctgtccctagcgaggacagaggtgtgctctcttcttcttccagaaggaagaaataaaggagcagacgtgggtccatggatcgggcttctctggtgataatcatctcccttttgtttcccctctgtgcccatcttccaactcttcgcgtgtgactcattctgccgagcaaaatgcaaacctgacagggatctctacttacccaaatgctagactctcggaggagaccactacattccaagatcacgagtatcttgacttgttactccttcgaaccgccggaggttgctcctcttttgcgctcttgaaaatcgtctttggcgtcccttctggcaaaggcgggacagtcaacgacacatgctcgtaagtctttggatcgaaggatttggcatcgtccgactttacgaatgacgggatcaatttagtggagactgaagtcgagccagtgccggatggttgtcttgatgcttcaaggatggctctgattcgaagaagtcgcgctcggtcgatacgttggaagatgagagtttgagatatggtgaacaggtaggttgtcaaaaagtagacttgcatcgccttaaagaagaaaaaaaaacccccaacggtgaagcaaattgtgggaagcgtacgttaaatacaatagatgcactcaacagcgaacacggtggatcatggacaaagaactaaccacaggggcaaatatggaaattgggaccaacgccaaagcacctgccctcatcacgttgctccacaactgatcggtccatcccttcttcgttaatctctcgatctcttccgtttctccttcgactcctccctttttaggcactttgatcgtctcgactaagttcggtttctccacgtgaaacggattcagtgcatctcgttcttttcgggcgagtcgcatgatctccacgttggcaaacaaggtcaaaccaacagcgataggtagagtacctgtagagtctggttcgaccaagggagttgcaccaaggaaagaggggaggtgctcgtagagcagaggagtcggagacattgtagccgaccgggtgatgtagacgagggtcaggaagagagggaattgaacaagtataggaaccaagaccgtaggtagagggtggcaattgaacacgttgatcaatcgtttgctctcagcgctgatctgggattggggaagaggaaccctatgtgcgtaagcagaaagaaacgaatggcacacaaagaaggagcgtatacacgaagagaaaacttactctttccttaacgaaggtaaggtattgctcgtgactatacccttctttccgacagcctggtacgacttcgagtcgagctttatccctgaaatgcatcagcattggcatcgccttttccttcagcttggcttctctccgtcttgcccataccgagacgggaacggtgatcagaaatctgagcgcgatacaggaaacaatgatcgtcgtgctgtatggaggaagaggggagggaaacggccaaggatggtcgatcagtagatgtgcgagccaggatggatttgtttgggcaagcgcgtcggccgctgtactagtcgacatggctacatcggcaggaaggtcaagattgatggtttgaatcgtcacaggcgacgacgacggtattgatggtgcagctgccgaggccggcggcgagatatcaacctggaaaggggaagacgatgcgaaccggactgaacgagggatgcatgctgagggtgatgttcgggcaaagatcaaaggagaacggcgaaagagaggccgaatagggagcactaaacgggatcagttggtcgtggtcttggacaacataaataagcctatgtccagacacgtatgctcacttgattattgaggccaaactagaaacaagtttgagtgttatacagatgatcttgatattcttcttcgtcgtcgtcgtttggggaaaagaagaagtaggaaaaaagaaagcgtctggcaaacttcagccgtccagcaaaaatggttgcgcgtaactgggcttccgtgtaaccattttggagttccccgaacggggctgtagagaatgatggccgacgcaattccattcggtcatcgctacgacatacagataccaccaacaacaacgacgacgacgacgacgacgacgaagaaagcaactagaacaagaagaacagaaagaagatagtcatcgccgaatagagtccaaatttgatcaagatatatcgttcagaatgggtctttctacaatagaggtcttcgcccaagggagctcagttgttatcagcacgctattcaaacgtgagtatattttaacctaaagagcagaaaccaaaatcagctcacaacagcgtttggtcgttctttaaaccgagcagattatcttaataggaagaaggtccgtcagataacacacgtcttctccgttgtcctgttgctctaactaactatttttcggcatgtcatagactacgcaagattccaaggctaggagcgagcttctgtttgatgaaatgttcacagtcatgtaagcgtgttccacctgatgtgtcatagagatcggacgcatgaagtcatccactcaacactcattactcaaccctatgtcctcctacaggaaagcgttcctggagattgcaacaaagtgtgtaatccagttgttatcgcgacgcgtgctcaatcaaagctaacaaattccctaattctcctgttgtcgcgtcttcggacaataagaaatactgttgagggtaatttatgttcagcttcagtttggcgtctcatcgttctcgctaaccctttctgatctcttaacagacctgcagcagttctcaaataccagaattcctgcgcctcccaacatccttgtcgtccgtatacttatccctctttcgagctgtcacatcgccgccaagtacctcctccaggctcttggaggacccgaacaggccaggaagattgtaggcggtcaagaatggtggcaagttcgaggaatcaaaggagtcgaagcagagtggatcgtcgtcaagaaggaatggatcagaagagagaaggaagataaagagatgagaaacaggaaagggtcgtcagagaagaagtccgggaaagggccctctttggagggtctagaggtcgaagatcaggatgaggctctgagggacgagggaacagatggaatgaggacgatgttgtacatacatggtggcgcgcattactggtgagtacctcagctgtcaaccatccttctttccagaaagagtcatctcttctaactgcttagaactatcggtgctccatattttccccccaaatcaggggaagcagtgagtaattagtcgtctgatttcaatcaagattatactcactattcgtcgaatcacgggtttatctagtcaacacacatagatacaccatctggagatatgctcggaagatgaagggaagagcatttgcaggtaaatttagctgccaactccaatgattgttttatgaatcaatttgtttcgcttctgacctcatctttgagtcaaacgtagtcaactaccgaaagtcgcctcagtatccgttcccttgtgccctgcaagattgcatcgctgcctgtaagtcgagatggtttcctttagccagagctttaacaagttttacatttaaaaacatgtcacttattactcgtttgcatattggttcattcaacattaacaaaaatgaatgatgaacagatttgtacctgcttgacccgccagcagacgcgaaacacgcgcctgtttctccatctcaaattatcttggccggagactcggcaggtggaggcttggttcttgctcttctccaagtcattcgagatgtaggtcttcctatgcctgccggagcggtgctgatatcaccttggtcggacctgacgcattgtttcccaagcacgatggagaactttgcaacggatgtgatgcccccctatgggttcatccatgtacgttctatcattttatatccacgatcatcacctttcctctgttttctcaagtattttcttcgtatggatcacaccatgggtcgtatcagaaaccgtccactctctggcctccacccactccagaaatatcagaacagatccagaagaccctcaagctaaagacccagaaattcatagcagaacttaagagccgagatcaatcagaccttccttctcaaatgattgaccattctatctctccaagttcgggcgtgtcaacgacaacaaattctcgtccgaaggatggcctgcctacatctgattccgatttggtagagtctttcggcgcagcttggagcgatagaaaacacgatggagaaaacgatacttctcctgacccaaccaagacgactgcgaaaggcgatgtgattcactctgagttacgaaaagatagtactgatgtattaagtcagggtttgaacgtcgacgagcagttgcatccaatgacgagctcaggaatcaaggcagacaaatcaaagcacggaaatccgcctgctcagacttcggagggcaaggtccaccagaacgccgtcgacccaacgatcggaggagatttagaaatcgagatcgatggcaagaaacatcacatcgtaagcttcacatcttctgtcattcttttgtttctcttcatgcttgtgccaaaactgattcaaactttggttggtaatcctatatatacaacgatgaatattagagaggacaaatccaacagtatgcgacaaatgctcagctgcctcatccattcatttctccggccttcgcatacctgggaggtctttgccctctgctagtcatcgcaagtgacaaagagctactcagggatgaggttcgtttccacgtatttttcagaggtacacgcagtcctgaaaggagacgaatctcacagaaactaaactctattcttcctgtttgggttgtggtcacatctatcagatcctctatgtgtcagtctcctaactaaattccgaattttgaagactcttttttctgtatttattaacgaaacttgactatcttttccggtttgatttactgacctacagcgcgcacaaagccgcagacccgaaagcttatccgattcctccccacgtggagcgcatgttgccttctttggatggtattcaggaccgatatggtcccacgaaagtacacctccaggtttatgatggtcagtctatattgttcaatctgttttggtatctgtttcgttgtctaacaggtccccatcttctgtctttacccacagaggtttgccatgtccttccgatttattcaatgacaaccccggcaaaatattgtttccgtagtatcgcttccttctgtaaatttgttacgacttctacgcaaacggacgtcccgttctcacctttagggtctgatgtagatgaccctaaaggttcttccggttccaatccttatgttttcggctcatctgttcatcctgattcgacgtctcccaagtcgccagtgtgggagtcggcatcttcagtctcgggttcggactttggatctagatcgagagagatgtcggcgagttcagaagtcaacttggctcctcccattatgacatcgacagtttctaccgagcccgagccgatcagtccctccaataacattgtgatgactgagcctggtcagatctatccaactgggctcgacggacctctttcttcaatcactacaccgtcatcctcagttacctcttcagtcgccgcttcgcctttggtatcttctccgaacgtaagctcccaaagaccattcaatcggaggttcctgtcgctcaagacaattacagcctacaaaggcggagaaagctcgtccggatccgttccaggatcacctctggggtctgaagccggcgcacaagagaaggagatcgattggaaagcgccaagtatggcaggtgactcctcgatctatgtgcatccccaggtatgtttgttcttttacgtttgtcatttttttcatcctctgctcacctaaacggtaccgcctcaaaagggagagccatttggagaaaaaaatatcattagagaacgagtctcgaccacaggagtgttgcgtccgctcgagccagaggccgatctacccgggctgcatgtcccatttgacgaactcgcgaaaattaaggaactccgtaagctttctccttctctccatcctctacctatgcgtccttgccctgtcaaggtgatgatggcgccgattgttgatctctttttcttttttaccttgttatttctgggttgacagccgcaaaacggtatttgacaggccaagcgctttgggataagaagtttgcgtgagtcgagttcatcgtcacatctcttcttcttcatgagtcactcaacagctctatccttctctcacgtctggtgcgtcgatagacacgctgccactaaggtcgagcgagaaagaaaaaagaacatccacaaatctcaggaagacggaatgaaggtcaagtcgagaatcgttgagcaatggacgaaacacgccgctgagagacaacatgctagaggagagctgaataggcaggagcaagccgaaaatgaggcggatcaagaaagcgaggatgaagaaagaatttttttgttggattatgtaggaggaaaattcaactggctcttcaagtgagtagtctcaataagttcattcacaggatcaattattcatcgtatccttctttctatcatattcatctcgaacgaacgaaggggagagagtccgcccccctccgccgtcgtcagccgacgagacactgtatgtatctttcacgccgatcaactttcagttaggtgtccatcaacttaaaggtattgcttcttctactatcattagaatgaagctcgaaagttggcgaagatcgccgatgacgatgctgatgcgattctcagtggaggtgcaaacctctggtcagttgcccctactgggttttgtctacttctaaaacggttttttaaacaagccgtcctgaaccttttgatattccgacaaactataggacattggcgatcgaactcctctcacccataacggcttcacgggaaagcagaaccaactcgacctctacaagttcttcagtagcagacacaccagacgtcaagtctgatgccgctgaaatcttgcatgagaaccgacctcgggcgaaacggcagtcgtttcttcaaaagttgaaaaagcataagccttccgaagacctttaacagggagaagaaaaagaggtctctcccacaggtcttattgatgtactgattgatactcgttctgattcgtagacatgtactattttcgttgatgatttctcttactgcgtcttctgctttgatcgcttcttgatatttttccttcttcgtgtatcttttcgtaactcgtccctcgttcacatgggtcatgtaagattcgatcatacgaaactcatatttcatcttctgttttggcggaggagaatcgatcgttgaaattggacaatgcgaagtgaagagaagatcattagaaaaggagcaagggaaagactatgaacacaaaaacatgaaaggcttcctttctaagcacatataagagccaggtcatacacagtcagtttattttcggacggatcgtcgtattaagctagcagcgacaacgcctatgactgctaccattcctccggcgagggccatgccgatgtaaccctctgaaaaagagcgagaagggagcagatcaataagtagttcgtccgtggtagaaaggatccaacgaaaaagagaaaacattatgaatgtcttcatgtcaactcttacctttggcgagaccactatcgatgagttggttcagcgattgagcttgcaagtttgtgggctctttgcttaacaacaaatctacagttttcaaaaagcaaaggaccaacgcaaaacagttgagtccgagaagcacactgaaccggaaagtaaggggtaaatagaagaggtagaaacgagcagcgcgtaccattgaatttcttggcgttatcccaactgcctaacttgtagtaacccaaagcaaggtagtagaggcattcccggcgacgttgaggctcagccgcatagatttctgaccaacagcccaagatagtttcaagatcagcggctagaacagtacaatggatgaaccagaaaattcaaacagaaaagatcgaatacgaatgacttgccttgaagtaatttgacaccctcagtctgaagatctttgctcccactcttgacgagtccccaagagtagttgaactttgtctgaatggtgagatgaccagcgtatcgttctttctcaaactgaagcttgagcacgttcaactcctgaggagagagcgactcctcggcatctgctgcatagggtagatcggagggcatactgttcagagaaaggtggcaagataagacgtgatgcttgtgggtggtgtgagaagtcgagtaaggaactagccaaagagagcttacgcgttggcggataagtggcatgcacagctttctgctgtacgtgtggcgtctattgcggatgtaccaattctcgttgatgactgcttaggttgtgtgaatatgaagaagaacgagaagtaaacaggcagaggaaagcaatactcaccacgaaggccagcacgatcacatccttcgtgagaacaccaaccgaatggagctacaggtgaggaaatgatttgctggccagactgtagcgccgaggagatttcgctctgatgtgtttctttccttctttcaacgatctctgaaagccggtcgcgtcgacttctaccacttcagcccttccatcagttcagacaaacaattcgttacaaccttctttcgacgatgcctaccttctttacaaacgcgttcatgaagagttgtattccaatttacccgccacaccctctcagctgagctatttatgtaacatcgctaagcctcaagtagagacgaattaccactgtgcgttgtatgacccggatgagtcgatgttgatcatggaggaggaaccagtcaaatcattacccgagtccaagctggtcgaagttcaattcctcgggggcggaagtgagtcttcatcttggagggatgcaacccctgaggatgtgacgttggtgcccggtttaggtgcaggactgagcgcagaatgggccaagtgtttgatctgttatggaacaaacatcgtccagccagaaccaccctacgtgttcgcgagaatactcaaaagaagtgcctacactccagatgaaaaggtagctatatattctctggggaaaagatgacagagagacgtttgctgatgttatttggtggaaacatctattgatagaacatgcaatacgttccaactatatcaaccatcaacccatccaatcctccttttaatctccggcattatgtgataacctatgatgaacaaggtcttggctctttagaacatcatgatgctaaaggtatgtttgattcagaattccttgtctcatacccaacatcttttctttctatatacatgtgaatatgcaagctactgattcagagttttgggtagatgactgtattttgtatgaattcctcggtcggctcctccatgcgtatccggatctcgactttgatcttttagactcatacgaatttcttccattggcatctgtcgagatcactaatctgccgatacacaacgatatgatcccatacccttcgtcatcactgacatcgctgaggactgagaagtactctcagtggggaaactcatataacccgttagtggagtgtcgaagagctataggggaaccgagttatagagcggtgttgaaggatcaggaagcgtcgttctgtccgatggcaggatgtggagaatatgactgtcaagttcacagtgagcattctctctcttcaacacgtacaacaggagattttcttcttaggaataaagtctgacaatcagcgcgacttgcttgtcaatacaacctcacagccgcatatctggatgactcttcgagcttcgtaaacgcaaaaaataaaggggacccaatttcaatcaaccaactgtatctcgatacaaaaaagaaaggcccatgcggaccgacatgttttctcaaagtctttggagatcgatcggtatgcaaactttcttctgaagcttcgtgcaattcagtatcatcctgtatattactttctcaatctaacatgtgcatcatcaaacctaacttagaggaagacatttgaaaaggatctgtttgaccaggtcacgtcgaccaagccatggccggacgaacagatagaggaacttatgacgctcatcatggccatcccggatttcacgccttgtcagatggttgatctgtttatgaatgaagatgggagtcaatcatatacgtgtgctgatgtacgtcaaagtgccattctttctttctacttggaacgaccttttcttttgttgacctggtcgtttcatttctctacgagaaaagtatttcatacatagatctaaggttatggatcttgttgagcctagaccgtcttttactagaaaggcaaaaaaacctagaacaggttggcctgggaagaaagttttcggtctgtctcttcttgccctttcacgttcagtcataactgacgtttatcaagactgacaacgcccatgtcatatacatatagatttcaaccatcagcacatgcgcttgtacgtttgtcgaactcgatatagtttcatcctcttccgtcactgactggttgtatggatctttgtgtacgagtagaactcggccttgtgaccacgaagggccatgtacgattagtggtatgtactatttccccttcctctggatatgtcatcaaacagccccaagataagatttgacaggtttttctctcgggcgtatgattcttctactattctttggttgcacagtatgcgactgtcatgtgaataaagtttactgcgaccggaactgccattgccctccagactgtatgctcgtctttttctctctctcgcgtctttttcgtttcttcgcagcttcaactttagaatcaagagttcatggatcatcatatgcgcatatatgctcgactatgctttcttgtcctggagggatttaggtacaagaagatacgcaggatgtacgtgccggtctagaggaatccggtgtcagacgaaatcatgcaaatgcttccaggacggactagagtgtgatccgttcttatgtggtacctgcggcgctaggtttgttccttccgggtttcctttgctttctgatagtggttgtgggttcctgatatcgatgtcttgggtggacaaataatcaaccggtgggattgaactatagaggtcagtgtttgaacttgtttcctatatcagcttgctttacataacaatatcaacttgtgtttctgatttttaaacacgcgcacatacaccaatgatctagatcctgattccaatcaatgtggtaacatcaacattcagaagggtcatacgaaacgagttcggatcagaccttcttcccatggtcttggtttattcgtcgcccctggagaatttatagaagagggagagttcattatcggtttgtgtttttttttctgtgttctctcagcagtctcttcttgatctggctgaccgagtttcttccttgcttgacagagtacaaaggagagatcatctcagaatttgagtcaaacagaagagggtgcgttctggtgactgacggtgtcctcgtgttgattctaactttttgcacttattgaacgcttctcggataaagtcaaatctactcgcaagggttccggaactaccagtttgatctgaacagagatcaaggagtagatgcttaccgaaaaggaaatgagtccaggtttatcaaccagcctgatcctgataaacgacagagcacgggaggcgtgggcgaggcaaactgctgtgtccgaggtaagacctcttgatcctatgcttgcgcacacagacttgtaagcggtgctgatcgaacataatgtttccgataccttttcagtcttacatgttctaggtgaacaccggatcggagtctttgctcgtatgtgcccatgatgctatgtctctttgctgttgcacttgcatgatgatggcatgaggctgatggactgacgcgagcaaatccgttctttaaatactcatagatcaagacatattctctggtgaagaagtgagcgcgatcggtgttctttctatttttgccttaccctcgctcacttgaatccatgctgatcggtgtgtgtgtgatcatcctattagttactgttcaactatggtgataagtttgatccgaactcctcccggtagaagagagtttgtattactggccggcctctatttgtaatgattatatatgacaatcagcaatcttgaagacataaacgtgaagggggggttgcgtatgtctaggatgactagtcagcgaagacaagcaagaaaaccaagaagacagagcgggcagaatatagaaataccggcagatcgtaacggacgataagctattttctttgactattgattccttccgcagtccatcggccaatcctctccgtcagggatgacgctcactctccgttaagacctttttcttctttccttgaccttctcttgtgctttttcttgacaaacaccttcttcgattcctttaggtggtcagccatctagcttcgaatcaccctgtcatcttggcttgtcgtgcttctgctcgctcatcctggtatcagggttagtttgaatttgtccggtatctactgttgttttcgctccgcttcggtccatttgaaaccattcggtcgtttgtcgctcgtccaagacccttagaaaacaaggaaatagaggacttgagagtccaatacgggtttcttctgaagagtcactttcgtgagtgacagtctttcgtgtccatccgtctctcaagctgaggcgagacgaaagtcacagccttttgtatgtccattaggcaggatgccaaactgcaacccgatctcgccgattggacctgcaccggcgactcagggttttagtggcatattcacgacaaccccgaggacttcctgttcttcccgttcaagccttacctaatattctttcagctaactcatccgcttttgtatcttcctctccgtcttttctaccaaagtctgcgtctctgtctcactacgcatcacgaaggacgagcaagaaagcacgtttgttcgaactggaaaacagagagctacaaatcagtcatcaccagcaaattccatatcctctgttctctacgcccaatctttagccctacatgcctcagatattcaaacgaaaaacctcggttgatgaggggactggcattcggaaaaggtcgatggatattcctgctgccggtacggccccggttaaagctttcaaatccatcttcagcaaacactcccccgccgctccggttgataccgcctcgccaattcccactagccgaaaatccttggatcccaaggcatctttggttcaggctgataacctgactgattcgccgaatttgacatcaggaagaactgctgaaaacccggctcagatagttgctcctaggcaacagcaggtctcttcattcatgatctctggtgcgtgttggctcggtcattttctcgtctctctgtgtatcttctctgtccttctctgaccaagcacccatgcatcttgctgtctcttcctcatctcactttggaattttagatactgccgacaaaccgtccttatcagctgcttcagtcacttccaacttctcctcggccatgtcggaaggaggctcatctcccgttgtgcccgacatatcttccactccgacaaccccgtctccctctggtgatctgataactctcgatcctccctccgcgtccgctcacgtgccctcctacaagactaaagccattcctcctcctctcccggccttcaaacgaaaaccatcgagagcggatgtccctgcaatcctgtctcctcggatactatctccgaggatgacggggtcttcctcaatgccattcgctaccgaaccctcattctccaacatgaatggaaccatcccgagcttcttcacgtcaacacccttttctgccgggggctctatggacaacacgacgggcgaaagttcgaacacgtccatgactgcgtcattctcatcatcctcgtctaccaacacggcaacctacaatccttatttccaatccggctctgtgaacagcgaacgatctatgaccgcctcccgacctttgcctgctactagaaagagcttggtctcggcattccctagacaagtgccctcacccatgccacttacgaatctgcccatgcttcctcctatgtcaccgacaccgagagcagagaacccgaagaggacagtccgggcgatgccgatgatgttcatgacaggtcagtcggcacatggaccccacgaggaacaagaagaagatgatgacagtggagatagcgatacggatagcgaggatgaagcgagacgatcggtcggagcggccaggccgacggcggcagcgattcccttcccacgtgtttcgaacgaatcaaactctacctctacgtccggatggaccggacaaaccaaacgattttcaagtagcatgattagtgttgatagcattaatgagggagatactcacccaaatgggcccccaagaaatgaacaaaaacggggttcaatagatgccttccgattggacagtacgttctatttttgaaccaagtctccgattttaagacggactatatctttgtcaacttccccttttcttcagataccgtcatatatgtcgcatcgtttcattcagtactaatcttttctttctccgcttgctagattataccatttacggaccagtttcctcatccgatttgttacctgcatcctctccattgacagcccctctttcagaccgccgaaaagtctcccagcctcagctcgacttacatagtgtttctccatctttgtcgcctgacctgaacgctttatcagagccatcgaccagtctcaagataattccagcgattccttcatcaaactcatccagaaacccattgggttcgttcgacaggtttgccaattcagagtgggctctacctgccccttccgaaagcgagccatccaaattgcctgtcggcgcttggactacgttctccatggctactcctggcgcaactcctggaatattcactggtggtaccaagacacctagcgctgaaaagagtcggacccctcgagccggaaagagcgcaatcccccccatgtcgtcttactttgatgcccaggataacatacctcctgcggatggaggaaagaccccaacggctccagggtcgaggtcacccaagcaaataccagccgctgtgtcctcagcattgactgcaacgcaacctacttccgttttggccggacccgaatcggatttgacggaatcgggagcagagaccgatgtatcattttcttcctttaccgatacggacggagagaccgaaagtgatgtggcgtctaacggtcagccctctccggagctcgatgatagtactaccactcctgtcgcatatacttcgactaggcccacacattcgactcagccttctgacgactttgtcgtcgtgcagcctcctacgcctggcgcccggatcccagatcgtacccaagaatcgtaccgaccgagtctttatcatcaggcttcgagaagtttagtcaacttatcaacggcatctgatagacgaatggatttcgatccgctcggattaacgaagaaagaagttgccccagtaaacactcttgggcctgattcgtccgttctgaagagcagcgcgattttcaatccatcattcagcttggaagcggaccaacctaccaagagccctacagtccagaaaaacccatcaggtccgtcgacagagctaccggtaggtagcccttcggcgtacaatgcccatgtctatagatctcccccaccaccgatgacacccctgcctgtggatggtatgttgcgacgacggaaatcaatgagcgatgttcagacgtctccaccagagtatacacctcctgaaccgggtagcaagattccaaggccaagagaagaagagggaaaagaacctttgccagcttacacatgccaggtacatatcgagggattcatcccgaaaaagatggagtttgcggctcctggtcaacaggctagggatcgagcttggaaaagacaatacattggtgattatcttttcctttgctctacagaagtagatacagttgaggaaagcttttgtcgatcaaatctgaccttttctgttcatccgaatttatttgcacgccatagtgttacacgggacctgtctgagaatttataagcaggatcctaggcgatatctcatccgccccacttctccttcagacggagcggtaccggaaactattgatcaggtggacaatgccgcgcctcatgtccattttcctggggtcgctgccccagaggttagaccaccgctcagagtggtgaatccagcggcatccaattcatctgtgacgtccgggccgactgcagcaaacgcttcactccaaatacgtcgggcaagcgagacgtccagtaatggagaaagtaccagctctagtagacgaggaagtatcgtgggtggctccactcgtcgtcgatcggtagacgctaattcaaatttcagctcgtttgggtcttcatccggagcaacaggaagtaactcgagtatcaatcgaacagctgccaacatgcttcgacgaggctcgattcccagtagtgcttccccgtataacacttcctctgtgtcatcttcaattggccattcgaatctaaactcgaatgtgaatctgggccaagctatcggatcgggtaatcaactttcgttccctgagaccatcaaaacaagaatcgcggattcggacgatccgggaatcattagaattccaaaatcgactggatcgacgggttcagtttcgcagacaggatcgaatcctattcacttgcctttccatggaaacaatcagtgagtttctatgtaaatcccatgtatgcatgagagataaacagcactgatacgtacagcgacttctttctcccaaaaatttcttgtgtatcaaccgatacagattgatcaaatcgtatactttacagaacgcagaatccggtttggccgctgactatctcaagaagaagaacgtcatcagggttagagttcaaggggagcaatttttgcttcagatggacagccctaaggacgtggtcaactggatcgaagcgttccaagccggaacgaatgtatcattggatctcgatgatcgaccgatgcccaagatcatcacgcttcctcgacggagaagaagaagaagatatcctggtgagaccgatcctgtcaacccggatgctgtgcaggatggcgtggaggatactccagaggcgaacgttcgagcggcggcagcgtcggatccgtcggtcatgggtgtcaacgattcgatggagcgtatgctgggagaggatcatggtcgggaggcgtcagacgtcgtctagacgttttgataactgtctttattctatttcttctttactttatcccctccccttttttatatattgtcgttcatcaattcctcttattttctccttcttctttaactctgaccatagtaatcactgtggctttggtgctgtcttacctttaccttttcctttcttccagactatataaaatgatacagtacttctgcttccgttttgttctgggtttttcttataattagctccatacgctgtagtgattactcttctcttcaaatttctttaccactgtagctctggtgtatcgtttctacattcttctttcgttatgtttatgtacatgcccttcgcttgccttgtttcagatttctctgtcatgccaaaacgtttcgttggattaatcatttatcatcatcttctcttcttcccgttacccgatccatcgatttccatcctgtcgccactggcgctcccattcacaggagtgaccccaggtttgagaacaccaccgacgataccttcccacatcttgtcattcaatgatttggccttgatcagatcttgcttgagcttgacaatttcccgttcaaggatcgggatttgcgcgttcggttcagcaacgtcctgccctcgtccttcagtgacaaccgtagaaggagaagaatggtcggccggtaggccgaaaggtgatgaaaacaaggagagcggtgatgatgtcgatgaagggctttcggacaggattgctgacaaaaaatcgactgtctcaggcacaggagaaacgacgacgtgtcgttctctttcctttctgcccactctcattcgttctaacacgccgacggatcgaatcggccatttctcatcggaccctccgctggaggcaccagaggttgagcccattcctgtcgtttctagagagacactgccgtgcagatcaacgggcttgaggaatgtagagacatgggtgatcggacatcctttgtgggataagggggagatcgttcggataggttgaagtgtggggagggagtggatatgaatctgaccggttgtggtgccgagtagtagataagagagcgagagagagagcgaaagggtcgtaatggtgtcgctaagaaggggaagtgaaaatgacaggaagcgggaagtggtcaaaaaaagagagtttgaaaggatacaaagatactgtaaacgaacctgatagcaagttgaccttcatcacctctttctactctgacaacctctccacgaacaccgttccctcctcttgctctcaacacgccctttcctttctttccagtactcaaaccatcctcatctgtaccatcatcagccaattctccttcacgcttctcgtacattcgaacagtgaaaacttctttgccagcagacgcgtagaatgctcgttcgagcgggtccagagcgagcgcggagataggtgatgggagatgataagtcgagagaagtgttggtggactagtgagctgccaaacctatagagcgaacagttataaattaaatacattgagattgaaatttttagaggaaatactgggtgtgagattgttggttgataattaggatgatagaagtaaaagatgaagagtgtgcacacgaaccttaacagtgtgatcgagcgagctcgtccaaactctgctttctcctgggaacccgccaagcccaatctggatatccgtcacgggcaatgtatgatccgccaagttggcgaatgccgttggaatctctctctgtaagtcgtttgatacgagcgccgctacactccagaccgatactctcgagtcatccgatccggacagaagcccatgaccatccggagtgaatttgaggatagaaactcgtctataatgagcgtcgaacgagttgaacaagagtccagaagagagcttgaagaattaaaagaaagatggtcagcatcttgcgcttacgatatggtgagaaacagcattcaagttaagagacaaacctcccaaaggtagatatggccagtgccagttccaccagcacaatatgttcctgtgggcgaaacggcgaaacacgaaagcttttctggcagaggaatcttctggtgtagttggtcctgtttgacatgatcaacgagaaagcgaaatgagctgatggttttgacgagtttgaagtacgaaaattgaatttaccttctgccaggcccaaacacccatcataggctttccctcttggacggtgatacacacacctccctgacctctagctgagggaataacggcggtcgaatgaagagcaggaaaggaaggtttgagggtagaaagcagctgggaggtggtaaagtcatgaagggtagttgaacctgtagaggtagctgaagatgacgacgacgaaagtacagtctctatcggagaggccatgatgatagtgaggcttctgggccagctggtctagaaaagcggatgtaggttgaccaaaggacagtatgtcggtcggctggatgaatgaatagttgggtgttaagcgttgaaagtgaaattattatttatattttatttatattttattccccgccacaatgctgtgctcacacaatgccgctcataacttacccaggctgctcttcctttccttcactctcaccgtgtatcttgtcctgaagattgtcagacaaacacgcataagccaccgaaggacatacggcatacgcttactctgaacacagatggaatctctgcagaggacattcctagagtggcaagaagatcaggttgcaagctgggtcgaatctatcgggtttcctaaccatacagatagtattcatcgtgagtgctccattgtctttgttgtttgagttgactgatctcttttcggctcgaacttactttcttctgttttgtcacgactttgtaacataaaaacattagagcatggcataacaggtgatgtcttgagcgtaatttcctcagaagatctcagagatgtaggaatcactagcttgggccaacggctcagcatcctcaagcatgtctatcagctcaagctcgagcagggaatcccgctggagaaggacagctggatccctagcacatgttcgtctcttgagatctcatcgtacttcctccgagacttatttcatacctaattgaaggctgcttggtttattttccaaacccgttgcgatcttagtggacggagaggaaggagttgaggcctcatttttgaatttgtacagtgaagccggatcctcacccaaccttggctcagctgcagacgcgctcgacatcgagaagctctacaggattgttaatgagcagagtacgacttcctttgtagtttcctgattttcctttgccttacgatgctcacctttcgtttcgttcacatacatagatgaaagattgtactatctcgaacaggaacatcagcgacttcaaggaaccattctccaaagcctccctcttcagccgacggcgccaactcctacctcatccggacctccacctgcaccttcgtcttacacgaatttaccaatatctcattcctcttcagcccatcaggactttatggtcaaacgtcagccatctttcaaatgggctacttttggaaaacgaagtccgactatcatgagcacacccgcgttctttgatccaaccacttcagcctcaagacaagccagtatgaattttggaggatcaaacgctgtggaacattggagtgagaggtcgggaagtccagggatagagcttggagtacgtcttagtctttctcacctctactcttctgctctcttctttctgtcacgcgtatgcattgaaaacttaaaagacataagacgcgctgacatgtcatttctctgcatactcttgttacgtgaatccttacaaaaggtcactcctcccagaacggcccctctggcgagacatcaacccccactgacgcatacaatctctgtccaggcttatccgcaagcaacatcgccttctatacccacgcatccttccataccccacttttctacttcctcctctgctacttctccgacagatcaatctagacaggctcctggtctcaacacaagttcgtccaaaaagacggatttggacatcaaagagtctgaggaaggccggagagacgagaaggagagggctaggaagtcgtcgagatcaacctcttcagctgtcctcggcacagctgaaaacccccagcgattcaaagtaacactcgaagatccatgttggaaagttcttccagccgccctcaagaaatacaaaattaacgatgactggcggatgtacgcattgttcatctgttacggaaatactagtggtcggttaccagattcgtacttgattttcatcttacaaaaagtgcatcgacaagtgaatctgatctcggctctttctccttttcgcgtacgctgttctcgatgccgcgttttaggaactggaactggtaccgagcggtgcttatcgtacgatgagaaaccactgttacttttccagaaactcaaggaggctagtcagagtccagtgtttatgcttcgtcatatagtacgcctatacattttttgtgtgtttcataattttcagatcataacctgacgcgtgtacgttcatcacagcgcgacattaaatcccctatagctatcgctcaatccaaagtacaatctagacaaatcacgactgctagtgctgataacagtacatctagctccgagaatctctcttcacaaggcaacacgtccgctccacaagccagctcatcatcaaactcacacccctctgcatcagtttatgcgaagactaatcggccggccgaaggaacaaatagggatgctggcccatcttcctccagcaacaaaactggaattacagatggagtggatggggtaacatatgcaatcagtatttacccatatgcagcggaaagagaggatgaattcagtgtcaacgtgtgagaccttatcttctctgctatctgcagtagtcctctctatctttaagattcacagacagctgatctgtacatcgtgtgggttatatctccctagcgacgacacatttatcgttcttgccaaagcgaaaggctggtgggttgttcagtgcgaccctcaaagcgctggccgggttcctgtcgatgtgtctaaagcaggctgggtacctgccggctgtttacttgaatgctctcggcctcctgggttgtctttcccatccctctcaccatccttgccttcctctccatcctttttatctcctccatcagacgtcacgccacctggttcatctttcaccacacccacgccttcttcccctgccatctcgtcttctccgacttcggccttcggaacagcgcaaaccgatcgatcgaatcatcagcaacaacaacagcgactccaactggattcgattctatcgacaagtttcccaggcgtggttctgatggactatgcgagcggtaggcctgaagagatgtcactgaagaaggacgagaccgtttggatgtttaagcgatactctcattggagttatgccgtcaaaaacggaactggcgaacgaggatgggttcgttcggattttctttgtacatctatctgccgtcaaaataagctgtcctgaaatatctcatcgtctctcgttctacaggttccctcgtggttcatcagttctcaacatacaacctctactacaccaacgactacatctgctccttcctcaactttaagcacggggctaaccacctatcaatcgactccatcctctggtacatctacaccttcaactccactgacatcttcaggtccgacgtccactttatcgttgtctggtcatataccgccgacgatgtcggtaggtagcgcaatgtcgacaccaacgatggaaattgtccccggaggtggatcagagattttggtttgaaacacatgtggacaagctctctttcctgacctattgaatcttttgtttgtttctcctcgttctccgttctctcttctctcttctctttccttgttcatgatatgttgtagagtaatcttttctcggttgcgaaatattgttcataccttcacattcctttgtccgctgttcttttcctttccacccatcacatttgttctctcggccctaatccctcctctctcaccctcatttttgtacaaggtgatttcatctcatttaaacaggcatttctttgaatgactgaattcttattcaaggtgttctaatctgaatccagggctgatcagtaggttcataaattggagatatcagacgtcacattagccacagcagatgataacaccgagagcattgttgctgctgctgctgctgttgttgttgttgttattgtggtcgttgcggctgtcgtggatgctaatgctacgcttgataaagacgccgtagatgaagctgctgaggatacgactaagggcctcaaaacacgaacgtttcctcctgccatggctgccgcttcgaatgccacaactattgtcattttttgtatttttatttttatttttttgtgaaacagagggaaaaatgtttgtgttgttatcagcatctttgctactctctttttaaaactccaggacaacaaggtgagaaaaagcaggacacttacataacaagagctgaccgacaagatcgattaccgatgacaagatagggagcgtgtgtgagctttttattttcaattttccataacaatcaatccggcaaacaaagacagaaagaagtatcgctcagttagaagtgtgttgtgtttcgaagatatgagaagagaagaagtgaaaagatgagggaaagaaaaaacgacatactccgggtctagttctctagaccagaaacataatgtaaacctatcggctaggtacaacgagatcgctatctaaatttcccatcgttcaagatatcagagtttcctcatcagctcgaatttctcgcgtaaagaaaaggcagaaggaatgatacacataccgtcaactcggccacgataaagaatgaaacgatcagctgccactcaaccctcatccaaccggctatcgcgaccgccagaatgaacatcgccaagactgggaccgagaccgcaagcaaagcaagcgctatcgttctcggtgaaaccgatccgatggttggttcatccggcgttgattttgataaaggttctgagaaatgtaggactgtcgaaagtcgagatgcgtggatggagcctactgcgccagataaacctgtttgtcacaaaggtaagggcacgaatccaaggggatagagagagggtgatgagattcatgatgtgaacatgcaaattcttcttcttcctgaggctatgaggagggggtctgtgtgcttacctgtcatggcaacagcaaggatagcaaacccctcgtaccgatcgacgcagcgatccaacactacacccgttgcactactgatcgtcactgcgaccaataacggtgtccacccggtgttgattgaatccgaaacatattcatttctcaacgtgatccatgtgaagccgacgccggcaaggaggatgataggtagaatcatcaacggcagtggggtcgagatgtagggaacgatgaaggagccgatgacagcgagaataaagagtgtgacaaggtcggacagacaggacgcgatgggtgtacaaatgttatctatacgcatcaaggagaaaagggcgcaaatgatgagtagggcgcagacaaaggcaggcacacagacatgaatcttacccggattgattctcagcctcctactgagcaacaccaaaccactcatgaatccacccagagtggctccactcagacaggccgcaccgattccggtgaccaagaccatgatcaactctttggcgcctggaggcgtgtaaccctccttaaaggaatcgatgtatcctaaatctggatcgtctctctcacccaaccagagaccggcagcgaccgctaagttcctaggctcttccaatgcaatcattgaacggtttgtcatcatagactgattgaaggacatgccaacgatgtcggcggacactcgatgaggcatcgccagaccaagaagaaacgagacgagtccggcgagagaggcaatggcgatagcttggacttggagcagcgaaagttggccaaggatgagagatcgacggaccaatcgaatatcgagttcgccaatgttggcactagtactgagtctcgctcctaggcacatctctaagttaccttttagattggcgagctatccgagcatggacgaagcgatcaacggacggtccgggatataaagcttgcttggagggtagaagtacacaccataggcaccaagataaacaattcatcaactctctcaaagactttccaccgggacagatgttctaagagggcgccggtaaagaccagaccctgaggacataaaccaacacagttctcagcacgacgtattcatggaaagctgttgtggagacattaggtccaaaggaaagaggtgaatacttacaagcagggtaagaaggagagtaggtccaacctagaaccaagtataaggaccggatcgcatgacatgataagcgagggaacacaattttgataccgagcttgcacagtactctttggtgaaatagaaacaggagaagaaggggataagaacaaaaacgaaaagacagacctcatagacgagttccttgatctctctccatccagctcggctcggcttttcaaaaccaaacagagctgtcgtctgccctctgatgatcttgtctcctctcgcccatctgcctctgatgctctccttaggttctctcctttctgccctcgaccgactttgtccgtcaggaccaaatacagacatttcgtaaagtaagccttggccttcatctccgtgccttccgtcctcggtatcgtcgtcctcatcatcctcgtcttcatcatctttctttccgtcgacatcaccatcttcagtcccgatatcattatacaatctgtgagaggccgaatgtcgacgtgaaactcttgactttttcgagagcggtcgttctgaagctgatagcctttctggcggaaatgaggtaggtatgaggtgaggatctttcgagtatgtaggtagcagtgacgatatactttctatcgatcgttcatcgattgattcctggggtgaaacagaagtcgatagagaggagagcggagatgtggttgaggaagaggaagaagtcgaaaggttggtcgtgccgggtttatgattggatgcggaatatgaagaaggttgaaatgggggtggtcgatctttctcaccatggaacgtgatgatgggagacatctcgactaggtgatatcgaccgggaccgactttgaatatctgatgaccggaagagtgaaggtaagagtgttgttaggtgttgaatgtgagagagaaaacgagagaatgcgaggatcccggacgcggggcagaccggtatgatttcaagatcttgattgactgcagaataatgtcaaaatatggtgtgcattacgcggtaaaagagacactcgcttcggctcttttcggtccaacggatggaaagatatcgatcatatgattacacaagcccctaagaggagaagattacgctgaggttcgttatagattcgtaaagaagaacaagacggatgaagcaaaatcaaatgaacagaggaggagaatagtaaagcaagcagatcaagaacgataagaatgtaaacagacagcaaaacgatgaacaaaaagagcaggagcaggagcagcaacgaacaacgattaaagagaaacaaggcaaaatcaaaagacacctgaattgaagtaagaacgaagataagagaagagagggacgagggcgaagatacaggcttgctcattcaaggcaccgctcgaatgtgactccttctactgaggcccaatgagaagcaagtcgcatgtccgacaagtcttctcctctggtggaggaggatagatttaaaaagttcttgactgagagcgtcgaatgcttgtagacgaccttgccatcatggttgatgtcccacatgtgggtgaacggaatatctctatagcctgtcttgagtgctcctcgaggcggcagatgagggacgggatcagtcggtgaagagacgaggtgtatcctgttggaaaacgtagcgagttggtccatgacgtgttcgacgaacggttggtttccgacccgaggcgagccgaacatagttacttcgataggaatcgacaagtcttcgagcgacatctggatgtgaagagcgtgaaggagtgcgatcgagccaccaaagccatgaccgacaagctcgatctttttgatatgcttcgagttggccagctcgtttctgacctcgttcattaactcctccgcagactcttcaaagatctctttggccaaggggtctactctgatatctttggggagatcttcgaagaattctgtcgattgtaatgagacaggctcagtcgattcggaggagacgaccttgtcgagaaacaggtccatatatgacggttcgatataggtaagatatccatgtttttcatccgacaggaacaaggtaggttcgacctggcaatgatttatcgatctgagaaataggcaaggggggaacaagggaacaacaggtaagtatcaggacatacgagaccaagagaaagagagtacggacgtgatctttgcgagtctggcaaagtctggtaaaccgagacctagggttgggatgacagggtatgcgaaagcggttgttgagagcaagagcgagggtattaagtaagagtacatttttcttcctggtcggagagagtgattgcgttctggccaaacagattaatagttgtatatgatatgtttcttgtgggcaaggatgggaagaagaagaagaagcgaacaaaaggtagaaagcgtgataattctcgagtctcttttatacaaagagaaaacttcgttctttgttccgttcgttcaatgaccggatgttcagaaccagaagacggtcatttaggcgtttcggaagagaatccagatattaaagctgaaccggatcagcaagggaagcctaccggggaaagacattcccgacaccgacgggcagttcaagtgaatacggcacatggaagagaggtgatcgacagcgcgcagtttactcttcaagcggtgatgataccaggcgcagcaatgatccccttcatcgagggtttgaggctctttttgtgccctgatccacagaggcaaagtccggccctggcaacagatccaagacattctcctcctatgatgcatgcgttcctcgcgggtccgttacgagtgttttgaatttacggtccgtatgtctttctcagtatgacgcgtgtgtagaggtttgtgtttgcacatctgatcaagtcgtgaatttccatgacttcctgtcttgcatcgatctacctctttagagaatatgtcttaaccttctgttggaactatttatgcgtgtagacaaggatcgctcaaaggggaaagtcgtgtttgaagaatatatgagaggcagagaacaaagaggagaccaatagagaaaggaaaaatagttcgtagacgaataagtatataatagaaaaataagtatataatagacaaaagaaaatgcaaggttcaagtctgtttcgtgaaacagcttgtctatataatcactgagttgccaagggccttccttgtcatactgtggtagttgtggtagtcgactccgcgtgatggaattctgatagtagcgttgcagcttgctcggtaaccgaggtgaacgctccattaccctaaacatttccaaataaggaaagcaaacaaattgggttaactacaattagcccaagaaattaaatgcaccctcgacttctctttctaccctaacaaaattccccgaacttacccgcagctcgtccaccatatcctccaatcccgtctgagttgcgttcgacgcatcctccctcagagtagcgaccatctctgaagcagatatcaacgactttgacgtcaaactctctgcctggcctgtttttgcagaaaagagaaattcaacgcattcagcgctctcttcttactatcgtgttttgtttttcagataaaaataagtaaaactcttaccaagtagcggactcggcacccgaagctctgctttgcccacagaccctagctctacagcggccgtgcgtaacggagcgacagaggttgtcatcgttgatctcatactcgacattgtcgtcgttctggtagtccgaccgtggtagaaagaaaattgacaagcgggtacgttcaccagatgagcttatcagtggcgagtaagatatatagataactaggacccacgagccggtaacagtaagttcctctttgaccaccgaggtgaccatcgaggcagcggattgcatcaatttggtagacgttttgaaaaaatctttcgaggggtgttgtatctgtgtgttgtgcgttgtatactatgtgctgtctgctgtgtgtaaaagcaagcgaggtcaaaaagagtgtgggcaacgatgataatcaaacaacctacccggcgctccaactcgaatcgaccaaggaattctcgaacgagctaatgacgtcatagaatcacccgcgttatcacccagacacgtctctgcttctctccagacgcgtttgattagaaaattctgtagtcatctatcaatatttctctaatactttacacgcgttttcggtatcctcgtttctctgccctttctgttcccatccctcgattgagtttcgcctgctctcctatattcctcactttcaacagcagaactctttctttagatccagaagacttttgagacaaatgtctgacgatagagagggacgacatgagctgtcctactcggattctgattcagatcaagacctcgagatggaagccgtcgagctcgctcctccctccgccactacagcccaggaggctcgtcaggctgataaagaacttcatccagcgctcttactccttcagcaacaggaagccgaagaagaacaggccaaagagctagatgtattggatggagagatcgctttggacgatgctcagtctggtgagacccgtccggatggaaagaaggagattcctgccgcggaggggagagtggtctttaaggatgggaaaggagggtatactggtgcgatcgagattaagctggacaggcatgagaactggaaagggaaaggaatagacaaaggaaggaagaggtacatacatactttcatcttgctccaatacagaagaagaagaagataaagcagagctgatcagagaagggctgaactttttttcccgatcagagcggttcatcatacccccgaacaaagagccaccaggatgaacgctcacaagacccatctgatcgctttgttagccaattccagtcaccgcaacagattcatgaacggcgaccttctcaaggtaagtttcctctggtgtctctcgttgtctatttgcatgttctattcccaaattcctgactactatgtctggctctcatactcgcgtgttccatatatcaaattcaggctcgactcctctcgctccttccacgaaagattgtttctaactttacgaagatcaccactcaactccaacctaatcgtgccaagcgaggtcgcctgtttgagcgtacgatgaccgagctagttgattggtgggtcgacgaatgggaggtcgattggcaagctgggataagatatcggccgttcgcagaagcagaaacaatgggcgccatcctaagagctgaacgagaagcattggaggctgagcagtcggccgaagagtcaagcggtaaagggaagaaatcagtggataagaagaaaaagaagaagaagaagaaaaaagacgagctcggtcggtcggttggtggagaaattattcgatcgagtaagagtcttcaaaagaaggcattgttgatggccggaagcagagacgtaagcgctcagctgtttgttggtatgtgtcgagcgttagggatcggtacaaggttggtcgcttccttacaacccgttccgtggaggatgggtcaagcaggagaaaatgcaggaggaagctcaagaaggaaaagcgctggaagtaccgatccgtccgaggtggatgatgatggagaaaacgatgatgatgaagacgacatggaacaaatccccctatcggattcttcttcatccgttcgaggtatcaagtcttctatgctggcgccgaaagaaggatttgttcgttgggcagaccgggcaccagatcagcgattcccaggtttgactaacaaactcggtgtgaccggtcagggaaatgtcctgggtgggcgtatcggatcgactgtgaaacctaatgcgttgaggatactcgacaagaagaagagaggtccttcacgaaaattgaaggacagggttcaggatcctaatggttggctattttccctccgtttatctaagagcttgtcacgttgattgacccctgtattgtattcatttgtgcccttcttactactttttctctttggctagccccgtttactctattgtctcctccgatcttttgggccgaggtttactctcgaccagatcaagaatggattccggtcgacccggtccgtggctttttgagaaaggcaaaggaatatgaaccgttgcctggaactggtgaaggatcgaggaacaaaatgctttacgttgttggatttgaagaaggtttgttttcatatagcctcctcaccatctacaaaatatttcttccacagagctcactttacaaatcgctggccttgtgcgctctagatggaagtgtcaaagaccttacagcaaagtactcttcgaccttatcggacaaaactctcaaacaacgggttcctgtggttcggatcggaaagactacagaagattggtggggggatctgatggagcgtctaggaagaggttataaactcgtatgtatccttgagcgcatcagatgttgaagagggaaagaattgctctacaaaactttctgggcgttgtcttttgatatatttcagcaacgtgatgtagtcgaggatgcgaaactcgaatataatataaagaaaaagataggaggaatgcctgctaccttgtcggcatttcataatcatccagagtgagttgtcttcgtcctttgttgctttctcgatgagcatcactcatcaaccttaagtgcttcatcacgtcacggctctaccctctagctatgtcctcgaacgtcatctcaaacgagaggaagtcgtctttccgaaaattcaacattccttgttccgaggtgaacccgtgtataagcgttcaaacgtcctccaatgcaagacggtcgaaaactggatgcgtttcggtcgagcggtcaaagagaatgagatacctatgaagtgggttaagacaagagctgtcaccatcactaggcgaagagaggccgaggctttcaaagaagagagcggagaggagatgaggcaaccgctatatgcagagtcacaaacggcaatctggacggcagatcctatcgttaatgtaagtttgttttctggttgattgttcgtcttcagtccttgtctgatagctctatccgacattgatattcctctcatttgtgcttatttgaactcgacacgaatcagggaaagatccctagaaacggattcggaaacattgacttgttcgcaccaacaatgttaccccctggagccgttcatcttccctgcaagtctttgtttcgatcaacctcgtcttctctgcttgtctctgtctctctttactcatattttcacaattacatgttctgtcattttatagttaaaggaatagctaaagtcgccaaagatctggatatcagttttgcagaagcatgtgtatgtcccagaatcctctggagtttctctcatcttaaccgatacatctttctagctgtatctagaccagtcgcctaactttataaacactcgcttttgttctctttatagaccggattcgagttcaagaatcgaaaagccattccaaaattggaaggagtagtcgtagccgttgagaacgaagaggctctacttgacgtgagttgatacccttctcatacagatgttgaaaatgatacatatacctatctcaccgcctcctctcttggcatatctccgttatcctgggaacaggcctattggatcgcagcagctgaagctgaaaggaaggaacaggaacgacagaaagcccgggcattgaagagatgggaaaggttgatctctggaatgcgaatccgacagagactccaacaagagtatggtagcaaagctgtgagtggttcttccctatattcgttccgcctctaaagaaagaactgtatgtcgagatcctgagcgccaatccatttcatccattgttagcctgagatatccctcgatggctctccgaaggatgcgcccaaaaaaccaaagatcaagccatacaaagcaaaaccagctgatcctccaaaaccaattgccatcgactttgccgatcaatctcctaattcaatcgctcccgcaatcgctccatcagacacacctgtgcgccgttccccttcgaccgagaaagatgatggctccgttccagaattcgccagcgattccgatacggatttgtccgatcaagaaaataccattgatggaccatcggtcgtgtttgagaacccgagtagtaggaaattacagcctaagtcattgaacgacttgctaggggctacaagatcattcaatcgggaagaagaagactcggatgcttcaggaggagatgatgaggaacatcctggagtaaaggctaggcaaatagtcaagcctgatccctcgcctgagcccacgaaggaagttcctcgaccaagacgaatagttcttcgaacatcttcctcttcgtctgctgttccctcacctagcagtacatctaccacttctattcgtcccaaaccaaaacttcggacaagctcgcgtggcaagccagcaggaaccatgtccagatctgcaggaaacgtagactccactctgaaacggacaaagctagagctcgattcgagttcagaagacgacgataatgaatatgccggcggggtgaacgcggctgaaatcgtaaaggtgccgaaggttaggagagggaccagattgaatacatcgaacgggtcccactctgcctctgaccctgcccttgtctctgtccctgagtccgctcctacttctgatgcggctggaggtagagtgttacgttcccggggaaagaagactgcagagatgttggcgctagaaaaggagagggaaagattggaaagggaggctatggagtattaagttcacacacctacatcctgagcgtgtctatctcctttgtctccctgttcatccatcttcgcagaaaaagatgtcaaatctgtattatacactgtgtttttattgaccttatatgtgtcgtcaactatcggctcatttcactcgttgagttttatatcaaatactcgacctgtcttatggacgtattctcgatcatcttataatctcggttctcatttaatgatattatacttgaagaaagatgaattacaacaaagaggccaagcctagcctcaagaaatatgaaggaagagtcaagacagaatgtactacccaaactcgaacctcagtttgattttttttaccatctctccatacccgcgacctctcaatcccttccgcctattctctccctatcctgtattaaatccgtcctggacatgtcatgtcaagaatttcaaagacgaatcctgcatgaaatgactgtttcctctctgtggaacaggttttaagttaatttgggaagagcgaaggagagggtggtttagaggcacaagtagagaaacgaaaaagaaaaagtagagacatgtatgaggagatcctgagaggcgcaggacgagagaggtatgaaggattggattggattggattggatggatgaatacggtcacaagccagtgttagtgacatcaaagaaaaggagggaggaagttcatgccggccgcttgaaaagtttatgatccgggtatcataattgacctttgatgtccactttgacatacttctgaacgatatctgtcatacccgctgccgccgctttactatcccaaattttgtctctatccgatcttggtcctttgggtgctgttgctggcggtgggacgaacctgtcgatctgatgggatcggaggaatgatatggtttcggttggatcttcaaaagcgagttcttcagtaataaaagagatcgggaggcttggatacctatcgccaatacaatcaagaattgaacagacaaagatcaccgtcaacagaggtaatgaacggttggcagaccaaatagggggaagaagaacagaacgaacgcttttgacatagtagctagagccgtgattcgctctctgtccaagaaatgatccatcatgtaggcgcccatattgggtgcctcgttgaacaatttaaagaacgagtggtaattggacgtagccagtgctttttgtactttgagtgcgtgtttcacacatggcggtgatctctgtatcggtgtcaatcgggccaagagaatgttggtttcttatggttcgagaagattgttgatacagatcagatcggggtagaaagagagcaaaggggtgagagacgtttggaacgaaccactcttgtttcgagtatagagtaggtaaagtatccgataagccaaaaactcttctgggtgtcctggaatgttatgttcataaagctgcctcagagcggattgacactgattcaactcgcctagatccttctgtgaaatagaatgacaagcggacaccgtttgtaagaacttgctttaaatccggtacggacaaagaaacttgagagagcgggacgaaccgattcaagtgctatccttgcatgaatttcgtaaacctgcacggtaaagtaattcttgatacgttggacctaccgagtcagaaacagcaagccaagatcgcgtatcgctcttcagtcaaaagttgcttggaatcaaaggtcaaagaataagggaaagattggacaagtgaaccccgaagtgagatacgcacagtcaaatcctgtctcatgctcttaaactgatcacaaatataagggtaattcagttcttcgcgccattttctcttcagtaggtctaatgtctggattaatatcggtagtggtcgaattgttgaaggatccggttccttttgaatatatcaagatatatttcttttaagtaagcggtagctcggctatgtctgagagattgtcgtgtaggtcacataccgatgtcaatcgaagatacttcttctcgagcttagtgcacgttccgacaatcgtttgcctgtcccaatcgattacgttctatgattccaggaggcacggatgcgcaaagatatatcagatagagtcagttgctccatttcgtttccagtttagcagtgaattccatctttgctt

SEQ ID NO: 727 - DNA, 25249 bp, Xanthophyllomyces dendrorhous
tgaattccatctttgcttcccccccccccttatccatctcttgaaacagaagaaatgagactctacgaacagggtcaaacttggcttcttcttcgccacccccaaagaatctctttcctcctttctttccgaactttccgccaagaaccgaatttcctccgttcgtcgtcccgttcaggacgcccatctcttgatcggttgaccgaccaagctcgatatctctttctcgggcgaatcgtttcttacgcttctcgttcgcttcttcttcagctctgatattgacaatttcgaagaataaacagatgaggaagaagtaagcaaaacactgagaatcagtgagaaactgagagtagaaacgactgctgacttggtattggccatgacaaacagattgcttgtttttttcttcgattccttttccggcctatgatcgcaagaccaagtagataaaacaagctcatgagtcaaccaagatcccttgatcccaacttgagcgacgtcatctctttcttctcccttgtaggacggcaacaaagatcgacgagctcactttttacgtttgttgttagtctgaggagatgcagaaggcgaagctgcagctgctattaacgttgggtttgcttgagaaacaataggttgggcaggtttcctagttgtaccactgagttggtcgcgaagtctctgttgttgaatactagtgccataaaatccccgaatcgagccatatccaatcgaggattcccccggaatcgaaaacaccaagttagtctttcagcgtagaagtagaaacactgctagatggtgagctagagaagaggatctggaccgaacctatctaggactagattactccagtcagtagtgtcaatcgtcttgtttctgtacgcatcaaagattacctgatatcattcgattccgatatccaaacaagtcaagtcagcttattgagtcattcaacacctggccacctcccgcttcactctagaacgatgcgaaacccggtgtatctctctgctagccaaaccctcgacctagttattcagtcagtcggatacacatactcactttcttgagctccgcctggactttatctttattctctggggctgcctctaagagagactgttttacccagttcctacgttagatagacagaatgcaagcagtcaacggtcaatcagagaagcaatgatgagaaggaagaaggaaggaggtagacgcgatgagtactgattcaacccttccaaagacccttttggctagacgaatgaccagcttcctcgaaaggaaaaaaaaaaatagaagcctttctagaagtactcacttgagtggtgctggccatcctccgttgttcatgacttagttatgaatgtataaacgtataggtcggttctcgctgtagtctggttattgcttatgatcgtgctggtgagtgtgtatgccgactaggtggctttacccaactctcctcgcctttaacacgtgatttcgcggcgtttatctgttcttcaaccagcttctcacactctttcccatattgcgatcttcttgagaggactcaagatttgaacaactgtgtacaaaatccaggctgacccagcatctgaaacaatagaacagggaaagagaccatcgacatctgtttttagaaagttcaatttatatgatcaactccctgaatccatcttttcgtctcatctctctgtctcctttgccttcggtctcttccaggaaatcttgtgttttctgcttcttgttcttattcttctgtctatttggaagtatctcccctaagcgcagacctcccagtgaagaagctggtggcaccgagtattgaaaagattgcgaggaactgaaatacgatgatacatttgttaggaaatgaagtcttatgaggatttaaccctatgttccttttatcggatgatgcttcgaagagaaaaactgaccttgaaaagtttgatgtatccaatccagtaaactaaagtggtgctctccaaggcgagcagagtagtcaagaaggggtatgccacgctctgaggaaccaacttgaaggagaggctattgatctatatcatcaaccatgtttgtagctcaacgtcagttcacaaggtctttggatacctgcgatatgaagaccaaggacagaacaatctcttctagcgcaaactcaccaagccagccaatacgacccaaggggcccaaacagctccggtccctagaagagagatcaaggcgttcacgcccttttcatcctcccgaaacgtgtggtgaatcaacttttgcttgccaaagctagagaatagctcggcagagtaggtatcaacatgggctttctgcggtgttagcactgtagaaggcagggagagagtaagtagggggtaagactgagcgaagggtgaaagcagtaggcacgaagcacatcgcgtcagtttgattcataagatattgatcaagccggtggcacagcgaagaactcacgatagaagaagcggtcaaactgccgacattcaaggtgaccgtgaaagttccggtggtcgaaaggagttgagatggcggcgaggcggtatcctagagacaagtatggttacagacacttcaacacccatctacatggccaagagacaagctcagaaaacagaaccaagactaacgatctcgaatctcgtctttccttttgccctgacattcaaaggtaacacctcgtccttgcctgtctcaacactatctcaacccaatcatcgagagattcgcgaggcagtcagacccgacagacatacagttaggccagaatagtcagggaagaatttcaacctactcgacaaagctcagatgagcttgatgaggaataatcccgtctccgttttcatctgtcacctggaaggctagcttgaaggttgagagcggaggaaggaccagcggcgtagtcagactatgagggggttccaaactaattaatacatgaatcatgataaaatcaaagaaaggaaaacaggaaacaaccggatgagcatgcataatgatgagctgacaataagcagtattcggccatcatctcctactatcagaaacacaaggtaggggaggttgtgacgaacgtgtgggattgcaaggtgctaccctcagaggagatcaagctgatctggggattgttcaacttgagagcagagctcgaccgagcaacaaccgaagcggcgacggccagcaacgagacagacagaaaagtgcttgaccaacgcatagcaggagagacgaaaccaagaaaggacggtaggacgaaaaaccaacgggcgatggaaaggagagagattgaaaaagagacgagagctagagatgggacaagtgattgccagtaaccctaaccatgaatgttcgcatttgagcccttcagacaatcctcatcatagattctagagagcctcgactcagagatacattttatatgataaacatcctagaagaaacgaacatccagcaccaggtttccattggggtttcgctgtaaatttgattcgaacgagaaagaaggtggtcagatatggaagaaattagggagaaaaaaggcagaagaaaagcaagatcagcaatctttctggccagaatgtccttagtagatagcgaatcctaccttgacccaaagtaacctctgctcatctatacaaagtcccgagagtctgtcatcgtccaagcttgtctgttgcatctcgatatccgacgacctttccacatatggtagtgcatgtcctgaccagaccggctgagaccacaccgaacctgcctcacacaccgtcggcttggaaatcaacctgcctacgtccccatccgccctttcctccactacttggatatcagtcccgtcggtgaatatcgttttcgaagatgtgtgccctaaagcaccttgagattttagccgggcgacggagaatggggagaaatcaaggactcgggcagagatcccgacagagtgatcttcgtcttcttcgtgcgtcgtgttaaaatgtaggacggaatgaacgaagctgagatgatacacatacaaaacccaggaatcgggttgggctgaagacagaaagtaataccagaagcccgtcttgtcaatcttgaacgtcttagtctctccactgatagaacgacctgacgagacaacctcgacttacgaatacgatgaagcaacctcgctttagccgaccaatcctcccaagggtaatcaaccgggctcacagtctcatcatctacccaaccgtcatcgtcactcctcaattcgtccccaggagccaccgtctttagacttgcgctcccatccaaacgagtagagagattccgctcggcagctgcattctcgtgaattatgtgaagaggtggatgatgtcggagagctcgtaagatagttgattttagagtgaatagcgtatatctttcccctgtgttgtacagtaggtccaacctatacccaagaccaagaaacacaatcgtcaagtcagctaacccccgatacaacgagagaaaagaggatgacatacacaacaagtcgctcagctccatcggcctgaaacatgggcgtccgaccgggtccttcagaaaaaggagggacaacatctcccactgctggcgctgggtctagccggatggacattatttccggtggttgctccatttgaggaagttcaaatacggctagtcgtatcggctgtggcgcttctggattaggctcatttgccggtggttggtgagccgagttaaacgtctgcatgcaagtggaattgtcaatggatcagaaaaacgttgatctgaaagaaacgagagaatagagatagggagagatacacacgtagagttccatagaggcagcttcatcagacgtattgcacacagctgtcagaagaagatcaggcccgatgaaggctaccgattggatagaatcctcatttgaagttggtagactctgtatacacaagattggtcgtgatgagggaagccttcatcagcaaatcatccaaaaggcaccaagatatgcgagtggaagaacgacaaacttaccgagacaatcactcctgtcctccaattccaaatgaccgccccaccttgagctctatctctgaaccgagactgggcgtcaagcatgacgttcgagtccatcactgaaacaaacggactaacgcgaatgcgcgattctacgagagtgaacggccaatcgaccacatgttctttcgcttccggatgaggcgcgaaagaagttaggttgaagaaatgtaacctgtaggagagccttcgagggatcaacggccgaccattaaaggaaggcgtgtacacttgaataaggacgagaaggtcttgagaaggatccatggtgaaatccttgattgtccaacccggagaaaacattcgagaaaagacttctgtaggaccatcggttgaagggattttgtagaaccgaagagttctacaagggctctctaagccctttttaaatcatcgaaagaacaagtacctgtttgagcggtaacgttccatacgacaccatagagaacaccagagtcaatacagtagcccaggacgtacgatggcgaggacacctcctagatagtcgtaaagcgatccacgatctccattcagagcgacgacctcctgctttctagcaggcttgagtgacctccacctctggtttcgtcgtttcagtgctgccaacttgtcagctatagaagccacgatagcagtgccttccggatcatctgccgatgacgatgatgtgttcgaaattccgtccttcatgtgggtcacttgaagaaggaaagaatactgaatggctgtggattctttgaagagtgcatgtatggatttgcatgtatacgagatcgccaagagtgaggagagagggagagaagccagaatagtctctaggatctctaccgggagatcaaacagatttggcatggcctgatatagtcctgtgtatgtaaagaatgtatatcgacgggatagacgatgtgatcgtggggagaagttgtcgaacctgaatgtttattcgcctcggttatggtgtaacatgaaattatctttttccaaaggagattcttgactctaattggattttcaattatcagtcgacgattctgactctcatgtctggaaacaatctcttgcaaggattgcaatgttctagcaggaaagtataaaccatggctgcatatccaaagcgatcgcaagaggttttggtcaagacacaaagtgacaatcagggatgctcaatcttctcatttcccagtgatttcgaacaaactattttctatctgatcgtccaggtagggctctaaccttcttgccttgtcatctcaatgttatattcaacccttctgttatccattctgggtttcataccggttaacatatgtgggttttctcagggtgctactatcctttctccgcaacaggtctaggatgatcatgagtcatacaagggaaagcatgcgatagggtccaacaagccaacactcgaattgttcagaactgtacaacgccatcaacaggacacgtacgtaatgcacatagcggaaaagagtaagtaaacctcagctgatctaccaaccttgcctaataaagtaaagacagaaacgtactcggaggggagtgaagaaccatcggttctttccctgggtgtatcgctcctcaaggaccttcttgatgttcttcttggcatcctcccgctgggaaggctccttgaaggtctcaacggtgacggatcccttaagagcctcgaggtcaagagcgtatcgagtgggcataaggtgggtgtagttgtaagcctgattggaagaacacggaatggaataaggaaatattagcatgcgtgtcttttagggttgattatacaaactcttttacgcctagccagaacaattaaaatagagagaaacgtaccttgatgaagggcttgaccttggatcgtcgggagacccgcttggcacccatggacttgttgaccttcaaggggtatcgctcgataccggcaacgatagcgtgggggtaaggtcgctccttggttccatcatcgtactgcttgacgacgacgaccttcttaccggcctgtcgaccagagagaacgacggcaacctagtagtattgaataaggtcgggttcaaaagttgggcagacatagtggaacagagtgcaaatttcatgatgtagtagatgcgttggatttcgaggaaaatgagcgacatcgaaagcagttgcgttatgtgagttgtgagaaataggtgcatgagagtgtcaagatagaaaaaaggtagaaaacagtgagcgatccattcttcgtgcataatgacttttttaaggtcttcttagcaaacgtcgagataaaagagatgccactaacctttccgggcttgtaaactatagccatggatggaccaaagcaacccaaatcagcttcttctgttctttcctttcaatctattttctcaggttgtatgcgtggtcaagctcttcccgagtctcctcaacacgatccagcctgttcctggatgtcttcctaatccttttcttccggctactgttctgctcgacacgtccatttccagatccttctctcagacacaacttttccagccctaatcgtcaggaatcagatggaggataatcgataggtaggggaaacttttgcttttatcggagagaaaaaagggctttggaaggggtcgtttcgcgaaagagaaggggggacgtatatgatgctgttaaagatactgttctcacctgtaaagaaaggcaaaaaaggaacgaatcgttcacatcccagtcagatactccaccttgcccaacagcattaatacgagaaaaaaattcgagggctcacctttgaccatcttgagaattcgtatcaatcagtttccacaagagaaagaaaaaaattcccgacagcaaaagataaagaatagcgtaagcctttattctttttcgacccgaccgacgacgggcaggaaacgcgtatcatatcatcgcttcccatcctatgcaaagaaaccatgctgtatgaagaaacccaccttgaagacttagagacgacgaaaggttaggagctaggtctaccgtctgccaacagaactttcgttaacctggctgggtcgtcgatcggccgtggttacaggctaaaaagtcatatgacaatggaagcagaagtcaggacgcttattcgtaacctttcagggcttggttacgcgtcgcgtcgcgtctcctctctgtggtcgcttttgaacgtcttttactattccaggtttgggaagatgtgctgtatggttgaaccccggctatacaaatggatgcaaggtatccttggccgtattctatgtcgaactgtcctggtgacagcttcgaaattgtattcaagaaaactcaaggaagtcgtctctgtttgtttcgacaaggtacaaacagtctccatggatacattcaagtcttacctttaggtttcatctcaaagaagaaaagagaaagcacaagcgggagagattttataaaagaaagaaaaagacatcgagatcattcacacatacaccatcctcacagccgcctctgtgccactcttcccgcccaagcactttgaacggagaattgttcaagaaccaatttagagggcagaagctccagtaataatctgtttgtttgtttttggaggagaaaggggagaagaaaagaagagtgaaagatagacgtcagatccagcaatacttgccgtcaacgagtttgtcgagaacaaatcaaagatgaagatacttacatcgatactgtatgagaagagatggatcgacaaaagatgaccagatgctggtcagctacgaagcattgtgtcggatacgttgacaaactagggaaacattgaatacgtacagctcgttggtgataacggcctgtcgtcctctgttgtactgcatctgaagggaacccatcatatccttggcgttctagtagacccaaagaaagacccgcaagatgagacaaaacaaaacagttgtatgtcgttacaggagatacggggtgtgatgtgatgacaagcagaagcgttagaacagccgttggtcaaaagaagtatagataaaagtgtagtagggagaagagtcagtcgttaagttctattcacgctaatcaacctgcctcaacgacaggtgatgatgagagaaacgaaccttggaagcgttctccatagcggttcgtcgagcagaaatctcagcggcgtgtccctcaacgagagcagcgtagataccgttggcaagggcgaacttgacctggtcgtcagtgacctcctcttccatctcgtacttggtgaatccagctgatgggtcgtgtgttgtcgttatacagagaattcaggagcagatagggacgttgtgatacggagcatccaggatttaacccgatgatccacaataggtggtaaaagatatatgccaaataatcagatactcagactctttagcgcaggatactagacaaatatagactgacctccgtccttgagagccttctcagaaagaatcttgatggtttcagcctcgtaagcgatggcagagatgaacttgttgtagatgagatggatctatcgaagtggtatttacgagtaaggatacacaagcgcgtaagagacgagacggtcaattttgtacgtttatcttcatttcggcaaagaagagctatagcttgctttgtgggattgagaaaaaggatacgaacctcatcgaactcaatgccggcgttcaagatctcatcggcaacctgagaagcagtggcaaaggtggggatatcctttccaacagcagagaaggagagctcaagcttctcagggaaagctctggagagctgagccttgggtcggtcaccaagaacgacaatcttggcgtcagggttggcagcgacggccctcttggtggccttggtgatggacgagtggatacctccgcaaagaccagaatcagaagagatggcgacgagaagaacctttccaccctcagacttggcctcggcgttgttgaaaagctctgtcgagacccagtagatatgttcgtgagtcaagatgcaggaaggcatgaacaggctataagtaagctggctaagagacgaaccgttgttggcagctccatacttctgagcagttcccatagctcgagtagccttggcaagtcgagtggaggcgatgaccttcatggactgtgagatcgtgaagacagaacatacgcaaagggtagagaaaaggtcagagtcaggacggagagatggcgtaaagagcgatacgcgtggatatgtagtgaagatatctcaacaatccagcagagacagctcttcaatctgatctccattatatggcaccgcactcaacacccagtattttgaagccccttatcacgagctcgaaattatgaagattaagaaagcgattttgtcgaggatgccttcacagtaaaacgatcgacaaagagctaacaaccaatcacccctctccgacccttcttagcgccttcatttaccctcaatcacctcagactagggtgatgacagacacgagatgtcggctattcgcaaagcgatggtgttcaagaattttctttcgactgtgctcctaacgctttcctctccagcatgtgtagaacccttcgacatgaaaggagatccaagagggtttgctcacgttggtgatcttctcaatgttcttgacggacttcaatctaaacaggtaaaaatgagccgaaaacgaaaattaaagacgagaaacacacaattagtacatctgtctcctggatgagcatctcatctcaatccagaataggaaagagagagagaatgacgttaaacaaaaaaggaggaaggaaaaaaagagacgaaccgcatctcgatttctcgaagggtggccatgtttcggacctggacaggagccggtcgggcctgaacaaggttcttgacgaccggtcgaagggttcgggtagagaaagacatagctggacgtctattagagatcgaaagaggaatgaaggaggggatagatggaggtggagagaaagagaggagaaatgagaacagagtgaaaacgggaaacagagagagcggggtttcgtattttcaaataccttacatgaacttacttatgtatgctggtcgtctccactgatcgcccgtcatccattatatcccatcatcttgtatgtctactttgctcatcacccatcagtcccaggcatgtcctctagtccacctgtagtcggcgagttatgtccgactctgcctgtcgttcctcctacggaaacatcttcagagaccccgtccgaatctgctgccaatactgccatcactgctcccactaactcgactcctagaggaaagcctgcaacagtagaagacgcttccgactcagaggacgaaacaaaatttaattccaagcacgaggccagctcaaaatttccttcagtagagaagggtaaaggaaaggagaaggatgatgaagaaaccagtgctgtgaacaacgaagattggcaagccgtatggagtgctcctcaaaatggttagtctcgatatgtactctgaacgaggtctgtacaaggatatactcaatcgaaatttgatttatatgcaatagcgtactacttctacaacaccaaggtaacttcatctgtctcactcttttcttgaattcgccgagcagcgcaaggtctctacttttctttgaaagctcaacattcttctcaacacatttgtatggtgggccatttttgtaaataacagagttttgaaacaacctggataaatcctctggctccccctcctacctcggaacctccaaacggaggatcttctccgccctgggacccatcagctgagactcttcctggctcgggttccactcagcctcgatctgcccagccattcagttatggtagtgctcatcgccaacaatcccaatctggaatcgatccttccctcgctcatctcctccctggcggagggttcagcgcaaccgatccatctacctacacagcccaagcgagattcaacacacgtacaggtcggtatgaaactccggctgattcgagccgtgcaccagatcacctgtcggatcatagtaagatgaagagacagaacgacgcgttcttcgatacggaggcttgggaacgagaaaaggatgcggcatttgagagagaacaggctggcggaggaaagaggaaaaaacttacaaaatcggacgtggtgcgtcctctcctattcctttctttcgtgattacacgtttcgtcaacattacatcacctttctttatcggacctgatgatagctaatttcatcagtatattaactacaacgttcggcgatttcaacaggaacgattcaaagagaagaaagaagctaagaagaaacaaaagaacgcctggttacgaagctgaagtttctctcttagccatctcccttccagagaatgacctcacgtcccgcctcgacgtcagcgcgcgcgcgcatcttattttcctatgggacttcttccgatgggcacataatacctccatgtctatccgtttcgatctctccttcggttctgtatctcttcctctttggaagtagatatcataaatgtctgaaggcgtccttcatctacatcaatatacatgccttgcatagtgttgcaatcacttctatagatgaggacaggattacgtcttagttaactgtccttcgaggcgaaacagcaggatccggagaaacatggatatctagatgctaggtgcagacgatatagagcagaagagtgacaagccgaagaaggtgaaggaaaagaaagagaagaaacctgacgagtagagaatctctagtccataggaggaagccgatgcgtgatcggttggtcattgaaaaacggcgtggaaaaggtggtaatacagaggttaagcatgtatgttaggaaagacaaaggaggcgggatgcgattgtgaggatacttggacgagctaagatcgaagaatgcaagatatctattggtccaagaggaaatatcgatgattggaacaacgaaaggaggaagaacgaatatcgaataaactaaagaaaggctaggatagaagaagacagcgcagaacagagacatttctacttgacgacaaagcctgatgaagtgcgtgccttctccagtgacttcacgtacactttaaggctctgtagttccgatctggcctccgccaactgtctatcagatatcctcttcgccgcctctaacacataaacgtgttccacaatagtcttgttctctctcgaccggagaatctttgtctcggcgtaaagttgattgaactctgcattcaccttggcaagttgtcgttcggactggctcagtcggtcttggagagaaagtttctcagtcgaatgtcggagttgagcatcttcgagttggagacgaagttgttgctccttgtcggctcgtcgctggaactctgccatttgagcagcccagttggctttttcacgttcgatggagacgatcgcatcttcgtaatcctggttcttcttagttgctcgggagagttgtcgttccagtgtctagggcaagcatcgtgccgaatggtaaggcgttgagaatgagaacgcaggaattgagagaaagatgtagaaaattgacaaacctctttttctcgttgactgtctgccagagtggattctatcgtcccaactctagactgtagactggagaactctgccaccgccgtctttttcccgccctctgcttcttcagcctccttcaacgctctcgacaactgttccttctgagctttgaaagagtcttcgagctcggcatgcttcctcgttgtcagatctatatcccgcctggtagtctccaactccaaggtgagcttggcattcatctctgaagccaccctcgttccttgagcgagctcggtttctagcttggctacttcattccgaagcgatgatatttctaaatctttactctttgccgcctcggagtgtctagattcctcagaacccatcgtcgctcggagatcgtcaatctctcgttcaatcttgatcctagcctgggtctcacggagagcgatatctttctgatgagaggcatcctgtgatatactttgaagagaggcttgaagactgttgttggattctctgaacgattggcaggtagattccgtttttgataagtctgattggaattgagcaagttcggccgtctttgctttgagccggctttcgatagagcttgtgtgtgtcgcggcttgggcaagttgttctttcgcatgggtgatgtctcgctcgagatcagtgaccttgttctcttcggtcaatctatcgccaagataacgcaagggagattgggcagcgttaggaactagctctgaaaaggattgaataaagacaaaaaaacgcgcgcaaagaggaaggaatagatttaacgcaccttctcttgttctcctcttgaatctttgtcttcatctgagtctccaacgaatcatacctcgctttcgactttactaaatcctccagactcgcctttagattcctctcgatctctccgattttcgagtttgcttcatctctttccccttccaattcgtgaactctcgtcgaccgtcctcttacatcttctaaagctgaagcctctctttgcttcaaccgattcctctctgcttctagctcggtcatcgaggccaaaagcccctcatagtcttgtcggtactttgcagactgggtttcggaggccaattttgcgtcctgcgctcgttctaactgagtgatcaacgtatcaatgtctgccttgatgtcgtccgtctcttgctggagttgattgatggttcgttcgtggatggaagcctccgacaaccgaagtgttcgttctgcctcgagatcagcctggacgtctcgcttgtcagactctagctgaagtctcaacgtctgcagattgatccgttcggcttcctcccggtctgcacgttcttgggcaaacaaaagctcggcattcctacgttgaagttcttggtcagtcctcgtcgccgccaacaagggttgaacggttgtgaacagttgccaccagggccattctcgaagttccttgtgtaatctcgcgtttcgctggatcgtccgcaccgccgcgtcccggttaaggattttgaataatcgtcttctggcaatgaatcttctggcgttcgcttgaaactttgcaacgagctcaaacagatggccatccagacgttcttgaagatcagcaaggacgccaaccttgaagaatactttggtctttcctagtttgacaacggaagggtccaactcaagggaatcaatcatcgattgacaagcttgccttccatcgacgaaaccctgtttgaccgctcctggtgtcaaaagctcatatcgctgacggaactcggcgaaaggtaacctgttgggatatcctcttctagcgattcgaataccttcgagcacaccattgcatcggagttgatccaacactaacggtacgtcaatctttcctggttgtttgaatcgattgggtacaatacatcgaacgaaatgaggttgggtcgattccaattggttcatcagttttgtcaattgttcttgatgccgttgagctaccgttcggaaagcgcctgtcttgactcttctggctccaggcacggacgaatgatcatgagatgatatagttcctccaggtgtagatggatcttgaaattctgagaagagaccagccacgaatttgtttgtcgaactagccaggagggaggtgatgttcgagtttaatggatctttgttcttgtcgagccaaccggtggtacgatattcgaccttgccagcgtaatgttgcacagtgaatccttgatggaacctgatcgttccaaacttagatgctgtcgatggagatgaagaaggtgtagagttgtctaacgttgttgagccattggttccagatccagacccagagaccgctgacgaaggaggctgtttaggatcagacgaaggagcccaaagagtagtcaacttgttgaggaatgtaacgtcactggcttgtggcatgatacactcctcatccaaacaagagaatattccgataggttgtttgacagaaccctcgattaattcgatggttgattgtagatcgtgtccgaaatcaacatagtcccattcgatggcttcacgagcgtattcttcttgttcaagaacgaacatgtggtggttgaaaaactgtgagaagaagggaatttagacggattagtgaacatggactagtcaggggtgaaaggaatagaggcagagacacgactgacttgctgaagtttctcgttcgtataattgatgcaaagctgctcgaatgaatttgtctgatgaatagtacataatcataagccatgtaaggatgagcgttagtatgacgaagacttgacaaagagaaggaagagaaaatgaggaggaagaagaactcacctcaaagatctcgaaaccggcgatatccaatacaccgataaactctccgtgatcctttggtctatccaacgccaagttcactcgttcgactacttttccaaatgtcttttcgtagatcgtcttgcacaaactagcgagttcgtccactgtctgttgtttcgtcctagcctggacaacgatttctctaccagctttgactctcggtcgagtgaccgctttggaaaattcagacggaggtataccaagcaggtgacatgccttctcgagtgattctagagacgagatttgggcttgagatgttcgatcaccttgcaattggatattaccaatgtgtaggatagcggcaataattcggaacaggtctgcttgctctctatccggtgtgaaccctacaacgtccagcgcagtctgggaacacgaccaagacaggttaacctttcgtgtctgcgctttctgacagaatgctcagggacctgaactcactcttagtaatgtccattcttcgaaatcgttcactccgtcaatctggtgtctgctcttgttcaaatattcataactttccacgcgcccatccagcaacaggctctctattttatcgacgagaagaaatcgatgtacaagtcgaaatcggcgttcagtctgtattttcacacacgcgcgccgcacgcgaggagaaacaaagaaatgaacaaacctctcaacctagcgccttccgaactgctatccttacatccagcaaggagcatgtaaaacacgtggaaacttctttctccttcgctcctaaatgcaactcttgacttctctagtaggtaccagtccacgttcgctcctgcaatcgcgcccgacggcgcaaagaatattctcacaaactttccctataggccaatacatgtttcaattcacaagctcgtatgacaactcggggaagagaaaagaattctacgaacaaatctggacgaattgttgtttctcatcgtctgcgcgtttccaaatgcttctaaaattggattacattgcaagatctgttgttccaataaccctttggattctattgagccgttctcgtttccgttcccgttgatttggctggaactgaggctgtctttgctaactgttgaggctgaacgaagagaaatggattgttgaaggaaaggaggggccgagctggatggatgtggaacgagagatgaggtcgcaatggccgccaagtactggatcaccttcttcgtgttttccgtcttccctgcgccagattcacctcttaagatatatgattcaggcgcgaaaccaatgggttaacgtgagccatagggtcgaaaagcatgacggtacagaagaacttacgtgatcaggacactctgactctccctttcatccctcatgttgacccaagctcgttcggcgacggcaaatatatggggctcattgtcttcccttcgcctgtttctatacttgtcaatgtgcgcttgggaatatatcggtaacgacctgtacgggttcactgccaccaagaaaatgcctgatagagagaacagttttcgacacgttatggcgttggtctcgaatgagcgaaaaggcacacagagaggacaaagcacatggagatgactgactggagtaggtctatcgcacgagtgggcaaagaaaagggttatggtatgatcaggtttagttttccttagattttttgggaacagtcgaagcgacctctagctctccaaacaagagacagaagcgaacaataaggtaactcacgtagatttggccggacgaatagcgctgtctgaggttatggacgaccgaagcttcgttcagatacgtcagatccgcgatatccgacgcgttgtcgaatctgggtgggttcatgtccgagagctcagtattcggcatggtcaccgtctggttactttctgccaaagtaacgattgatcgatgttctgattctaattccttggatatccagccaccaaggtagccttccttgacgtctgggacccagacccatctgacaagaaagagaaggtgagggtttcaatcgcaaggtcagctcggagaacgacgtctgggcatgacaggactaggtaaggtgtaaaggatgctcacttcttagccgcctaaggaaagaggagtggatagacgttgttgaacaaaaggttaaacagatgttagctatcaagtgaagcacatgccgataggaggagaaccgacagagggatggatagaacggtctcacaaattctgcgtctctttccttcccgataggcatcgttcttgaggaaatagaggaaggagagaaaaggaagccacagagggataagtatatgtgatgtatttgttggactagactggggcaaaaacgaaaacagaccagagatggaagaagtcaacaaagaatgactggcagaggaaacagatcaatacaaggtgtattagggtttgtattggggatcgtgatagaatgcctaatacaaagcgtactagaaagcgtactacagattatcaaccaaatgtcccaaacactctactcgctcactcgaactgtgcagaaacaaatcaggccaagaaaaatcactcaacggacgcgtcgcgtcagagatcgcgacgcgtgttgattagtcatacataaccctaaccatcccagttgatctttccaccaccctacgctaccatatcgggtctcctgggcgacttacttcctctcctaggcaaccgtctctacgagaattctcatctagacttcaaccctgtttggttccctttgtcgtttccttcgttggagcgatgtccgacaacaacgacgcgctctctgttctgtctgccttggcatcccaggcatctcttcaaaaggctagtctgcccagttcgaatcattctcatcctcatccttcatcccagcaggacgtagggctccacctggatgagcaagatcatatcgttcatatcgggctcgacccggatggcatgcttctcatcccaaacatccattccgcagaagatgaccagctctcgatcacgcttggccttatggaaggtgcggatgattcgagtgttggccctggctcggaaaatggtgctgggcagacccacaaccatggtcatggtcacaacctacagtcctactccagacgaccggatcagaggagagcagagaatgaacagcagatgacagaaatggatcatgacccgattgatctctccaaacaactcatcggagagcaagaagggagtgaggagaacacactcgtcgatggttctgaacgtcagcaaggtgtacattcgggcaaaggaaaatctacacctagtacgtctctctcactatcgtgtacatatctggtcgtcacatccactgactcgcagaacgcgtctttgttcttctgttggaccgtgtttccctcatcatagacaaggacatgaacccattcgcgtacaaatggctaaatgaacactacactttctctaaacataccactatcgctaggacggccgtgtacgcgagttatacagccgccagtgaggaagcaggtgtaaaggttcgtctcgacattcttctttccttctctccatatgtaaacgcgagaatcttacctctttcctttgtcatggatatattgaaatagcctctcaatgcggcgacgtttggaaaatgcatcaagtcggtgtttaaagatgtcaagacgcgtcgacttgggactagaggccaatctaggtacaattgtatgttctcttttcactctttgtcatgctccttctggtacatccgatcactaacctcaaatctattgtttgattatcccttcggacatgctcgaacaaaagattgtggaattgcaccctcctccatcgaggaaacgacgcggctagcaagattcggcgaagtttccacctccgttccttcgacctccaatcctgtatctcattcgatgatcgcgtcgaccagtgcaagcacaagcatcaactctagaccaactctgatttcgaacgtcggccacttcaaaaaacgacggtcgtctagttcagctgtccacttgaatatcgtagaggacgatcatcttgaagacgataacgacggcgatgacggtgggatcgaaggagagtacgatgtcgaaggagacagtgtattttcttctttaaataaggggaagaagagaaacgtaaccgatatgacggaagatgaagttgatctggacggagagcgagatatggagggaataaccgagtcgaataggaaaaagtcaaagcggtcgacatcccttttcagtgatgagggcgaagctgccaatgctgcctctactactcgagaaggagaagaaggcgtacaacatgaagaagatgaagcgctgagatcactaagagaatgtatccctgctctgaggtcttcagcttcgtatgtctcctctcattcttctttcccccccaaatcttttactgatctttcatttgacggctctatcatccttctccccttgtagccctccattgaatccacagttcccgaactcccaaacaaacctgactgatgatcctccggtcccccatctatccgaccccgactctcactcacacccccttgatccgcctgatagactctcgagacttgcaatacttacctacgcgaaggactatattctatatataagagctgatatggagaagctgaggaaggaaaaaagcgaatgggaaagcttcgcgagaagtctagatggcggagaggaaagttggagagcttggcaacaacgacagaaaccaccacaaccgcaacatcagcagcggcaacaaccctccctcccgataccaaccccacttccaatttcactcccgcttccacttccatcggctcagccatcgtccgccgcttcaagaataccatctcgatccatcacccatgagctcagctcggacatacgttctatcaatccggttgggtcgttggagatctcttcgagcatccagcctttagatccatcagattttgaaccctcatcgatgcctatgagcggtcttcctcatcctcatgctcattctcatgaggacacacacgggcagatgaccgtagaagatgtgtacgacgctcaacaggttgtagagccgctagaacaaacctctgacgaccctcatcgccacgatgtcgatgtcgatgtcgatcatcaccacgatcatcatcaccatctaaacgatcaacaccatgatgcacaagctcatatcgaacatcacgatcatgggcatcatgaacttgaacaacatgaggttgaggttgagctggaacatcatcaccatcaccatcatcatcaccatcatcaccatgaagttgaaggtgaagcagaaatagaagaagaagtgcaggtcgaggcaggtattgaaggagaagagggagaagaaatagaccaccaccaccaccaacaacaacaacagcaacagcagcacgaagaagaaggtgatcactcagaggatgtcgatcatcacttattcgaacatcaaacgtccctcctcaacgaacaaatccagaacgaccaagctctaagggaacaactccaacggatgcagcaagaacaggatcatgatcaaagtcatgaacagcccgaggggtatcagaatggagaaggagatgtgtttgaggggtatgagcctctcggacaagatttggatcttggagttaatgttggtggatctcgtccaccaggttcgagcggaatcgtcggttctgaagaaacaggatcgagcgcgaccctcggaggtgtctccgaaccaggagaagtcgaaggaagcagagaagtcggagcaggtgcgagtggaactggggaaaccagtgtcgtcgggacgacagttgtgggcgtaggtgtagaaccatcaggcggacagactgaacaagaagtgatcgacccttcatcagctgcagctttcactctagcttcccttcatccgtctttgtcagatccggataggtttcatcacacgcatgaagaagaaggagaagaagaagctcatcatcttgcgcatgctcatttactcgttagtgggttggacgaagaagtaggcacaggctcaggctccctacccggtcatcttcacgatcaccatcaacacttgcaacatcatcagcatcaccagcaggtagaggacgaagaggaacacgtccggcggatcaaaaagatcgaagaagccagagcgaagaacagagagaagcagaggttgtacagagaaagacagaagttgaagatggaagagttggaaagaacgatcagagaccttgcagcaacagctggcggaggtggaagtgggagcggaggtgggagtggaagtggagaggtcaacgaatcagttggattgaatttagatcaggatccgagtccggactctaactaagagcagctctgactggttatcgatctaggggttctgtgtgacacatataagtgtataagctcctttgggggttcctttcttttccctgtgtaattctagtgtctgtatttaaagatatcgaatagttgtatgcttcgtgaatataattcggtttttgtcttctaatcatatatatatatttaatcgaagatgaactctctttccctcagctattcctagccagataagacagagaaggcgttaggatggctgtaagagattttaccttaaccaaaccccccggtctcttttctcaagagggatatccatctgataaaccacacttgccagaccccaagcctgagatccgactctagtaccacctattgcgtccagaatgtttcttccattctcttctctctcgagattctcaacctcggcgggaagtgggttgagtgggtcgaatggggtaaatgatgggtacggagaaagtcgggttatcgccgcttgagtggattgagttgatgatagtactgataggtgggtgattgaatagagttaagaatatcatcagcgggcttgaaatggttaagaacgaacgggtgggaaaggcataaagagacgaaccatgcggaagatgggtatgtgggtcatagacaccaaatggttcgctttcttgccactttctcttttttgccaatcgatctgcgtcttccccctcttcgatcggttcaaccggcacttgttccttctttttcatatcgtgaagcccaatcccacctctccatgccatctcgactctctctagcctgtccattctcgccttagttaacgacctattcacctcgactgcatttcttgccacgctctccatccaattctctggtgtccaaccttcctctctcaatctaactctcgatcggtttcctgccgttctccgaccggcttgttcaaaaggaggaagtccgtctgaagaagggaaatgtgtggtcggtcctccaagagggtaaaacggctgaaactttgtagatgataagtcgtctgtcgattgaggatgggatttgtcgacttgagcggagacaaatgggtcaggaagttcgcctaggagactattgggttctatttgaagggaaagacactcggccagcgctttttcctcgtaataatcgtcggtgacccatctagaatctggagagagaacaagtgtcaggagatctgtcaatggaaaagcaagaaaagagggaaacaaacaagaaagacaaactcttaatcattttcgcgccctgcaacttgaaacagttgcggacggctatcatcgttacgcttctcgttcggaatcgttcgttgagttttccgttatcgatcaaatgctccttttcatcacccgcgagtgtaagcttgacgagctccttgttgtttcggaagaaatagagcgagtccttaaatccacaggtccgggcagcatcaatcgagagaactgttggcccaaagataagaagcaagcacaaaagatcatacgaagcgtgaaagaaggttgagtgtttcgtgattcatggagaggaggttgaatgccggagtacataaaatgaagaccaaaatactaaactgtataacttgttgggattcgacctgaaggagcttgtaaatgtcatagacttatactcccggcctttgatagacaaatgagtatcagagaacagacaggaatacccagacaaaaggcgcaaatcatcaatgttcatacccaaaaggaattgggacgcggtttaggtagagttctcgggacacacctcctagtagctgaccgagtgtatcaatcttggtatctcccttaggatcatccggaaggaccaactcatcttcttcaatcacataagtcttgtcaccgatcacccttgtcgctgggctagagtcggactgcaaacgggagacggacgaacggacggacgtacagatgagtcacgcacgtacacagaaaggaagacaggtcagtcttctttaactgtccaggtgtttcgagccgctatcatgtaaactaacctcattatctgaaccactgcctccttcttcaccggctcctcctgcgccccgtctaccagatccgatagacgctcttcctcttcctctaccccttcctcttcctctgcctctacctctgcctcgtcctctgggcgtacccctccctcctccgctaggtgtttgagcagcgggagatcctccatgagaccctccaagagtcaaccttagcgaccttgtccttcttgaacgaccatccaacctgccacctggtgagcttgtctggttatcttccgagtcgttgccatcgtcatcatcgtcttcgtcgtctggcctatcgttgtcgccttcgttatcttctgactcgttcaacgacgatgaagggggcggtggtggcggtcgaccgtttctccaacctttaggaggcatgcttaaaga

SEQ ID NO: 728 - DNA, 9929 bp, Xanthophyllomyces dendrorhous
  misc_feature (7746)..(7755): n is a, c, g, or t
ctataagagagctcaagagaagaaagatgatggattgatggtagtctggtccaaacgggacaaaggacgcgtccgttgcgtgaagttgcataaagcgcgcgcgtcaaaggaattcatcaaaacctcttggaacgcataagccccaacatccgcataactttttctttttggccgactcaaacgagaacggcttcgtctgaaagcaacctttctctccctgtcctttgcttgtccctctattgtctctctggtcaagagcatcaaggaaagcctagcctggacatagagagaagaaagagagggaagaaaaatatacatcagatactcattcagccggtcatgtcgtccacctctctagaggctcagctgcacaagtatgcaatgagcttacccaaccacgtacgttgctttccttggttctgtcgatttgtgctggctcacttggttgtctcattggatccataggagaagaggagatatactaactggagtctatcttattttgttcgttacacctcctgatcccataccgatgcatccctcatacactacaggctatgggtcagaacgatttgaccactcaattccctaacgtcgccctatcagaacttactctggctatcaataaacttagcaaaaaggtttgcgctctcttctgtctttttgtggtgtctcggtctagctcttttggaactgactgtcgcgttgtaattgttctatctatactactcgatccgccgcagaatttggttcgaacgttggatctgggtagagctggaattaaatggcaagccatcagcaaaggagaagccaaaaagtaggtgatcctctcattgtagtttttccaaagacgagcgttggctcacatcacagcgattctctcgtgctgcccttactcttctataagattggcggcactagacgatgacgaagggatggtgtacaaggtcatcgagagcgctggaaacgagggtgggtctactacacttcattccctcttgaggaaataggcaagaccgaacggcttttctgaccacttggccctctctctgtatatatacatacatcttctcaggtatatggactcgacacatcaaaaaccagacaaaccttcacttgacgatcatcaataaggtccttaaatcactagagtctaggaatgagatcaaatcggtcaaatcggtcaaagttcgttcatttcccatcttctcagccacgcttggtaccgtttggcttccttgtaatctgaccgatctatctcgcaaaaaaaaaacacaaacagcatccgacactgaaactttacatgctctacaacttgacgccctcggtcgaactaacgggcgggccttggttcaccgataatgagctcgatactgaattcatcaaacaactccttcaagctgtcctctcctttattcgacaacgggttagtctctctcatacgtcttgagttcttctctcttgatcgcaaggaatcatttgtgactgatccacaccaccttctctcctcgtcacctctccctcagtcgtttcccagagtgaaaggatacatgaacgcgctctttccgccgacgcatacatcctcgtacccaactgctcttcagatctgtacatggatcaagaaagccggtatctcatcgacggagctagacgtctcccacattcgagtcttgctcgaggttctcgagttcgatggtgagattcaagctcttcctgggcagatgggacagtccttcgggatggatactggggtgatggactttgaatctgccaggcttgggtctgggtcggttgggaggaaatcaaaaaggatgaaggaagatgaagataagaagagaaggaagaaggggaagaatggtaggagaagagacaggagcgatgatagtgagagcgattcggacgattcggaagataccgacgattcggacgatgaggagagacggcgaaagaggcgaaagagagaaaaggagagaaagatcgagagagaaaggaggaagagagaggagaggaagaagagaaaggcgaggaggaagaggaaggcaggggcagatctattcgatagtgaagatagcgagagcgagagcgaaagtggaagtgaaatggacgagaagaccaagtcaaagtaggtttctcttctcagatcaaccctttcatcggttcaaaactattgattcgtcagctaaacatcctcttcttcaacgacttgtccacaaaacgcctactagatcaaagacctcaaagtctaaatccaaaaagaagtccaaaaagtcccgtcagcaatcatccgactctgagagcgacccttcctctgacgatgactcttcgctcgactccggatctgactctgattctgctggctcatcttcatctggttccacctcttcttcgtcttccgacaagcgatccaagttatcgactaaacgatctaaacgagcaagcgccgccgatgtcggtgcatttgtctctttgtccgctgctgcttcagacgacgatatctccgactcggatgcgtcggcctcagagtccaagagaaaatcaaaacaaaaaaagaaggagaaactcaaagggagcaaaccttcggccggtaggaaagtaaagagaatcgaagttggcgtggaatccgaggagaacgattccgaggaggatgagaagaccaagtctgggaaagggaaacggagagtgaaggaagaggatgaggtgatggaggatgatagagacaggacaaagaaggacaacagagcatatggagatgatctcaaggtgtcgacttttggatcgttcgagaacggagatgatgctttagtctatcgagcaggtatgttgtttctctttttctcttctttcttctgctcttcctctcccactttagatcaacagctgaggtcctgatgacctgttgaaaataaacgcggtttggatagtccggccggagaaagtctccttagggtggacagaagcaccatgtggacgttgtccgctctttatgttctgtaaagaaggaggacctgttgagcctgacggctgtgtctgttcgttttactttctgcttctttcctcttccctttccttccgttgaattgacaagaagaaaaacctttggctttgggttggttccgtccagattacgatacgtggctggaccaaactatgggcgctctacagatataaatccttggctgtcccatcatgggtcgtagaaatatcatggcatgcagcataggtcgatcggaggacaggactagaagggagagagaaagagaaagaagagggaaatataggattccttcttctttccttttctctcctcaagcgtagccttctttcatacacatctttcattcctgaattgtctcttcgatccattcctgtttctcatatatccatacgttctctttcatcctttcaatcaatatgtcgctatccatccatcccctcatcgcttatcacctatcattacccatcatgacttgcacttttctgttgccgtatccaacattgcctttgtcgcagcttaaaacaagactgaccatctgacgggagaggagaaaacaagatatcttttcagccaagccagaaaacaattcaagtcctatgtgtgtatgtgtgtatatgccatccatcaagtgtctttcttgatacctgtcgagctagaggtagagcccacagggacgatcggatctttccattcggcctgttccgcgttcacgtggtgaaataagagaaagagagagaaagcaaactccaaacatgagcgccgagactgactgaggtacggttactatagagaggagaggagacagaaggcggaaacttacccagactcttgtagacttggaaccatctgtgctgttcacgatctcctcctttgtccaatccacagaaggcgcgttgacccattgacccaacctgtccatcatctctacatcaacgttgtaagctttcgcgaggtcttctacctcctcttccgtccgtgccaaaagtcgacgttcgagtagctgtagtagatctggagcttctagccggttatgataatctggggaagacggggacggggtgaaatgagaaccagtggggaaagagatcggatcgagtgtccggttctgaaggacagataccgatgggttgatctagagattgatatacgtgcaggcgcgcaagacacagagagtgaggaagcagaattgagatatacatcgcagggaacgagctcggaagaaagaaagaaagaaagaaagaaagaggaacgaacggctcctcggcgatctcgaaggtcgggaatgacgacctgacctagactagctaaactgttcaagaactgtagatcttttcctccatcgcgttcgatttctgtttgtatgtcatcaaacacaaagaagagagatcgagtcggaagaaggtaggtgatgcagacagaagataagaagatgagcctcgatcgaaaagagttaaggagaacgatcggatcgagaggtgatcccaaaggaaagactggaagcggaaagcaaagacgtcgaagaaagagatatagacgaaccatccgtcctagaggcagacgcaaacagcttttgaccactcgatgattcacccacagccgacgatgatgatccatccactgacgacgaaccctttggtcgagctggttctttcgaagggaacgagcttggcgcggcttggtagggaatagattgtttgatggcctctggagctctcgtcgggaattttttcagaggcacttccttagctatctttgatgactttgatcccattatgtgagtgagtgagtgtatgatgggtgttgagtcgaggatggtacgtgacgaaggcaagggattgctgatggtgaggatgattggtttccttcgtggggctccgagattcgatttgaccagcgactttcttttctctttctctttctctcttaccttcctcttacttcttttggttcgaacgaatgacaagctaatcattaatcataaacaagtgtgtccgactaacaactcgtccgtgtctatgcctgtgtctgtactttattgacattgactctttgcagaagaagaagaagaagaagaagaagaatttctgtctgaattggatgaacattgagagatcatgtccgtcgagatagactacgccttgcttgcttccgatccggtgttgacatccagcttggtttctgctctgaacaaatcgcttgccggtgtggccttaccctcgtttctcggtcctatcagcgtgacatcgttcgactttgggacggaaggaccggacgtcgagattgtcgggttgacggatgtctaccaagagtttcttgacatagaggatgaagaggaggaagaggatgaaggcgacgatatactagggtctgatgagtacaaacagaccagtccccatcaagaaagacgatacagtgaggatggagggatggaacgggatgaatcgatggtagaaccagcagatttatcctctccggaggagaacccccgatggacgacgtcggcaccgaacgggaccggtggtgggaatagtttggccacaccaagctatgagatgaatcgacggatgagtcaacagagctcatacttttatcaagcacctgcgagcgaggcaggttctgccaggacgtccggcacggcgatgtcatcccggacgacgacgtcgacgatacctcattcgatcatcggccggaccccgttgtacaactcgagtccattcacgtcgagagtcggattggggtcaatgtatagtccttccggtagtctgttcttgagtcgaacgacatcgagagctccttcacctgtgcggacgatcgataccggactctcaacgtcgaccaagtcgtctgaacgagaggtgaagggtgctcacgacactctctcgacgatctctccgtcaatcgatccatcgaatgagactcgatcgggtccgatgggccctgtaccgacgcctgaatcgtcttcttcctctaccggtccacccgacttgcagcttcatcttcggatccgtcattcggcagatataagactttcactctcgactagtctattgattaaccatccctcgccgggtttcatgtctttgcccttggcattaacagtgactcggatggatctcgaccttcatctcgtcgttgccttccaggcgacccatcctcccgtccaccgacgaacttctcgcggtgatcctgagggagcaggtagcgagaatgtgaacgaaggtaccggtggcgaggccaacgtcagtggaagaaggattcatgtgtccatcttggatgaacttgatccttacggaccaagagtaccgggcgagaccgtccaacgggatgtccctcatctgggcgagtccaagccggtacctgtgggggagcgaatcatcggccggatggagatccagtcttcgattgggcaggaaggcgagcatgtactaagaaacgtagcaaaagttgagcggttcgtgctggagctgctccgacagacgatcgtggatgagtgtgagtggagaggacaattttctgcgcgatcttctttgacacagtgtgtgtatgtgtgtgagtgggtgataaagacggcatgctcatctagtgttttctcatctttgtgcttgtgtgtgtatctgtgtgcgcacagtggtcttcccgtcttgtcatacgttcatcatatagagactgttgactaggtcaaacacaagacgtgcacacgtagtcctcgcaaagaagagagtgtgttccaggcaagatcatgtacccaacagaacgagatgagcagagatgagcagagacgagaccactacgattccccctgtggtcttctgccctttgcccttctgcccaccattgtccctttacagtggccgttctacactcacactcttatccttactctcacctgctcgttcctattctttctctaactacatacaccatgatacatacacacgtacatacacacactcacacacccacccatacatacacaccgctggatcgcctgcgggcggctgtcccgcggttctaattatagacggtgtttttgggtttttttaatctttttttgcctcctcttttttacctgcttcctctttctcttctctcttctctcttctcaacacccatctccctcgttctccctctctttcttcttctctttctctttctctcagttcctcttactctctctctctctattctaatcgatcccagcgtgagtgtttcgtgggtttcgctcatcccgttcgctcacaattcgatgttgaacttacacctctttgtgttctctctctctagatgtctgccgctcttcttcttcctcttctcgccctcgctccggccgcttacgctcaggttaccgctactggtatgtgttcttctacgatgccacgctctagagaccatgagcgagcgatccgttccggtatacagatcacacccaacagtacaatcgggtggtcgtatacgcgccggtgtgtagttatgcatgggcgtatcgttgaatcggcgactgacttcatatccatcctccgatctcgccaccttttgtctttcttttctctcgttggatctatataggtacccagggtgtgaccaaccctgctaccgctacgttcgtttctccattcttatctcccttctgctctggatgaccatcgtcgtttctgacgcactcgaatcgtatttcacacttctctcttccccccccccccccaaacattactaaaaataaatcaccgcacttgaaaaaaaaacaacaacannnnnnnnnntaaacattcacgaaaacaaaacagccttggagtgtacaaccagacatcctactccaggttgctcagtgtcaactcggttgatgacttctgtatcttctcgcccccagtcgctggtgataccatcggtgataccgaggaggaggaggtcgcttggtgcaccagtgagtctttctctatccttcaactctaatctaacattcctctgatcactcaatgttctctttccctctctccctccttttcagagccccgaaacaacgctcgagttatccctgagtatggtcctttttgcgtttagatcgtcttggttcatatgttcttaccaacacgggttccatctcattttgaactttcagcggaacgatcaccgccgctcacttcgtaaagacccctttgtacgttcagatcaccggattcggtgacctcactaagctcaacgtcctctcgggcgatgagggaggagagcttgatccccatggttccaccggactcggtaaccccgtcggaggaaacgtcacctcggacgtcagcggagccgacgttccctaccaggagtggatgaactacgttgcgtataattctttctgtatccgaatctgtaccgctgagaactcgacctactcggccgccgtcatgtgcgagcacaccttcgatctgatgggttgtgagtgggtcatgcccggtgattacgaccaggaaggattcacctcgtgtgacggtgattccgcctaccctcccggagtctaccccgtcggaagcgccgggtccggtaccacctcgacctttgcccagcgatacaccggaacttacagtgattcatacaccaccgacacctggaccatcggttacaccgtcaccccccagactccttacatgacccctgcctcttcgaactgttttacctacagcactatcagcaatggaatcgcctcgcttaccgctggtaccgtctctgttgccacctctgccgccaccgtctctagcggagcggtcgccgccgtcagcagtgccgccgcgtcctcttccggatctgcctcccaggccgccatcacctcttccgccgccgccggatcttcctcaatgaagacatcggctgccgccaagtcctcggccacggccgtcgcttcggctgctgcctccaaggccacctctgctgcctctgccgcctctgccgctgccacgagcgttgctgcctctaacgccttcaggtcgtccgccgcggacttcaccctttggggatccatcatgaccctcggagctgtcgttttgggagctggtaccgtcatgatttaaacagaagattgggctttcgcacacgttgcgagaaagtaagatgtttgatccagaggaggaactggagaaagcaccagtttggacgttatacccttcctcttctttttgtagccctcgtgattacctttggaactttctcgatagctgtttttctttaccttcgccctcgctcaatcttttctgtccttcttgcctctctgtttcttcctttacatatctttttctcaaatggacaatcgggatcgatcggattcaatcagtgcacacgaaactcacttatatcatccattgccaactacaccacgctcctttccttttctctttcttcttttctgttctttttccaacccagcttttctcgcacaacctcgtctggacgaaccgtcgtgcccgtttaggttcacttgcagatacagagagaaaagtgatgacccttctttgcctttgcctttgcctcctggttctttgttctggattcgatcttccagcgacaagacaggaccaatccatcactgctgacgaaatctgaactgagaatgaaagacaaaacaagaaacaaagaaaagtatcaacatcctctgggtagagagtcccatcctgccacctgtacgaagcatgttagttcaaatggaatgaagaaaaaggcagcgaatagcagagaatacattgatagatacattttattaccaataaaactcataaaaacaaacaaataaaacgaaacaaaacaagaacgaatatagataacagttctctctagtagaatgggaggagtaagaatagaagagtaagggttcgtactaaatgcgatatacaagacgaaggcctagacttgaaaactcaacttcagatcaagtctcttgctttttgggggggggggg

SEQ ID NO: 729 - DNA, 26916 bp, Xanthophyllomyces dendrorhous
ggggggggggggaacctactccgttctatgacctcttcctcccttttcccatctatcccctaaagtcgtttcatctttcagtctaatggtcaaatcttgtttggattttttcttactcttgtacagctatgggaatgagtctaatttttctaatcgccgtcttgctagagatgacaccgaagggtcttggcctatacttcgtcgtcgtcgtcatgatgatgggtcgatcgggtcgttcggttgaaaaacgtggatgatccaaagagagcgcgagtcaactctgtcaactatgatttcccacagaaaacgggataaaaaagaggggagttcatttatttttatttttatttttattgttcaaaatacatgttagatgggtagtccggaacaaacaaagcggaaagtagtgggagagagaaaggagagagaaaggggcgcagaaacaaaaggaagagggacatacgtcttccatcactttcgtagtttcctccaaagcttccgcctctgcaaatgcatacagaaataccatatccttatgaagtctcgctctctcctcgaaacttctgcccaccgacagatcgcctgtcgaatctcccaggtatgattgacccgccgacgtcgatgattcggaagacgtcgaagtcgaccgacgaccaggatgaggtgaaatcaaccctttgatcacctcgtcttcccatgttcgcacagctcggcctggcgagggaaggaactgaggaagaggaagcctagatcgaaaggcatgagaacatgcatataggtgaatcatcaccgaggagatctgtatcgtttttgttcgttgttttaggcgcacataggtaggaagacgatatcagatgaatggtcgagtattgtctgagaaaccaagataacctgtgtccttacgagttctttccgttctggaagttcacaaagagagagatatgtcatgttagcgtgtcagcaaggcctagaaagagacatctcaagcgaggaagaccagatttacgttcaaggaccacatgcacagtttgttcttcaaaacagagagaacgtatgaagatatatatatcatcagccaaacgagaggacagaatcaaagttataagggtcagggcgcacctctaggaatctcttgacgaatgatcgacagcgcgatgaacagatcgctcaaacttctggcggcaacaatagtctgtctatatgctctcaacggctactccgagatcaaccagccggttaatctatcaaaattacatcccgagactagaggaggaagaaagaacgaaaaaaagaaggaagaacttactttatgaataagagtaatttctaactttagcgtgtttaaataagaagagcttttcatcaaattcgtctccactctctgttgaagtctctcaaaagccaaggtgtcgaatgagtatggaccctgctggatcaacgatcgactcatcgccagatacatctttgtcagatcgtccagcacctgagccattgtcccgaggaaaagtcgtttagatcgcgcaggaaagataaattctgtgacgagcacagcagcgacgattcttctcaaatgaaattcgaataggataagatcaacacggtggagccgagtagaagacacccgtcaagaggatagaaagacaacagactaacccaatgcagaccgtgactgttcttttccatgcgagctcaacgacatcttctgtggaaagcctgagataggggatgaacaagaccggaggaacagtgatagatctagattgcgattgcagttataaatcatcaccaggtaaagcatggcccaaatcagaatccaacaccgtgaacacgagacccttcaaatatctccgttggatgactgaataaaggactaacaagacgacaccaactcctggaaaagtggtgtacatgatgacgtagcccgccagagcgctatctcagcaaatagatgagccgtcagatacctatgattttaccaatcctctttcttctccatatgcaagatagaatagattgttgtaatgactcacccatagcaactcgtaaggctgatcaatgcataagggttgtcatgcgcaataagccaaatgatccccgccaagatcgctcctgagactgttcccatcactctgaacgttcccaccctccaggtttgaccactggtaacatctagaacaaaaagatacgagatcgggatccattgacctcggatatccgtgaaccaaatccgtccatgggaagatggaggtaagaaagctggcagagtcagaagtgtaaaccctaagccaagtttgatgctatatgtgaagttgtgttttcgagcgtggagagcttgaacaaagcgcgcaagagtcaaacggacttcaaaccgcacagaaccaacgaagatattcagacatcgaaagaacatgtacacatagtaactcgaagagccctaactcacaactcagaacgcaatgagaatcccacaagacaagaaacgttccatagaaccattttaacggacttctactaaaccgacgggcccgacgagcggggggaggagtcaaaaacacctcggcgatcgacgcctgaatatcttgtcgggaacggtccacatgctgagaaccatcttcgtctgttgacagaatcatacaaacaggttatagacgatattatacatgagatgatttgcgatcggaaccaaatgaggattaaaaaagagaggcgaaccatcttcttgatcttgatcctgagcggtctcgtcccattttgcactgagcgaactagatcctaaccaagctcgcgtgagagtgggcatccttatagttgccttaaccgaagtatgagcacggagagcagcggccgattccagtgcactatccaatgtccgagacacctgtttatcaaaacagtatatggaagagatgaacaagaaccagaagaggatgtcagatgatagttcaaagaagtttctcaactcgagtcggtgtataaaggaaaccacgaacagcaaggatcttgtacatgaacagcgagatccgaagcagatttctgtccaacctgtgcgcctttcttgacacaccttgtctgcttcgacctatcctcgatgcatcttcccacgcatcgactgctttatctaactctttatccatcgcaagaataaatcttcctctggctagtctgagttcttccctagcttgtttcaaatcttctccagcccttccatccaagacatgatggagcgcggcaaagaccttgattaaattcttcgcgaactgcctggtaggttcctcgaacggagctctctgtgaagcatttctagcagcacgttcgtttccagaatgtccgtccaattgtcgatcgtgccgctcgacttgggaagaacctgaagcaagatcctgcttcagtcggcggatagaagtggtgaatggattgagtcgatggatagagaaccgggtatatgaaatctcatacgatgcttgggcgaatgcttgtggtagagaagatgattgtgtctgaagctggctcttgagtttggagagtttcgtcagatgggcgggcggtgtctgctcaggaagataggaaagaaagaacgtgtcgatactggcaagaagaagctcttcggacgtccggaatgcctgttggaccaacccaacacatttactgacggaagtcctgggaaaggctatcgtagctataaaggaagccaagcaggcaaacaaagttgggtacagcagttcaagcgggacactagccggtaactgttaggaaggatagagagttgcaaaatgctcagtctacgacagcattctctaagaacaacgcgttgcaaaatatatatatggtgtgtttgagagagagagagtacatacattcacacgatctaactctgtagtcagcagccagactgagtggaataaagagattctagcgaaggatgtcaaacgaggagagtgactcctgatataaccacctaattgttacatagggcaccaagagcaagcatccacagatcagcccggccgaaatcaaggatcgaaagcaagaagagagagaaaaaatactcacagacacaactctggattgctataaagaatgaagcaacaatccggctctgatttgactcggctccgccgttctggcggttgagagaagcaatgatacctatccctacacaagcccagcctagaccggcgcaacctcctaccaaaccgaggactaagccgaatggtaaacacgttggttcaggtcttgctctgaaaaacaaacttatatattctcgaatagaatagggtgatactaagccactcactgctactttctatctgacctccgacggtgagacccggaaagaagaagagtacatcgatcgtcagcactaaaaacgcgtagggtcctccgagagcggccaccgggcggatgacgattgtaagacagcagaggaaagtagcaaggataggtggacagaggcttttagtggtggttccaagtctgttgaagagcaagggcagcctcatggcctctatagtaccaagcaccttgggggagcaagtaaaggagggtaaggattggaggagggtatctgaagtgaaaagttcgaagtttgtgcaacaacacccgcggcaatggaacgtcagcattccttcaggtttcttattttgagctttcctcttccttctatgcttcctccctgtgtaacatccctccttcattcattcattcattcattctgtttctgttgtttacatagtagatcttatagcgtttcatacatattagttttccttccatctgccgaaaaatccatgccaaacctatagcacgcatgatggagaattcaagagtcaggacaaagtatctttgactgaaagtaacaagagaatcaatcttacagaatcttgttgtcccgtagtatattcagatatatccgcttggaagcttcttgaaggtaagattaacacatcccctacacgtattgggtgtttatttcctgacagttgtcttggagtaaccccataccttgcaaacaaatatctatccatttcattgacagagtgaaagtgacgatgacatgacacaagaaagtcaggcttgatcttacacgggtgaaactatgaatgggcgcacctgaagacacaatccgacaagagagcaggacccgtccactccagaatatccggaaacggcacgtccttcccaccatttttcgaggctgccagagctttccgatatttagtcgaagttcgaagagctgatgagacagcatctaccatgatctatttcacccatcgacatgaagagataaaagcaccagtggtgttggttattcttctcttcaaggtaacttttcaggaagaaagaaagggacatacaggatgaccgggcgcggctgccaacgtccactggacgatttggagccctcttccgaaagtcaatgctctccaattagagtccgattggagagagtcatgctcgattgaaacgactaatgaaggtggaggcaacacagtaggtttcatgttcacagagaccttgctgggtttatcaccatttgggttccatagacttgctagtttaggaacgactcgaaatattccggctgtcttatcttccatatctgttttaccccattcttctataggtcgaacacaagccgtgtcgatatccgtctgagagaaccatgccgacaataacgcaccgtccaatcagtaggatggtcatcgagcgctccagacagagaaaaatatcataaagcacgtacatagactcctcccctgtagagcaacactagatatctaaacaagtccgccttgacagctccgattcgtttttcatctgatacatgagtggtgagaaacctccattcactgagcaaagtatccccaaacgtactctctgcccaagtgttcaacgcgtcatcactcagaaaccggatgtcccaagaaggattgacagttttccatcctttgaactgatctggtagtcgagtgtcgtaggatgtcgtgtatatctgtttgaggagcgcatctggttcagggattcgatcaagatacagatgttgatccatcagagacgaccagtaaggcatctttgtacttgatatggttcctgaaggcagagaaggcaaagcttctgttgtcggtgcagtcgttgttgccattgatggaggagaaagattctcgtggaggaagaactcttttaaagacttttgaatacgtcgtctgtatccttccaggttcagatcatccccagattccccaagtttaatcccaagctgctccctgtcctcctcccaactcccctgggatagataaggtctttgaagagcttcgagttctttttgtacgacgttgatcaactcgcttacagaaaccgaaggttccctgtcgcccgcggacggtagtatcgatatcaacggcaacgaagaggaggagctagagataggagagatgtgtagttgatgatagaagacgtaagctaccgtcaggaagcacaagacgacgatcactacgcgtcgacggaagaaacttggtgcgggcaaagcggacgtgagcgagggtgtacgcgaatgaacgaccatatgtgattatccacagatttcacgagattcgcgtgtctgaaaggaaaagaaagaaaggatggaggaaagagatgaatcaaggagaagatgtctgggtatgactgtgtgcagaaaggacgatgaacatgctggctgaacagaccaggtgtgcttctgggatgcgtttgatcccagagagaattgcggggaagcctcgcaggacgttgtatttatttttatatcggctgtgtattttcatttgtttattgattttttttaaaaaaacattcgagctttcatctttcttctatgtaccatcgctcaatcttctcgcaacacatatatcaacaaaagacgagagtccattgattcataaaacagaactcataagacaacagatgcaagatgagagccgaaaagtagtatcaggccacactcatgagaatagaacgttcttgatttgaacaatatccatcatcgacctccgttctgtccataagagtactgctgctgatgctgctggtacggagatgggtatcctggctgtccatagggcgaaggcgccggaggagggtcaggtgaagacgaggccgggtgttgctgctgctgctgcgcactcgatggtggtgcatagccataaaatgagctattgccggtcgacgactgtctaggaggagcaggtggggccgggtatacatgttgaggggcatatgaagctgaagaagcagattggtaggagctagaggtaggaggagggggaaggggaggagggtaggcttgttgatgagcttggtgttgatacagttgtgccggcggagcaggctgacttggcccaccataattggagtaagtcgactgatggggactgtaagacgaggtcgaggaaggaggagcaggaggagattggtaagagctgtgagcagtaggagctgacgaaggagcagaatgaagtgtcggcactgtgctagggtgagagttgaaggcggatgatagaccattcgctccaaagtcccacgggtcaggcttttgagaaagcggtggcggcggcggagggattgttgagctcgcgaaggatgaagacaggttagagggagggggaggataaggagatgtcggagctggagaggttggaattgctcgccagtcatatgacccacccgtagatggctgtcgctggggttgcgcagaccctatactgagagaggcaaaatgatccagccctgaggagactgctcgtggaacagggggtgggggtccgacagaggaatgtgaagatgtatagatggacgaggacgagctggatccccgctcacactgttgaaccaatcggcctctttcctcttctcgagtggtaacaaaacttttaacacttctacgtaaggcgtctgagagcaacttgagctgcaaatagaactccaaccctcgtctgatatagccacaggataaaagaaaaaaggacttgtgtcagatagctaatcaattaaatgaaataaaagatacataccgtaaagcgctattagcctccttataatcctcagcttgacctttcaatctggctgtcaaatctttcactgctctctccgctctggcccatctatcctgggtttgccgcgcgcctcttaactcgttcaggtcatcaagcaattgcgaggtttccttcaacgttgatttctcttgctcaattgtatggtctagccgggttcggaacggcttgaatttctcaagctcggttgcaaataaggtgggttcaactccatgagctcggcgattcacaaggagttgttgagaaacgtcatcgttctgaatctgtagataagatcgagaaagacagttagccgaagacgaacatacgtgccaatatatatgtcaggtagaaaagaagacgaaccaagtgtttcaagtcattcaaacaaattgttctttctttcttgaacctactgagtcttcctagtctttcctccaattctccgatcaagcgtttcatttcctttctctccctctcttctccctcctcttccttgacgtctagatccaacaaacttcccttgtttgaagatgctggatcagtagatcctaccgcttctgtgtaagcctggtttagtgcctccggagaacacaaagtcgggagtgagggcaacacagtttgataaagtgcgttaatccgagcgtcggactgagaggcggattggtaggcggtctgctgagagcgaaggtcctctcgctgagatcgagcaactgatgcggatggcgcttgagtccaagagttttggtactttgcctaggatagacatgaagcgccgattgaacgaataacagagaagatcattagtacaagcgagcaaaagtggacatgacggaagtagtaaccacatacccgcagtctctcgcactccctcgattccttatccaaatcttcctggcatgaccgtaggtcttcaccaaccagttttttcttctcttctagccgaagcatgagcaccttgatcgactcctttctttcctctcctccaacctcttcaactaaatctaaagcttcgcgtccaggcaaactcaaggcatcgagtcctgctccgggcttcccgtgggaagcgacgatcgatctaaacttgttcaaaactgagggcaaaccaagatattccaaagttgtctgaacctctccctcagcaatgtcagagcgttccacttcgcctcgggatagctttgccttttcctcggagtagactgaggcagattcgtgaaccgctagaggtatgagcttatggaagatatcctgaccaacaagcttggttacttctactgagctgtaggtgtcttgaatcgatattggctgagcagccgagagcttgtcaagaggcggaagagcggcttcagcaggcaggatcgaatgatagatgagttcgttttccttggttgcctgatgagttcgttcactgacgacggccagatgggtcttggtgatctcgaccagggccgtaccagaatcggcaggaagtgtgagtgaatcagggtggttgaatgaggataagaaaaccgccgcttgcttctgagcctctttgccaagggtctcagctagtctcaacctgacaagcgcgtcgccgtgctttgactgagagtcatccaagatcgctcgatgataattggcaaccgatgggtagtatttcgccttgagctgtcaatcgcaagataatgagagagaaagcagaacagaattaagcggatcagactctgccggcagtcctcaggaaaacaatctgattatgtggcaggaaggaggacttacattgataagcgcaacccaatttcgatcgatgataccttttccaaagaattctttgacctcctcgctcaaggcggcatacatgattccagcctgagccgccagcttggccactatacctgcgttgcccggaccttttcctcctgccttggcctttccttcctccaagaccttctctgtgaacatctcttgggcttgagccagcatgattccgatgagaagcttgacgacttccttgctgagatctgttgatggtgcatgtagaaagttttcgttcacatagactagcatgcccgctgcggatcgcgcaaagttgtaagctcgtttgagaccttctggagatgatcggttctgagtcgatgacaggatggataatgtggaggcgatctggtagatgaccgaggctttctcgaacgccaatgatgtctgtgttgtcagcttgttggtaaatgagtcatgcctaaatcgaagaaaggatccaaaggaaagacccaagatcagcaataagaaagcttgactatagtgaaggaagatctaacaacatgtacgtaccaagggaatgtcactttgatatcagggaacctcaactccaagagttcaagctgaccaaaatatctgaacaaaagatctctcgctagtcattcgaaacaagagcataccagaatccgagtcagttctcttcgcaatggacgggacaagagtccatcttgtggagagaaggaagagagaacccacccgtcacttcactaccggcccctttgacagcatcctgtctggctcgctgaagggctgcacactcttccgcataagaatccggattctctccataagctgaggcgattatctgacgaattggatttgaccagtccacctctgccgtctgtttggatggtatcgatatcgctggagattgcattgtcatatcgaagagagagatggggaatgaagcaaggcaggagagatggactgtggagaagccgatgatggtgagcgacatgtaaccatttcgtaaagtggttacgacggttacggtcgtctggaaaaagaacgactcggttttatcatcaggcagaggatggactttgttacttccaacctacctcatcttcccacctccacgactacgatagtcttctccacgtttacttttacgaacagcagaaagaatcaatagaaaattatgtcggccgaattagaggaggataacatctttgctggactgaagaagaagtccaagaagtccaagaaggttgaagttgaggccgagccagaggccgcctctgaggagtctgctcctgtcgttaccaagaccgctggcgaggagaccaacgaggctgctgccgaggatggagaggaaaacttgtttgctgatctgaagaagaagtgagttttccatgcttccaggttagcctattcgaggtggccatgtctactggccactacaagtcaagattggagggcttcttgaacagacgagggaaaagaagtgaaaaaaagtgcggataactcaccaattgtgtatccacttctttgcctttgctctctgtattgctctttatcgaacacccaacgcgttcttaggaagaagaagaaggccgctcctgttgatttgctcggaaatgtaggtccctttcttctctccaccttgctcgtttcgttctcgtcttgcaacctctgctttcaagctcgcttgggactgacatctcttttgtcctcttgctttgcctcgtcatcatcggtcttgataggacactgttgaggacacccctgaagttgctgcagctgccgccgagaccttagctcctgatgacttttcggatctcaagaagaagaagaagaagagcaagaagactgctttcgatttggaagccttcgagcgagagcttgttgaggacggatcggccgctaaagagggagaagaagatgttgagggtgttccggcagactacgatgagaaagagttaggagataacgtgtttggtggtgcagccgctgaggacgccggtttggacgacaacgctggagatgagagccaggcttgggctggaaccgatagagagtacacctacgacgaggttagtcattggattgtatccttctcttctttcgtcattctttcctttcaatgtcaatggcgacatagatgtcattaccttgtctttctcctccttttgactttttctatcactctatttatcggccttctgcctcgatatcactaactgagcatccctcttctccttctcctttccatgtggcatcgactcttgttagcttctctctcgagctttccgaattcttcgatcccagaaccctgagctcgccggagaccgtcgccgatacactattgctcctccccagatgcacaaggagggtaacaagaagacaatctttgccaacttggctgatatctgcaagcgaatgcaccgatcggatgagcacgtcatttcgttcttgtttgctgagttgggaacgactggttcggttgacggaagtcatcgattgatcatcaagggaaggtacactcagaagcacatggagaacgttttgagaagatatatcggtacgccgctgtttttctctctgcttctgggcgtttactggtcgaggagctgatcggtctctctctctctgatttgaacaactatgccaattgtgcgacctaaagtggagtacgtcacttgtcagacctgcaagtcgcctgacacccttctctcgaaagagaaccgaatcttcttcatgaactgccaatcttgtggatctcgtaagtctatagctttgtgctatcccatcccaatcgcaagccaaaacaaatgcatctgctaatctgtcgtttctttgcccttcccctcatcaggtcgttcggttgctgctatcaagtctggtttccaggcccaggtcggacgaagaaaggctcagcagaagggaccttaaacgggaaacagaaggaatttttgctttacgaatggacaagcggtgtatcaatgattcttttttgtctacctcttctcctgaatatctacaaaggcaatgtatgaatgagaacttgatgatgtgtgtgtgtttgtgttcggatatacatatcaatgcttacgtaacatatatttcagctgggacacaagatcgtttcctcaacgatcaagactgaagtcttccactcattcacaccctcacctcctcttgaccaaacagtgctgtatccattcctggattgctttcgcaaacagtctgcctctgtttcatcccgaatagtattttgaaaacttgatatttgctcaatcgaagatgtcggccatcttctatcggttcaagtcccaacgggcagattctcggctaccaatagatggaacgggtatctcggtctttgatctcaagaaggaaatcatcctgatcaacaacatgggagatggaaaagaattcgatctagggctgtatgaggtcggaactgaagaaggtatgtatacagatcgatcttgaaacttgccgaggaagaaggatgcttgtcatttcagtcttggggggacactttggttgattcgacgtatgtttgtgtatgttatggtgtgaacgattgaagaatacaaggacgacaattatgtccttcctcgatcgacgtctgtcattgtccgtcgattacctcctgctcgacccgggagaggaacagccgctatatacgttgcaggaacgaatgcagaggacgcgcgagcggccagagaagctaactctggtcgagcaggaagaggaggatttggaggtgggaggggtgggttcaacatggtcaacaagcaaaagcggtttgatggtcgggaggaaagccatctggtacgcgttcatttcaagcgtactgttctatgtggctatcttttgctcttaatctgaaagaaatgttttgttgggacgtgtatcaaagccaccgtcgatacctgctatcgctgccggtccttcggtaggaggagacgatgaagcagctaaaatcgccatgatgtttcaacacgaagccgaacaatggcaggcgactcaggaggatatgtcaaagtcagtagatgtagatccgaagcttgctgttataccatcattggctctttcgttatgatccgtgctaatgcgtattcatgatgtttcctcattcatgcttttgctttgacctgtaactgttgactatcgaatttcaaagtgcaacacctatctatactcctggtcgtggtggatacgccggtcgtggtggtagaggaggaggaaatcatacttcgcatcgtcaaatgaccgaaccggataaacctctaccaccgggctatatctgttatcgatgtggtcaacgaggtatgtctctatgctgtctagtcctcttgtcattgaccacagcgacgataaaggatccggaactttgtattgaactctttgtgtcatgtatctacctacaggacattggattcaaaattgtccaacgaatgacgacaaagaatttgacaaccgacctcggttcaaacgaacgacgggtatccctcgaagtttcctaaagacggtcgagggccctgtagcgaatgaaggagcgactccgaacggagtgatgatcacccctgaaggaggtttcgtcgtcgctcaacccgatctgtgagagttattctgatcgtcttgatcgtcttgcgcttgtagtatccatctgacggttttttgtgaaatttctcttcgccctttcatgcagggctacgtgggagaaacaacgagttgctaaaccaaagattgtgacagagtctgagatccgagaagacattccgtccgactcgacgttatcctgtccgatctgcagtaagctctttacgcaagctgtaaagacaccttgttgctcgacgacgttttgcgaggaatgtatccaggcccatctgttagagcaagatttcaaatgtcctcggtgttcagaacggataggtagtctggatgagttagaggatgatatggaggcgagggaaaaggtcagagagtatatcgagaaggagattgagagaagaagatttgaagattcaaaagaagacgaagacggagagatagatgtcggtttttcctttgatttttcttttcattttggaatagtctttgcttagctgatactgaattggtttcggtaatttttcgtttggttgaaacaagaacaacacaacacctggaccacaggcatcggcagacggatcaaaacccaacgccgaccaaaaaccgccgacagactctcaacaatcgaaaccacaaccgcaacagcagcaacaacaacaacaacagcagcaacagccttcgtttgaggatcaagttcctgacccagaagttctccaaagtcaactggcacaagtgcggcgaatgcagaaaagcccattccttcgtacgttctatctgttctctactctccaaactgggcaaaacctcatgacgtcgaccgctgttttcgcggcttgactgactttcgtctatctgtctgtctgcttttcgacataaatccagctccacaagcaaggttgaagctagaaggaacgctgcagaacttgaccgaacagctccacatgtcatgggcctggcacgccggtcttctgaatatgaacggcatgcaaccctcgctcgtgcttcccccgctctggaacggaagtaccgctggcggtgctgctgccgggctcgagggcaccaacggagggatcgacgagggactcccgaatgggcccggaccgaggtccgctggtccggccacggatgcgtccgacaggctttttgctaactcccgacggagaggcctcaagcggtcgtttgctgtcagctctggtgcgagctctggtgcgggtgggtaggtgtggtcgttgagggcgcatggtggggagggatataagaggcccgaggccctagacgtgagaccgctttgctccactctatattcaaaagaaataagtttatcaatgcatgggacaaatccgttcagtctcccttttgtttctgaggagaagtgaaaaaatgaaaatcatgaagataacccaaaacgaaagaatgaaagaatgaaagaaaccaactcctcttcccccggaccgtctttctacatggaaatcaagaagggaaaaaagggaaaagaaaaaaaaaactcgatggttgtgaaagagaaagaaggctaaacaagacaaggcgagttaagataaaacaaggtggagggttcactgtgttcaatttattttcggtctccgtcgtagaacaaacgaacggcaccgtatcggatgaagaacgcaagacaggaacctgcgatctggatgaggagaaagagtgagagagatgatgagcggttcaaatccatggagatctctacagttcgaaagtacaaaccgcccagaacggtgaaaggaaaagaggcaaacaaagaaaagtaaacaggaggaaacggacgaacctggagagcaacgatgatcaatgtgagcgtatcttccctcaccggtcctacatggatcaaaataaaactttttttttcccgcccgcgggccatcaggatcgatcatctaagaacgcaaggcattcaggcgcaaaaggaaagaaaaaaagaaggaagaaagaaagaaagagcgtgaacatactttaggatggtgagattcgtcgtactgactattcttcccttccccttcgtctctttgcctccatccgaggctctctgaagccggacgagtccgagaaaagcaaagacctccagacagaagaccgtgatccacctaggctctttcacgctcacttcgcttcctttgtcatcccgagatggttgggagacagtcggtgaggaaatcatggcgatggatggttcaaggagaccggtctcatggttgatccttcatgattcaacccgggaaggaaatcgtttattgtttagaggacagagaaaaaaaaaacgaaaagaaagagactcacttgggtagccgatgtctggggcatacaaccaagccaaacaactgcggacaactcaggataaagttgaatatctgggggatgaacagcaggagcaacgttttcgggtaatgggatataattgcgacgcaggcaaaggtcatgcctgtaaagtaacagaacgtgtcgccgacgaacgctcgagatgggtacctatgggcgaagaagggttgcctctccttcacgtcagcgttggaatttcttccccgtcggtcgctatggaaagaaaagcaagaagaaaaagatgatgatgaaacagaataaaatggaaaatccgacgaaccagttgtgataaagcaggccgacacagaccccaacgaggggtaacatgaagtacagactcaagagatgacgttcgaccataacctcgccgccgacggcgcccagaaggctgacaccgtggtgttcccacacgaggccgagcacgggcaggtcgatcctcgggaggggcacgtacaggcagtcgttcacgaccaccgagagcgcgatgatgagcggctgaatgacctcgaggccgttgataccggcgaggatgttgatgctgtttgtggcaaaggtcgagagcaatgacatgtacacgtagtagaacggaccgagctcgaccactttaccaaagatcgaccggaaacctttgggcatgacgatcgtggtgagccctccttgggcgtagtagaccaggaggagtgggacggaggcgacgatagggatcgggagtttgtgacgccatcggatgtcaaagatgtcatccaagaagcccaacagggtagccgttaggagtgagagcaacgccgagaggtatagcgagagctgttttaattttttattatcaattcagataccaagacaaaaccgaagcagagcacgtcaataccttttgagtaacctctggagaaaaggagaggagggcaggggacgaacttcctcgtgggggaacggtcctgtcttcaaagccccactctgcgatctgagggtgaatggaaaagggatgaacaggatcaagagcacgatatatattgatgcgattggtagacccatcgattccggtctgtttccgtttccgtccccacacacacatatgtacatcagtcaagcactgcctgaatgaaagaaagacagcaagcaaagaaagacaccaagagaaaagcaaggacatccgacgaacacttcatagctgttctttttcaagagatccctacccttcaaccctttcctcatgaacgcgccggccactctcggcacgaccaacacgcttccgacggccgcgaggatggcgaagcctacagaggcttccaatgcgggcaatgtatggtcgcctatactagcagttaaccctgcggctgtggtcgtccctgacccttcaacaagcccagtcgaagaaggagagagtagcagaggacgaaagatcaggcaaagcgagagcgggataaggatagtagggatgaacgtcgggatcggacgtcctggtagaccggttactttctgctccggttcaatcttctgtgtcgccgttggtatggcagtaggcgtgggagtgggtgctgtcaatgattcagccgacatctctactgttcgaacgagatgaagagacgccgagagagggagaatagctcgagggggttgaaagagtagcggtagcagcagcagcaaagaaagaaagagaaggagagagatggaagtgagactccaaaagtgctgaacagccttgacgcacgtgagtacacacgtgttatgtcacgtgcacggttcaacgccacagaccaaccggcccggacgcctggtttcgctctctttgttcacacgtgtgtgagcgcgctggcgttgggaaacatgagttggctttcgaaagaagggcatttcataacaatgcaccaagagaaaaagaacaggtggagggaaaagaataattctccacgatgtaaggatgctctgaaaggaagagcatgcagaaaggagaaaaaaaaagaggaaaaaaaaagagaggtgaagaaaaaggtgggagggtagaaagatatacaacgtggtcggacgagaaaatcatccgtacaaagatttggaaaactcgaaagagtcagaagagagaaggatgatgtaagggtagttagaaggccaaacggaaaggatatgaatgaaaattcaggtaaggttgaacaagcccagaaacgagatgaaaagacacgacttttgtgattcagaatccgggcaaaaagtttgaaacgaaaatttgaaggatattgtctactagagaagttggtggaaaacaaggaaagtaacaaaaagagagaaaggaggaaggagaagggaacgaaacaaaagaggaaaacaagccgaaagtagagagaaactttgatataggaaaaccacaagaaacagatgcaatctgttcaggccaggaagacatcctggtcgtcgcccaatccatcccagaggcaagtgttttgggtggccgattgtgcggatccgacggcaccgccgagcgagatgtttagtccgtaacccatgccgactctgacggcttctttgagctcacccattgaagggaatccggcaagaccagtggggaatgcctgttgttgttgttgttgttgttgttgttgttgctgctgctgctgtcgaccggtctgctggtggtggccgttctgagtaggctggggctgctgtcgctgttggaacgaagcaggagcgtattggcctcccaaggcggcaacgtgtctccagatgtcaaattcagactgagcggtagccggagggggataatataaaccggtcggaccaggtggaagagtgtaaggcttctgggactgagcatcttccgagttggcctggggaaaaacaaacgaggcaaacggagagctcgaggtgtttgctttctgctgggtggcagcgatgtttgccaacaggctagcggtgtacgggttttgagcgtggtgctgcaagctcgagaatccggccgccgagtcgttcgagactgatctcggtcgataggcctcgacttggtgtggaagctggttgtaaaagtaagggagttgctgctgctgctgtcgttgttgctgctcctgctcatgctggcgctgtcggttcaaatggttcaacaactgttcggctgcccaggaagacaccttgtcggtcgccccgatggcttcggtctgtagggcggcttggtgatctacggagaaccgagcggagccaccaggggaaagagagaccgaggagggggtgtgggcgtcgatctgggtaacggctgagggaaagaacgcgctctgaaggctggcagctctggaggaccggatggtaaactcgagctcgtctctgaaagtattagcggcggcggaggaagacaggttgggcaacgagttgacggtggcgggcgagataatggcttcaggggcagggtcactggaggcgatatcgtccaagagaccgatctcaggaaggtcgtgctcgtcatcgtcgtcgtcgccgaagccggcggaaaaggtgccaaaggtttcgtgctcgacctgtagacagagctcggtgtctttggataagccagaggagattctttctggcctgccttcctttcgcctggtctcgttcacctcgatgaggagttcgtcccgttcggcgaggagaagggtgagctgcctggcggcagtcagccggagttctcgctgggcggacagatgggcgatcgagctgttgacgatgaccgacttggatggcctgcggaccgaggcgagggagggaaggacccgggcgaggtcgagaaactttccgttgagggtctctcttcgctgtcgttcgatcgcgttgtgagtcgctcttcgctctgcagtgttgactcgctttctcgactttttctttgggccctggctgccattcgcgttggtcttcttggcggtggtagcagcggcaggagggatagtatactgatcgatgctatcgaactgagaggacggagtgatcggttggacgagcgacgagttggacgacgccggcgaggtttcagtaaagattgtcatgttctttttttttctcttcttgttatgtgctttcttggtcttggattatttctgtcttgtccgggaaaggggcgagtacgtgaggatttgtttcggatacttttctgtttttcttccgtcgaaccaggatagagtcaacggtggggggggggcaaagaagactgaagatttggcaagggagcaaggtaagacgacggcaaagatcacggaggacgtccgtctagatgagcggagagaagactgtcgggggatcagagaagagatggagagatgaagctgaaggagaactgaggggagataagacagagataaggtcgaagagatcggggttttttttttggtcagtatgattgagatggagagagcgagagagaagacgaagcgatctacacacgatagggttatgccgcgagagtgctctcagcttgcgataacttcctaaaaggggggggaagggatgggcggatgaaagatgaaggatcgagacgtgttgtttaggtgatgtctgtttggcggtagaatcgagaggagtgacctgtgtggatggagtgttccatgagaagcgacggagaaggagagagggaaatattgatcagcaggatgggaagatatgagaagagtaatcgaagagagacgtacgagagaaagagaaaggataagtccagtacgagggtcgcgagcgctatcagagattggaaacagccggatacggagccgagaggagaaagagtcagtcattgtgcggagaaggtatgagtgaacaagcaagtgagtgtgtgtcagtaggagttgggtggaacagagaacgagtggccagtggcaaaagggagatgtgcctgtttcgggtgagaaggtgaggcagcgaggcagaaccagagaaggcgggagcaagtgaataaggatgctctgtcgaccaatgggagaatgatgtgtgtgtgtatgtatgcgtgtgcgtgtgagcgtatacaggtataagtgtatgtgccaatgcgagtaaatgggatggatggatggatgattgatagcctcgatagggttgtgtggctgacgaaagagacccatcgagagaagacccaaccccgagagcgagagcaagaacgcaagcacgaccacgaccacaaccacaaccacaaccacaaccacaaccacaaccacaaccacaaccggaaacacttacaacaagcggtatcctctagtgtactgtctttggggggaggggagcgggaaaggagggaggacgaaagggaacggaacgagacgacagccagatagaagacagaagatagaaggaaggggaaagaaaagaagagaaaaggggaaagttggaaggaggaaagataaagaccggggggggatttcgccaggggaggacaggcacaggcacaagcccacaggctctcaggcacacaggcacaccagaaaagagaaaaaaaaatgtcacgcctcagggcaaccaaaggacgccccgtatagtgggtgtttgggcccggataggaagcgcggtcgagtgcgtctgtagggccaactgcctctgggcgtacaggcaatcttgctcactcttgctcttccgcccgctccgatagctacaatttggctctttcgttcggagcccagctgcgcgcgtcagcagccccggcttcgttcgtttggtcccgcccacccaccaacacacacacatatatcaatccatctaccggcacaggctcatccggcctagccggctcaactcgatccgatcggctttccgaccggtctcggccgagagtgtgatgaaaaggcggccagatgttatttgcaaatacccttcgagcgatagcccatttctcggcccttctggcgtgcttatcgagaggatatgtggcgtgaggttctcacgtgtctactcacgtgctttccaaacagtcatctcatatcttacgtaatcttctgtaaccctttcgtagccactctcccatgactgcaccgtaaccaagtcctcaccgcccgtctgttttcctcctcactctgtttctcactcccagcatcccagcatccgtccatcccagcatcgctcgctcgcttgctgccttgctttctctccctctctctctctcgcacacgcacactcacagcgctttccttctcccgctctctctgttggccatgcagcgaaagacatcaaattcaaggctgtcagcacagatactcaacccttcagctcactcccactctcacacgcattacatcgacacaaccggactaggaatctccaacgtcccagtttctccttcgggtgaggtccattcgaaatcaaaccatgcttctcaatcctcggctctcagtccgtcagcatctccgttctctccttcggatgaagagaaagagaacgatgggttcgatcctaatcctctctcacactctctctcccattcgcactcaatgtcacactcactctttcactcccaatctccgtcccaggacaacgcgttgaaagccaggccggcatcaaggcaccaacgaatgtcccactcacgctccagtccaagcgtctctctcaccgggtcaaccccgccgaccatttcatcccggtctccaaacccgtacagtcaacacacacccaccatcttttcgacccctccctccgtctccgaggccagcccagccgaatccttagactccgttcctcccctgctggccacgccaaagagctcgaatggctcgttcgtagagagcagacatgacaggatccattccagaaatctctccgtgttctttccccgtccgggcagacaaccaaaccagacggactctcagcatcaaacaccgaacctggatgatccggtgtcgctcattccttcctcggcttcgcctgtcccacccagtcccagagtcaccggtcgcagaggtcatcacgtccgtttctttcctcttccctctctctcttactctcttcctttccttgcctttcattgaccctcgccaattgccgtctttccaatgcgccattctctctcttgtcgttcccttcctaacttcgcctcgccttatctcaccttgcttcatctcgcctcgcttttccctcacaccagcataaacactcgctttcccacaactttttctccttcatggacccgatagagacaaatccggcaatagccgccgcatcccagtccagtccggtctccctcgacggaacgtccccgtcgtccttcccctcggccacgtcgaccccccggttcacttccgcaccgtccccgttgaacctatcgccgatcaccccaccagccaggtcaccgatcgcccagctcttggcccaaccgcccctcacccagctcatcgcgctctttgccctcctcgagtttgccctcggggccagtctttgggttgacggtcaggccggcggaagtctcgccgtcactggactcggttacctcgtcgtgtttgactcgttgggcgtcgccgggatcgtcgcgagtgagttgctcaacgggattggttctccgttgagcagtctttgtagtcctttcgggtcagtctttttttacgtcctggttttctctcagagccttctctcgagcttgttcttacttgccggcttctctctctctctttcttatcatccgtcccttccggccttttatagaaaccatcggctggaaccgttaatgttctttgtgcaagccatcttccttctcttctcgtcggtctacatctgcaaggaatccgtcgagcacgtcatgctcctcggacacgatcatcacgacgactacaatgagtcggtccctcttctttccctctaccccatgtctctgctttcgtctacttatacgtcttgttctccttttctcgtcagacttgtcctgccaaacacactgttactcctagccgttggcgccgccttgttctccgccctcttcttacaaaatcataccaaactcgtcgaaggtatatcttttcttttctttcactttcctttctccctcttctcagacagtgttactctcatgttgaccgccacgtgcttctgtcttgtccaatctactcatcgcaatacaatagccgtcggctcgacgatcactggcgctccaatcatcaaacgatcaacctacagaacgaccttgtttgacagagtattcaacctattgacaaatccgttctctggttgtgttctaatctgtactgccggtctcttgttcggcggcttgatcttgcccccgtacgttctccgtccctctttactcttatctctatgttcgtccttctgaactcgggttttgttccatccttatgcctataaacgttcttccgatcttccctttcaaagggattctctggccaacctggataaaacggtggctgtgttggagaccgtgctgacgttcgttgtttcataccccgcctcgatcgcgttcggcaaggtcctccttcaaacggcccctccagaacgttcggttcagatgatcgcgctcgacagatcattaagagaggtcgaaggccatccgttggtcgtccatctggcgcctcctcgcatttggagactggtccaccatcatgcctcttccgttctgccctcttccaaacagaccagccaagaatccacctctggctctggtctcaactccagctccagttccagaagaatcaactcatttagaccggccaactcggcgatcggcttgaacaccggagcgaacgccaacgcggcgatgtctgcttcggcctgtctgttgatcgtcaccttggtcgtccacgttagggacggagccacagattcagatattctcggttcgtctctttcccttctctgtaattcgcctccgcccttgatgttgcctcgctcgatagactgacagtgcaacctatacggccaagcagaggttacaaagttcgcttacgacaaatgcgcaacggcagtcggagcgccccgtttgggacggtccatacagcaatcaggcgagatcggtggagagggcgaactcacggtcgaggtcaggaagggaatgccgaagtggaccgatctatagaatcatcgttccgtctccctgggcgctttattctcttctttttctcttctttccttaatttggcagtttttcttcttctggaaacccgtcgttcttctggtctgggtcaggggcacgttccgagctggactcgaccaggtttcacttccggatagttcacacacaacaaaaaccttcttttcgtttctcatcatcgttcttgttgttatcatcgttgttgctgctgttgtcgttgtcgttgccatcttcgttaacataatcatcatcttcagcattgtctcatcatctcatcgtctcatcatctcatcgtctcatcatctcatcgtctcatcatctcatcgtctcatcatctcatcgtctcatcatctcatcgtcccatcatctcatcaccagcattcaggcttccatgctctctcgatcgatacacctcttgtgtagtctatactatctatcatgccatcgttatatcgtcgtttagaacttatcgagatgagaccttccagcactgtgtgcgccgtgtgtttgatcggcaactacttatcaaactcgggacacgtgcttaatggcctgccgtccggtcagtcaccttcccccccagcctcatccctccgatgatctcatgccctcctcccaacgtatcgcctcctcgttcaacctcttctcaaaatgctttaaccgaccgccactcctaacttttatttgtcttccttcttctccttctactccttcttctcttcctctcttgacctatcaaacgttttagctcttctcgatcggccacatacgatcgtataaatttgaatggaaagagcaccccaccctcgtcagtcggtcaggttactctcagtcttgctcgcatgctctctcttcaaccctacagcagcagttgtcttggcagtgaacgagacgacggtggaaccaaaggtgattagaggcatcaatctgggaggttggctcgtttccgaaccttggttcgtccagctttctttctatacattcttccgtatacacatacatacgcactctctttcggtgtgacccttccttgctttgtcctcctccctgcctcctttccctcgactctcctctttcttcttctttcggatcaaagggaagcaagtagagagagagagagagagagag

SEQ ID NO: 730 - DNA, 9278 bp, Xanthophyllomyces dendrorhous
gagagagagagagagagagagaggtaagaatggctaggtagccagttacagaaagcgctgacctgatgcccaaacctattcttaaactttaccggcttaggatcacaccatcaatatacacgaccaaacgaggcgtcgacacaccggtcgatgagtggtctttggtcgagacattagggaaggatactgcttggagtgtgttgagtgatcattggtcgttagtcttttccttccccttttctttttgaatcgcaagacaaagataacaattggacgacaagaagtacaaaaggtctgaagcgtccgttcacgatcgaatttctgatcagtcctctatcttggtgttctaccttgccctctcagatcgttctacaccaaagccgactttgaaaacatcaaggtccgtctgtcattaatcttcttgggttttcagcggtctaacctatctggtgatcccacgttgggtgtttcctctcgcgccgaaagatggccggtctgaatgcgctccggatcccattgggctactgggcggtcgacctactcgattcagagtcctacgtgtccggtcagttcccctatctcatcaacgccgttcagtgggcgggtgagcttgggttggacgtcatggtcgatctccatggcgcgcccggaagtcagaacggacaggataattcgggaaaacaaggtcggtcctcttgttacttggtgatgatagcgataggtgagggtggaggttgaacgtgtttaaatcctgctcgcatacaccatcacccctctcagggccggtcttgttcacggccaaccagacaaactacgaccggacgtacagagtgttgaagaacctgacggaagagtttgtcaaaccagagtatggtggcgtcgtcaaaggtttatctttttcttgtttcgtcttgactctaggcttgcgccgttcttcgattctcatctgtattctctcgtatcactcgctgaatgtaccacctccggtttacatacacaaaaacagtcatcgagattcttaacgagccccgtctacatgattacaaccagactacaaacacgacgttcagtatgtccgacctcaaggctttctacgccgccgcctcggacgtcattagatttggatccgacaacggcttgaccgttgctgttcatgacgctttctgggtaggatcctgcttttccttcctaaaaaagacagagagagaagcaaagaagagtgaacggaggctcgggcagaaacgctgatggatttgatttggcttccgctttgctcgttcgcttgcgatagggcccacaatactggaacaactatgatcccacgaacaaccagtcgtataccggctcaaacccttcctggcttcaaatcgacacggttagtcaattcatcgccggttagccggtggcagtcttgttcagtgaactaaacgctgatgtgattttcttcatttcttttctctttctattttccggcctggtagcatcaatactacgctttcgcgccttatgagaatctacctagagatgaaatcctgggtacgttcgatgagtttcaatccctctccgtgtcgtacacgcgcgaacaacggaaggctgaaatccttgacttatgtgcacatcgttgctctccgttttggaaataaaagatcgagtttgcaacatgtcgaagatcttcaaacagtccacaacgtccaccccaaggactgttgttggcgagtggtccctcgaaacaggttagattcagtcccctttttcctctttcctctctctctctttcacgtacacattcaaaaacggtacacccgacacggacattgacatcttacttcgattggcgggaatcgcttgtaccaaactcggccgataggcacgccaccgaacatctcgacatcgactgcgtcaccctcgagagcaaaacgaacttggctacggacgatatttgaagctcaactcgctgcttactcgcctagcagtatcgacaccggtagtaatggtaatagtagtagtgcagcggtggcttcctccactcaggccgtgatgggctggtatttctggtgttggaaaacggaatgtacgcttgtttccttctttttctcttttttttttttttctcaggtgggctctgacgttttctttattcgatttgattttactccctcctttcgtatttctccccttttctatattcctccccctgaaatacacacacacacacagacaacatagacacgtggtcatatcttaatgggatcaacaacggatacatcccatcaaatctatcggactcttcccagctcgtctttccgatcctcacgtccggtccgaacgcgggctgtataaatgcttcgacaggctggcaggctgctgccgaccccgaccctcagcctccttcttggggcggaggaagcggatcaggatggaacccttacaacggggcggccaggctggaacacgccggaaagtgtttgcagctggtcggactcgcagttggcttggtcggccttctcatctaacgcggtttgatccctctcctcgttcagaatgcgccgtgccgtcgtctccttggaatcttttgctttttttttcgcactcgtatctgcatcatctggaacgtttcttgctctgtttttgctctgcttttcttttcgatagatcaccaagtttcctaaggatctgtctgtctcatatagtatatatatttcgtggtgcctcatctaacttataacaattacattaatcttcttcttcttttcttttagagttcgacagaagaaaaggcacgggtcgtcattttatatcttaatcctttatatgtcatttctagcatcatctcgcccgaattcttgataagccatcaatattacaagcccagacggacaaatatacaaatccgagagcagcgaagaaggagatgacccattctctctctttctctctctttggtggaggaaaatacatgatgcgagtgaacgaggcgggacagaataggatagaacaagacagttcttggtaggtttaggaaagacatgtacggaagcaaaggaaaggaacgatgcgatatcgtcaacgttcacgctgcgaccatctgtctttcctctttctttcgctctgtttagaaaatcaaacgatatgaaataacacgtcaacatcaatcttgatcgaacgtttgaacttttgttttctccctctgctgggttacgacagtaaagggagaaaccgaagggcactgacctggttctggtgatgtgcgttcgagttcttcggcctcgttgaccacaggttcggtcgtcggcacttgcggaagctccacatccggtacagcctgatgcggataagatcgacaccatgcgagcgagagagcgaagcagatccaggtttcatatcacgtcgcatcatttcagcgatcatctgattagcacaagcccaaagaagacgaagtagagaaagaaatagaagaaacggacagggactcgagtttgctcttgttgatcaatcagcgcgttgagttcgttctggaccgcctcttcttcgtcgaccgacatctttgattggagagcttggtcgatttcctgtattcgttcaccgaacccaaccccaagaacgctcaattcgtcacgcatacgcatgtctgacagttgatgagagcaaacgcagagtcaaactcggaggcgggacgtacgcgttgataagatacggcttcttccgtctcgcccatcagtttctcgaccttctccaacgtcatctccgagtggatctctttgagaacctggttcccctgtttgaggccttcaaacactgatttctcgacgagcgagaactcaattgaagagaccttcaacagagaatcccgagagttcagatgatagtccaacccaagtaaagactcataggagttcgcgatagagatggaaaaggttgacgtacaagagactgaagagtctcgagttgagtgtctgtccgaaggagcagctgttgttgatactttctttgtcgtagcgccgtcaaggctcggctctgccgttatgtatccatacatccatcattgtcgtaggattgatgaggacaaagagcgttcaccttgtcagttctttcatggttgctccaagaagatagatatgtctgccgtaccttgttaccagcctccaaagcctccttggcaatctcctcctcccgtttcagtacatactctatctgtatcatccaaggcaacatgcattggcgacgatcacacacacggaaagcccactagaacagattccaaccgacctttttctggtactgcttcagcttgtctctctgcagtttcaaactgttattttccgtaaatcagtcccctctgaagctcttcttactcgcaaaagacagaacggacgtactcaagaaccgctctgtcctgagatgtgatcttgacggtactctgttgtgctcccatggctgcttgcaagtctatgtcgatgccttcaaggtctcgttctcatcttatctctttctctctctctctggttggcttcaacaccatgagactaaccaagttcccaaccctaaccaaagcggttactaccttttcttagaggtgaacccaacacgacacagtctagcctataggaggatgagaaagagagctcctagatcctagtaggctggaagccgagaggacagtctgtttgggtgtgcgatttgcgagagacagacagacagataggtcaacgcaggaagaagactgtgtgagaggtgaagctgtacgagacgctggccagcatgtttcctcgtagtacgacatcatcgacatttcatagtagaacctccttctcgtttctgcttgttgcagcctgatctgatgctcggttgatcaaaggaaactcggtaaagttgatagaaaaatcaacctaagcacccatcagtctatcagatagatcacccaggaggctcagcgaaagaaagaaagcccgtccatccttcctaccagacgttgtggccgacctgagaggtgcaacgacggagtgtgaaaggctgatgtaacgagcaagagtcacgaccagccactataaattcgttcagttggctttcgtctcttgttggcttctctcttttccctcaaattgtacttcgtctacggacggaaaccctcaagcttattgtctccatcccctgcgtaccagatttcggaacaaatctctacaggcttggacctatccgctttgagagactttacaagctctcctgtgaaagggagagccctcaacgctctcgtcgtacccctcgataacctttttaaagaggggcatgagatatagcgatgggaaattcctttcttctgtgttcatctttttaactactgtatctgcctatggatcaatgtttttctatcgctgtttgcatcgaaagagctgtttgcagaaatcgtcgaggtcgttgggctgatttgtttgctactcttcacgtaccgtcgtcggtaacgacgatttccgatacccaaccttaaatcattccattcacaaagcaactaccaccagacccacctcgctctcttctttgtccaacagtcccttctcgctcgcgttcgatgccttcagtccagccaccaactctctcagacccttcattttctctctgtcgttccctagacccgaccagatgagttcagtaaagccgcgaggggtcattactctgatgtccttcaagtcggatggagtgatcgatgacgtttgaaggaatgaaggtggtggtgggtctgttggaagcggatgctcatcgtcgtcatcttcctcagaatcgtcttcttcttctccatcatcatcatcatcatggctgtttgtgttatcctccttaccctgatccgcaagacgtctgcgcgacagagaagaccaaagggcaggtggtggcttgacagagggaattgaactgaatgggaagtaccctctaggataaagttcgaggtagggcgtgaccttgttcagaggatgatattcgttggttccctatcccatttccaagggcaaaatgcgacagtgacgtaaatcaatctctccggtatatccaaggggtcaaagttcacaccgatttgtcagaacgaaagatgacgtacaggatcgagcagttccgagggttgatactctcctttgtacctcatctgaagatatatcaagatagatcccgagaataccatcatgaccctttggctcagctgaaatcctctcaacatgcgtttctagaggagagaaagaagcagaccttttgacatgagtgaatgtaatatcctgtttgtatcgacgacacgtacacgatgatgtcaacgtcgtttcctcttcacttgcagtcgaaatatcttgaaatgaactaaccaaagtactgatacttcatgctctcgatcccagccgccttcatttcttccactaacgaaatctctctcagagcactgatctgttcgaacgatcaagaggaaagacgagaagttagcctgtatcagaatcttgatatataaggatgcaagaaaccacacaatagcagacgtaccttgccccagttcatcgatcccaacttgggagttgggtcatagcaaaagtaactaccctcatcgaagatcacagttcatccacaggagtgatcaacccaatgatttcaatgacccaatgtaagaaaaatacttacacgctggaaactcctgtgggtacgatatctagtactgcgaacgccacgacctcttcgtctatctactttgacgcgcgcgtacgccctcactgtcagctctggctccatcgaacagacagtgacgattgaagtgaacgataacaaacctcataaagcatgtgccaagttccccatctattcggtaatccgttcgacttcaacttgtcctttccagaagcatatcgaatcggttctcctgagaggggagagacacataagaaccgggagaacgctccaaattcaagagaactagagtcgggttccgtccggtgaatcttttgttgatatctcacgaacagcggatgtacagcctggtgaggtgggtcagatgagtgaagagacacctttggtgtgtcgagtattcagaaagaatcggtcgtcagcacgtctaacgtagaattttatacagtcaaactgtcagagcgttatcgaagatcaccttgaatctatgtacaggatccttcgctactggtttgagcttctggaacagcgccgatttatccttgcggttgggaagatcgttcgaaggtgtacgacgggcctgatcagctctgtcttccggtagatgtaccatttctgacagagaaaacgggacattgtttcggcctttgcatggttttcggccggacggaagaagcggatgaggtctgtgaacaacaagactgaatcagctacagtttggtctcacaggatggaaactgccgagagagcacactgactgtccggcaccaacttcctcagcaccggtcaagatgaaccgattaaatttgtgaagaactcgtctctgtcgcttgcccggattaaaccgcccagcttccaatctggtttgagcacagatataggacgagtcaatactaatatctgatcataatttggataaggcgagggtgcaaatcaaaatgacctgatagtatattgaggacaacatgtacgtgccatgtctgggctgttcgttcgataaaatggaacacatcggcatatgaagaaaaaaagtcaagccaacctgaaaaggcaattcaacttactggtacacatattgtccggactgtagaatcaggtggatgggtcagttattaacagcttggagatggatacgaagcggacgaagaacaaatacccttctccagccttggttgatcaatctattgagtcgaggtcaataaagatggacaccattagctgacaatacctaagatgaacataacacacgatagccttacagatcgtatgcttcgacactcatctgatgagccctgcacagaacaacgagaacctaaccggtcaacgagtctattgcttcttctgcagatgattgacgagcaaaaccttaccagagcccataactggcactctctttcctttcacctatacctcgctctttctgagcacgcttctcttctactgtagagcagtatccacatgatgagtttgagtagccgatgggcgaaacgagcgtaggctgaggcatccgaatgaacgatcgaacaaagatggtcgggaagaaggagatggccgaaacgatcttcatccaaacgaccacatcctttccttctctttcctttctctactttcattgtttctttgccattgcatcaaatgtcagagcttgtctcaagcagatcagccagatcgtactccatctcgggaggttcaacttttcccgaagaacgtccctcagatcccacgctcccgtcaaagccgcctgagctgactctcgaagaggaagctgatgatgacgacaacaatgtcgacaatcaaccaccgccaacagtccaaccggctctctccagtccaagatttgtgcccccgaaattattcgttccatccgaatctgatagagaatccaagtcacgggatagttccaggccgacgagtccgccgaggaaagaatcagtggtcccaaactcatctttgagaatccctcaactctgttcccctggactgtttgcacccttaccttctgttcgttctcattgccctctatttgcttgtgatacttcctctgctcacgaatggttcatcggatattgactgtccttctacttcttagatcgatccgctctccagtctattgacgaaatacatcccttcaagtcaacgaccatatagagatatcgaaggtcgttacgaaggagtcgagatcactcagctcgttaaggcaggtagctggagagcactggcaagactagcgagggatgtgacagtctccaccgaccctgaaaacgttgacttaatcttcgaagttcgttcataatgcttgttttaccattcctttcttgttcaggtcgaagcatcgatttacttacttgtttgtctgtccgtctgattgtctgtatgacttactccccggcgtttcagatgcaccatcttcgacaactctcactcctttctctacatcttcactctcaacacgtccatgaacttcatctactctttgccgcgcttgcccaccttcctcctggagtacgcgcccgactctctgttcctttctcgcttgaattgatgtttgcaaagaagaggggattgggcgagcttacaagattattggccaggtgtagatcgggagcacagtcaagcggggcggaaagcgg

SEQ ID NO: 731 - DNA, 12755 bp, Xanthophyllomyces dendrorhous
agcaggcgctttgattgaggctggggtcagtcgaaccctcaattctgatattttgcacatcctgagcatgaacttattggtagtagtctttcatatgtaccgacggttttcctcaggacctcaactcggccataactcttctccttcctctgacttcaccttctcagactcctccaatctatctgttgggtgctttgctcagattgcagctcgctataggaaaccttccttccgcaaagagaacaatggatcagatcgagagccgagaagatggagaggagagggagaagaaggaggcgagagctatttgggaggtgggaaacaggaattgggaaggcgcagaaaagacgttggcggaagcggaaggcggggttgtacgtcgtttcttctctctctactaggagaacagagtaagtgcggtcgtttgaacctaacaagctctttttgttcttcaccgaatcaaacacgcaggccgccaacgcgcggtctatcgtgcatttattccaaaatcggcctgaagaggtatgctcatattcatctagcttcttattcacgaccgagacattggcagatcactcttcacgttgctaaaatctcttttcttccgatacaggcaatcgagacgcttgaaagagctattgagctcaacccgagtgaagctctggtcgagcctctgatcttcaaccttgttcgtccctattctttcttctgtgttcacatcaattctttctgtagacatggtattaacagtcaaaatacgttcgttcgcggtctctggttacaatcgtcctcctggatatataggcgacattatatgaattgaggtttgactcagaaattgcttcgaagaagaaagtcgagctgctgatcaaaacgactaagtttgcaagcgatggtcttaaggttcgttcaaatgtccaatcggtcctatacaaactgttttcgaagtaacgatctgatgattccatttcgtgtatgatgttttcgggttgtgtgcgcgtgcacgaatgcgtttgtgaccggaccccagccggcatgtctgaagctttcataaaaaatttctgatttatatatatagcttcgtccccacatagagtgagaaataatatgtgaatccctttcccctcaaagtaaactccttagattgatcaggggtccttctcaaggatctccttcactcgagcgactttcccaaggtttccctgtccaggagcaatctgcttatcagttcgggtaccgattcggatgtcagtggcaatccggggagttcccatcttataatttcatttgttttatcattttaaaaaaaaaggaaaaaaaaagaagaaggatgcgttaatgatactcagaagattcaaagaatgtaaagttgatagtacgaaggaacaaaccttgtgcacagcttgatggcattccccctgtacaacggaattatgatcggcggatccaaggatcatcaatgaccacaaagagtcttatcgaaatgaaggtaaaaaaaatcaaggcgagacgaacgataacggccatgacctgactccaaggaccttcaacgtttgtcccgtaccctccaatctgatcgataaatcagcccaaatagccaaagagaaacccgagaacacgaacgacgtttaagatcaagaagttatacatatcagtagcttactttcaagtctgaagtagaaggcctcacaagcagaagatgaatgataatcagtgaggacagacctggtacgtcaaccccgacttcttcaagatcctctggcattctgcaatctgaggtccaacctatcattgcgtcaataccggcgagtccatagcgtaataaacacaggtcagtcagtcagatatttagagaaaacagtgaccagatacgagagacaagaggaaggaggatcacgaaatcgcaaggaataaaaactcacagaaggagtatctagacccatagggatcaagcagactatatcgtccgagaacgatcacccacccgcaaccatcatcagattcgagaagaatcggatagacaaatcaaagaatcagccaatcgaaagtaaatacgttcataatgagagaaggataattcttttacaatctattctcatcgacgaacgaaagcgatgtaaatcccgagaggaatgagcgaacgagaagggcgacagtcaacatcaagatctttgggatgtttacggaagagtaaatatgcagagtagagagacagacctgctacagcatagagctcagtaggagcgctctggtcttcttgagttgatgacattattaacaagatggagaagtgaattgatgaaggatgacgacgagtaagaggagtgttgagaaacgcaagaaagatgaagaaatacaaaccaacttttcggccttgtgcgctttcaccttcttctccttcccctcaacttcgaaatgctctcaacgaacacgatgttgcgaccattactctcttatcaaacaaaacgcctggcttcgaatccttgccaatctgtacatcatagaacgttttacccatcgtttgtcggatacaagaagaagggaaggataagtgagagcttctcaaatcaaacagcttgccgcttcatcaacagagctcctcatgttctaacggtgtctcgagtcgatcttccttaccctttcttccatgttataccttttctcattcaagcttcgtagatttaagcgactatgatgatctagagtatcgtctcaacccatcgacaccgcctttctcatcgtcaacgtcgcttactgagattggtccatccttcgagttggaacatctggtcgagcccaaaggtggaaagcgggaacaatcagacggactatctatagcccaaagagaacgtcaagaaagcttgccaacatctacgaagaaactcaataggctacttggaagtcaaaaggtgggcaagttcgagcttaaggaaacagaattgagggaaaagtttgtaagaggtaagggttctagatttgtacatcatccgagctcttcatcctcttgagccaggtgaaaagtgctaatcatcttctgcattgggctgaattatcccattctaggttcaggaaatggaggtatgtgtttctctcaagtatcttctttgtcactgccgatgataccattgagtgtcctttccttaaccgcccactgctatattgataggccaggcaatcaacaagctctcaacctgtgtcgaccttatgcatatcccaactgggttaagagtccaagctcaaccgaccagatcgttgcagaccaaccgagagattgctcgaaagctgatggctgaaaaggtgcgctcttatcctttgcttcaagttggggtttgcctattaatcaagtcacttctacctatttacagcttgcgacaatggacaaagagtccagcctaccttcgagagctgaaattcttactgcaaaacggaagctgaagaaaacgcgtgcagttcgacgatcaaagaagaagtacgcttttgaggatcgagacgaagagagtacacaaggtttggtcgagggaacccaagagacaagggcagaaagtgaggaagaagtcgacaatcatgggacgactggacgaaatgagggcgagagcgtaaaagggtgaattttgttgacgagaaaaacagggatctatgatttttttgaagacgcaagccaacttggactgtaggaaaaatgtttatatagccttgtacaggaaaaaagagacttgccgaaaaagaaaatgaagcataggactagcctcttccccctccagattgaaggaagaactaaggaagccttccttaactcgatgcatcagcaggggtggaagaagcagccgctcgacgacgccgattcgggaatggacccgccgtttttgcccgttctacagactccttggagagctttgccttccttatcgaatcgttgtccgccaactgctcgtcagagatccgaaggtctgtagggtttgacatgggcatcaggtgtcaaaatacttttacaacacagagaaattagtcttaaggagcataacgaaaggacatactgaacgttccgtcccctgcatcctcaccctggacgacatgtttcctcaacagatctccaacctcgcgcgtcattgtgattcgctcctggtactttgccagatcagtctcgagtctgtgttgagtgtattcctgtcggagtttcgcatgggccgtggaaagcgcgtggttgtcacctaagttatagattgtatgcaaaggcataaacgtggacatgagtgacagtttagacagacacctcagacaaaacacagaagccaaacttgtttaaacagacaacaacgaaccggcaaagacctgacgggcagatcggaggacatgtctgtaggctgatcgagcggtctgctgaagctgaggcgtgatgacagacatgatgaggatgggtatatgctatctgagtgggtggaagacggaaacgaggataaaagtccggacggagtcaagatggaaaaaaatgattagaaatatttctatattctttcgaaaaacgaatagaaagttttgtattgcaatcggttcatcagctacatggtcggttgatcctttcggctcagtgctagccgagtcatccacacgttcttcaaggagatggagaccatggttgttgccacacatccatctatccatctgttcatacacgaccacccgtttatctgttgtcttgaggtagttataacttgagaagagcacattcaatggcagaaccaatggatgtagattctggtccaccgtctgccattccttcctcaccgcccgacattccttcaccaccgtccatatctcctttgagaatgtctataatgggccacaacgtttacattgattcgggtatgcatctactttggtcttgctcgctctccacagctatggtcaaaatccttaattctcactagcgaaatatttcggacatcaatctgataatcagcgggcaggtatcatcacgaaccaggcgaggaacaacgccgacaatttcaacaaatgtggagggatttagataagcaggcggcagaaccggatgtagttcgaaaacgagaaatcctcaagatcacacaaagctatgatttccaacaagtccaggcgaaggtcaaagcaaagttgatcaaagtttgtatctctcgtatagttcctctcgttctactctcggtcgagactctcaggctcttatctccatcgcccatcattgattttaatgtttgttcgttgcatttttagttggggtttcttcaggaagcggttgaactcgctgtcaatgcagtcaaccggaatgaacataccttttctttcacagaagacgatgttctcgaagaagctttagacatactacaaccgaaccaatgggacatgtagtcagtttctgacttatggtccctctccccaggtcggaactttatctctcacctgttcggctgcttcggctgctcaaccaatttcctaaattcaagacatctacttgcacttgaacgaacagccggattgctctaagcgcagaatatacacgccactttgttttgcgctattcattgtccatatcatattgtacatggtccagcatatgccgacttggcctgatttgaacaaagaggtttatactctcaactcatagctatagtatttatctggctttactcattcgtactctctcctgttgtgtatatagaatcgaggtcgagtgaaagtgttttatatcagatagaagttgtatactccggatgtcccagatgtaatatggcttttatatatcaaactggaaaaggaataggcggatcttaagttctatccagagacaccatcctaaaccctagtgttgaaattaagccagtggatactgatccaagttcaacggatcaatccaacccaatcaatgtactcccctctcttgatccagaagggaagactgagaatgagaagcaacatctgtatgattcgtatatagccagaccggccagggaacgaaaggaggaaggttacgcctctgtaaccaccaagttcagttctctcaacccagcacgcattttttttcttttcctttacaacaccaagagactctatcgatcgttcatcatcagtcgatctcccttccgttcttctcttttcctctttgacacaggcgtacgtgcacatcatgaacgacgaagagctttctaccctccctcagttggccgtcccgtccaacttggacgactcctccgcctctcaggcccctgtcggttcttcctctgtgccagaggatgtcgcaaagttcatcgtcaagttccatcaggccctcaaggagaaggatcttcctacgttgaccgctgcttatgagcgagggtggaacgcattaactcagcagcactactcccagagcgagtggccgagtgaggaggccgtcgcttccttggtggacaacggttcgtgcttttcttaatttttttttcctttcttgggttttgtcttctcgctgctttcattaagaaagaagagaaaagaagaggaattctttgccgagcaatcttgaaagggaaacaaacactgattgaccatctgattttcgtgttctcttgtgtctttacagaccagattttcttgaccctttaccgagagctctcctaccgacatatctatgctcgacttcgacctaacatcgacgaccgattccactcttacgagacttcttgcgagcttttcaacttcctcctcaactctgatgggcctgttgatcttgagcttcctggacagtgggtgtgggacttgttggacgagttcatctggcagttccagagctttggacagtacagaggtgactttaagggaaagggtgaagaggaaatcgcgatcttggctgaaggaaaccaggtctggtcgtgctactcggtgttgaacgttctctactcgctcattcagaagagtaacattcgggagcagctcattgctgaggccaatggagcttcgcctgaagaggtcgcgtaagtcttgagttttgtcttttccactcttcgcgctctcttgttatctcagcagacagcgccggatgcaagcgtcaaaagagaatggataagaagatgaaaggaaactgagaatcttctcggtcgttttgcgttcgtgcttgtttgtttattcttgacggtgactagtcaaatcgctggagagtatggttcaaagcctctctaccgaaacctcggttactttagtatcatctgccttcttcgagtgcatgtcttgcttggagatttcacccgttcgttcatcccttttccgtgtgggtagtcatcaagagccaaccattaactctctgcatttttgtcgtcttgacccatccgcattgttgtccagtcgctctcaaggtgatggaccctatccccttgacccgaaaggccgacttcaccaaggtcactgcctgccacgtgtaagtgttccaagtgttccaagtgttccaagtgttgtgtgtgtatccagcctggtattaactttcttgttcttctttctgccatgttcctacatcctttataagcgccgtgtactactacgttggattcgcctacctttctttgggcaggtatgctgacgctgccgctacgtttgtgagcattctccgatacttctccaggatgcagcagttccacaccaggagctatcagtatggtcaggtcagtagagcaatcattcttttatcttgcgcttcttcttgcatctcttttgctccatcacttgtattcattgcgtgtgtctttggcctatatttatatatgtacaaatcaacagatcagcaagacgtgcgaccgaatgtacgccttgttggccatctgcaccactctcgcccccgggcctgtggaggatgctaccggtattttgcagaccatgaaggagcagcttggcgacaagctcaccgagctctctcgagggtaagtttcatatcctttttttttcgttgcatgtgaactatatctgacgaccagccggaggtttgtttctcttttaataactgatcagctccatcccgacgtactctgagctctacttgaactcctgccccaaatttatctcggccaacccgccgccttacgacgatgccgcgctctacgcactctacacttcatcccctcctgtggaagctccgaaccgacatctgtcgatcttcttggccgatgtcgagtcgctggtttctgttccgacgactcgatcgcttctcaagttgtacacctcgatcgatgccggcaagctcggtgggctgacggatgaggacgatgagagtgtgttggtttcgctcatggtcgccaagtgggctggcagggctatcagatggtcagaaggtgatgccggtcttttggatggaaagcgaggtgtcagccataacttggacttttacgtcgataacgttagtttccgttttctcttccgtttctgttcatcttttctcttcttttttcgatcaagcggctcaagatgttgtgttctgatgacgactgcgttcctgtttccttcaaacgcactcttgactcacaacagggtatgatccaagtggccgagacgacagagtctcgtcgtttcgcgactcacttcatccgcaaggccgaggctgcccaacgagttcacgaatctattcgatctgctcctttgccaatcacgaagcctggaagtgctcagtcgtcgacagctgctgccgctggtggggctggaacgtctaccggacaggctggttcgaaaggtggtgtgaacggacagggaggtgcgaagggaccgaggaagacggtcgcctggggagcggctaggtcgtaaggctatgtgtgtgtgtgtgtgtgtgtgtgtgtgtgtgacaaagtagagtagtcgtcttttatgtttccctctcttgatgaaaatcctctttctatatgaaccgtacaataaggaattccttacaaatgatataaactagagaatacggacgagaagtagagaaaaagaaaaagggttaaacttctagttctatctacttcgggtactcctaccttgtactcttatgatattgaacgaaagcgtgagatgaaaacaagtctaggagaaagaaaagaaaagaaaagaaaagaaaaaaaaacaacaacacaaggacgataaggaagaaaagtgaaaatcaaaacatctctatcgaacttggctgcggtgacagaaagaacaagcttcgaaagatctcgacgtctcggtgtcagtgaaggagggacggaaccaagtggaggcaagcctctatccattcgttcgcctctgatgggatgatgatctcccgtggacgttgaacgttcgttaaacccatgatcagaccggtgatcgaccaagcctaaccaacctttcttttctctccgtccgcaacgctacgccccgaacgagccgcacataaccgatttcttgtttttcttcttcttttgtttctttctccttccgccctggctttcgccttcgggactgcaagccaggttcggggatcggactctgaagggagttgtttggcaatgctagattcggaagtgatccggactgtgaacagaaagttagaccgatcatgcagataagacttgtgtgttagtctaacggaaaccgttgatgagaaggataccatggtattggacgagtctagatcaagcgcgacagtgtctccgtgctcgatcttcctggtctctctttcttatagtttggagttcatcctatggggtctttgttttctattctagtgtgacggatatgcatatatgcgttcatatagaactttgtgttccaagttccgaccgactcgaagcgaacggaagaatcctgtttctcttctagctttgagagggaacagagttgaatcctcctatcaacggactacgcgaagatgagaagcaacagagagtaacgcgcgtgttcgcttgtcgcttgtagcgagatcgaatgtcgcgtgggcacgtcttccttgctcgaccgacgcggatccttttgacatctgcctctctctagatgagagactttcactcccaacaacaaacccatggaaacccacacgcacacgtccagggagaaaggaacgataatcagacgcaagaaaggatttcgactaaaagcaagctgaaaaagacaacggagagcgaaacatttagtcggtgatttcaccgtatccagaccctttgtattcgttcttgctgcggttcagggcggacaggcgtctggagagaagaaggttaaaagtgacgcccagtgggctgtcgttgtgagcatgaagatccacgcgcgtcacgcgttcggacgcgtcattggatttatccatctctcaacctgtctttctattttttgcttgattctctcgtttcaatctcagtcccatgtgtctgtctgcttgatgggttgtatgcgatgatgtgcatggttgatcggcgtccaagttgctggacgatgcagccgacatgatgtatcaacaagaaggaagcgagatggaaagatacaaagaagagaaagaggaagagaaagagagagagggagagagagaaagagaaatgatctttgcttggcgtgatttgccggagacgaacagttccaatagccggtggcggatagcagagagatagagagagaagaaaaaaatacacagcagacaagagacaagacagagtcaacggtatggtggaggctgcttaacttgttgaaagaagaaagcgtatttgtccgttgtgcagcgcggagaagagaaaagagagcgaggattgctttaaaggaaaagaaagaaagaaagaaagaaagaaatcagtcgcgtctcctcacacgctctgtgctcttgtctcttgttctctcttcttctttgccgcctcatcatctctttcctcgccaatcgaccgagacgtctggtgttcttccaaagtgattagaacaggttggtccgaacggaagaattacgagaacagagcattcaaggaagagaaaacccaagaagaacagagctagaaagaaagaacgaaagaaagcgttgtgtaacgtccgtctacgcagcaaatctagctggtctgttctctttgaaggtttccgtgttgatccatccgttctccttcttaccttcatcccagctttctttttttttccttcgtgtcttcgtccatccaaccatccatcactcgttctctcttggtttctttgggtgttgatacgatacagaatccgtgtagctccatcgttcattcgttctcagtctgggaaagggtaggagaataggaaaaaaagaagaaccaagatagccaggctttaccaccttcaccttgttttaacactcccagctttcctccaaagcttaacccagagattcggtcgaatctcccttttgtccagttcgttgtctgtttcttttcttctcttcttttctcttctctttgtctcctcgttctcttctatccatgcatgcatttgattaaatcaaccctgttctctccttggaatccatccggacaaatagacaaagagagggaaaatctccctccccttccgaaggtcatcccgtcgtaaccgtcgtccgtttttggttcgttcggtttagatgtgatttaccttgactttccaattttctccttctgttacctcaacaaactaaacctttcgtcttctgtttcattttgcccacctttctctcatcgttagctctcctgtagagacagacagactctcacactctcacaatcacacacccacacaatcgcacactccctcagatgacagacgtttacggatcatcatctcctcttcacttcatcggaggtggcctccatgcccatgcccatgcccatcctcacacttcacaacccacagctctcgactttagtcctgttccgtcgtctccgttcactccaggagacgaagtccctccggacgacgtcgacgtctcttttgcctcgagcttgaatttcaaccagagatcacaacactacggttcccctgggattcccctggccatgtcttctcccagaacaggctactttccgtccatcggtccgtcgagctcgactccttccggcccgtcgactaacttgtcatccggagagatctccatgaacccttcgcctctggctgttcgagcggccaggtccctgtctgcctcgacctcatcctcaccctcatcttcatcgttgtcatcgtccctgccgacagctcagccaggttctgctcatcatccttcttcaacactgttcatcccggctcacacgctctttaccgaaccgttcagagtgccctctcatccgcctcctccgcctccgccatcgtcgtctccatcgtcgtctccatcgtcgttcctctcaacctcgccccgttctaccggttcctcgccaggaaggaagagatcgtccatctcaggcaatcagtacagccgattcggtcgggacctcgtcaaccagccggacggaccgtcttcgccttcgtcctcaaagccggaatcttccagatcaaaaagaggatgtttcgcagtcgattcgacccacgactttctggcacctcctacccctcttcgttcgaaggtatgcttcctttccttgttctctcttggtgtctccttcctactccatcgagacaacctgctcacaagaccttgcctttgatctcgccctttcccagtctgaatcggcgtttgtaccaaacttgacgtccccactcaacatgtaccggccggacgacagtttcttgatggatgttgattcgccctcgctatcgttcggaacaaccgatcgatctcaaagccgtcgatcctcctcctcgctcat

SEQ ID NO: 732 - DNA, 14194 bp, Xanthophyllomyces dendrorhous
cccccccccctctctctttttcgtctttcttcttcccgtgtgtctgtctctcctaccaagaaaccctcttactcacaattctcatccgcttatctcaatagtgcaaagattctgagaaaaaaggatcgagcggccaacactaggttgtatcctgcgttacactaccccgaggtgtacatcctcgaaggcggttacaagtgtttcttcgagacccatcctgtttgtcctgtttctcttggtcgatctctgtctgtagtgttctttccaatgactaaatccgcttgtcgatttacatctctttctagacggactgtaatcctcaagcctatgtcaagatggacgacccaaagttcctcgctaaacggtcgactgacgtccaagccatgcgtaaattccatcgagccctctcctggcaaggctcgattccctcccactcccatgcccatcaggcaagtttacccaccctccaaataaaacctaatccctcaggaatcactcctttggcgtttgccgctgcttctgcagctcaagacgccagacggtcgatttctcaagtcggattttcctccaactcctctttggcaacaaagccaggtggtctgatcaaggaggatgactcggatagctcttttgataactctttcgaaggactgggcaccctgggtttcaccattggtgataaacctaggggaaaacgctcaggcggcttgtttgctacggcagctagcaatgccagtctaggagtaaagccaggcggacaggctcagggaaaacagagttcgttgaagttgaagcctagaatcccgatggatagggcttcatcctctcctttcctaacgttgggtgccggaaggtcgaagaacaagttctagtcactcctgtcttccctttctctctttccttctttgctcgctttctttcatcgttcttcattttgggatggcactactccttttctccttcctctctttttcttcttctttgtttataccatcaacgcacttatacatacctcagaacacaatcagtttgatcagattcctgatctatttgttcaaatcctgccgatttccttccttcaacatcctttcgggtgaattccagaccctacaactcatcatcatattcacttttcatcccaaatgcataacctcctcctccaaattttcaatccattgcaacgcgcattttttccgaattctttttctcttccttacattcttttgaagctaccttgttatatccttgctcctgttgtggcctttgctcttcacctctttcttctctttcttttcccccttttgaaagagaggcttgggtcgatagacgtcatgcgtacatatttatccgctattccatttctgacattttccttgccatatttcttcttcttcttctcatccttcctttccatgtaacgatcaaagatatccattcgcactgagagttgccgtccgttcgttcgttcgttcgttcgttcgctcgtttgttcgctgccctaccctacatactccccttatcgcttttgttcctttcgccctattctttactttcttttctttgacaaacgacctttcatgtcccacattcctttaaattcaccgttcatcgtctttttactattcttatccttctttctttctcacatcgtctgtccattggacacttcattctttcgtccttcccttacgaattcaacctaccgtatatatctttcttccttcccccccccttcttttcttttctttcatcctttccatacaagatcatgctctatcctcgtcttttcttttcgtgaagatcaactcgacctcccatccttttgtccttgagtcggcgcacatcttgaggttcagtaaacgtctacaccgaggcacggagagaattgacacatatatctatgagaacacgctagacgacgtccatgtcgtcctcacctgcgctctcatcacttcccccgaacaaatcttcttcctcgtcttcctcatcttcatcttcaccctctgcgtctctaccgatatcgccatcgcgaacatcgcgatcacgatcgccgtcgccatcggtactactcgaggcatccagaccggcagccatgagcgcctcgagatccgtcatctggacatccccatccattcgtcctggatccccttggttctcgagacccgtcctatcgtccggaagggccgaggttcctagcgacgatgggatgtatgtcgtcttttgttgggccatctgaccgttcgaggcgaaggatgacaaagaggaggaaggggcgtttgagccgggagccagcgaagggggaacggggagggacgacatcgaggatgatgaaggcgaagagccttgggtgagcggtccaaggtttgaaggtgttggcggtaaaggtgagtatgagaatttgccaggtgaggatccaccggtgtcgttgtcgttggtattcgtcgaagggacgagattgtgattgccgcctgttgttgttgttgttgtataacttgaaacggtagaagccgagtttccattgttggtgtcaccgccagcagtggcagcagaggatacggcggatggaacgggattcgattctcgaagagcggcctccctgaacgctttctcccgttctttctcttcttcttcctctcgctttcgcttttccttctcctgtacgttctgagcgcgagcggcgattttaacgtccaagtcggcttgcaatttacgaagcgcatcttcgaaacgtttctggagaggaacagcaagcaatgacgacagttcagatggggaatgggcgcttatactgtgctcgatttgaacttgatgaaaaaaaaacacctcgatagagacttaccttgatgataacatttccactcctctcaatctctcccttctttttaatgacggccgcttcgagatccctgatctcttcattcaagagtttctgacgttgagcgagttgaacagcttcttcgtcctctgaatcagcgtctgagccttcttcttcatcttcttcgtcttcttccggctcatcatcctatttaaagagagagaaaagtagaggaaaaacgaaagaagagaaagagagacagaaatcatgtgctccaaagtgagtgaacaatatgaatagataagtcctgagagtgtcgtgtacgtacatcatcgtcatcgtcatcttcatcgtcgtccttctcttcgtcttcctcatcatcgtctaactctttcagccctctgttttgtacatggcggaagacgataaaaagacttttttgatcaaccaacgagttcacggaccgaactggtatgaagaggataaagaaagcctctctccgcttttcgaacacgtacctagtcaattcagctgccagatcgaacccgtcctctcctccatctccgtcctgattcataggcgtcattccgtcacccatctccgaaccagcatattcgcttccaccaacgagtagattggtcgaaggtgtggcagcaggggtcaaaagctcgctatcggatagatctgggtcaatgtcttcgagaatttctattgatgatcaagagtagaagaagatcatccggtgggttgagttgggagactcaagaatgaaagacacccagaatttagaacacaatgaccgctacaaaccataagatgtcttttcagctctagagtcttcgtccagtagtttctcgacctcttcttctacgatttcgattgtctgtcaaggaaaattaaacgaagaagaaacaataaaccacaactccgaatgaaaggataacgaaaccaaaagaatgaggatcaagacgtactcttcgactaatcctttttcgataccttcgctttcggacatgcctcaaagggggtgtaattccatgaggccagatataatcatccaaattcatctttccactgccagaggacagaccatcctgtatcacttcggattcgtctttgataggatgggtcacaacaagcatctgtttgccaaattcagcccaaaaagaaaagacattgatcagtctgagcgtttttctctcaagaacaaataggcagcgcgcgtgtatggttgtagttttgtacgacatttgaacatgtgaacatgtcatacctgagaaatgtcggccgctttgaacatctgtttcccatcgagcgtcttttgagactctatgatagatggcaggtcgactagcttggcagcatacaattggtttgataggtggaaggccgctcttctcgagtctgatcccacggacgcgacaagaccgaaatattatcagtttcagcgaacaaacgagatgatcagaaggagagaagacctcattgagcaaacacgtatgaacacgtttgaactgcatgagagcaatctgagaatgaacgggagcgtaaagtgaagttctctacctttaaacttaaaccagatcccttccaacgctttctccttgttcttcccttttttgcccaacaatgctctaagatcttgagcaggagctccctctggaagcctcaggatgaactgctcctcaaattcaatctcttcgtcatcactatcgagttctctgtcgtactcgcccaggaaactgttgtaaccaccaatgccggcttttttcgaaaagttgagctttagctttgaaggtaacacagacggggcaaccttgacagtcggctttcgagctcgagctggtcgggcggctgacggaccagcagttggatctgcagacggtgtcggagcagagtttgaggcttctgatgcccttcgagccggaggttttgtccggttaggaggaggaggcccagggatggcggacgaggacgaggatacggtcggagtcggggtgtgagttggtaatgaggtgaaagctgttggatgtgtagaagaggacgtagatacagatggtgtgctggagtgaacaggtagctgtgatgtggatgctaccggttgaaagtctgactctgaatcatccgacatctggccggatatataggatgaatggatggatggctgatgggatgaggatgaggatgaaagttgggaggtgacgctgacaattcccccgagtttcatctcgtttctctccaccatcatcttcagcatcgatagagccagtccggaatctacaacctttccatacacatcatcatacatacatcgaaatgagcgctatggatatcgatacagaggcatccacgtctgctgccgctgtcgaagttaagccaaaaatcggagcaaagaaaggaccaattaagaagggtaaacctaccgccggtgctggtggcaaaggcgacggaaagaagttcgaagtcaagaaggttcgtattctctcgtgtcttttgatgagtagatgatgtatacatcaagctttctcttcctcgtcttcgatgaaaagaatcagaaagacaggtggcaaacgctttgtgctccttgttactaaagaggttccttgttcttctgatctcgtatctgacctgttccacccctatcaactcttaatggatctatcagtggaatgcggtctcgatctgggcatggggtgcgtctactcacgagcctatctgccaggactgtctttacgggaccttcgcatgttagatcccgtttggggactcttccgaatagagctgacaaccggcctatgactcctatacttcctcagacatcctcgtcgacacatgcgccatctgcaagaatcaaattatggagctttgtgaggacttgaggaatttcctcttaatcttcactttgtgtttctcttctctttccatctttcaggatctgactgtgctcttgacgggtttgttgtgccttcggtgaaaccactctgtttaaatgccacgtctcaggcatcgaatgtcaagcaaaccaagcatcagcgacaaacgaagaatgcactgttgcctggggagtgtgtaatgtatgtactaaacccctatcctggttattgatagtatcatgccaagtatctgtcgcactagctgacgtgaagcacttgttcgtttcgacagcacgccttccactttcactgtatttcgcgttggcttaaaactcgtcaaggtttgcttggtcttcgaatcttatctttatggcgagaccctgttctactagaccacccgtgtctgacgatcatttgttctttggaatatgaatccacgtccatctataccagtctgcccgttggacaatagagaatgggagcttcagaagtatggtttcgtcaactaagctctagttttcctcgtatcttgtcgcagctggatgcttatctcttacctttactctcaattctgtgctccaatagatacggtcgataagctcagcggttccttgaaaaccaacttttgcgagttttcaggactttgggaaggtggttggggcgcatatatctcgagatcgagccagataaacatgatatctaaattacattctctcatccttctatcctcttcttgagctttttttgcttcctactcgtcatctctctcctattccctctctctggtcgcaatgtcatctatacaaggttgagattgaacactcagatgggcatctagtttgcctatcaaaggtgggcgtgcgaacactccagtctgttcacgtgatatgaacgccacatgaaatatcagaccgtcttgttgatcacctcttcgttcgttccctccgtccgagaactcgagctcatccagtcatgaccgctatagccaccaccgctatatcctccccaggaaaggttctcctagcaggtggataccttgtgctagacccagtccacacaggtctcgtggtttcgacctcatccaggttctacactgttattcgatctcttccgccttcttcctcctcgacatccacgaatactatagttgttcaatctccccagttcgaatcagctcaatggagatatcaattcgaccatgtttcagggaggatcaccgagatggaaaatgatttgcacgctggaactggacgaaataaatttgtgttgatcgcgcttgagaagacgatcagagtcgccggagagttggtaggttgggaaaaggtcaatgaatctcttaaagatggatgggtcatcgttatcgtaggagacaatgatttctattcacagcgaaaacaggcaagtgttttgttttcctagttgttcatgttctgctttatctctgcgtgtctaactgtttccaatgggcttttggctttcagcttgaatcccgtgggcttcctctctcctttgactctctcgcccatcttccgccattctcgaaaacaaatgaatcactcgccaacgtgcataaaactggcctcggatcctctgccgctctcatcacttctctctgtgccgctcttcttctccacctcggggcggtctctcccctcatcttcaaaccttcatcggctgaccctatgtcagaagaaagaagagagatgagattggtacacaacgtcgctcagtatgctcattgtttggcccagggcaaagtcggaagtggattcgacgtaagcagtgcggtgtggggaagtcagatctacaggaaatttgaaaaggatgcgttggaagagcttatggaggatgaacaggtgaggatagtaccagaatacgtggtctctcttatcgtctatctatcctatcaatcgcctcgctagtcgcgcactgactaaagcatctttggtctgatgctatgcaaaaagtccgatcgaacattggtcccaaccctgtcgcctgagaacccgagatggaccaaccaggtcactccgttctcctttccacctcgtttcaggttgcttctggccgacgtcgacgctggaagcgacacgccttcccttgttggaaaggttcttaaatggaaaaaggacaacccttgtatgttccttctttcccccatatatttgcttttgtgtctgcgcggctgagctcattcaagagtactcggttatcaaaacatctgactcattcaaactatccttgtcgttatctgactaattgtagcacaagattcttggtcgaccattgatgggttcaatgatgacctcgcttcccagattagagctcttggtcgattagccgcttctgatcctgtatcgtacgagacagctgtccaggacttcattcgaaaagtgagtctcggtcttgtcctacaatgtttctttctctattctccccaatcaagcttgaacctgtctagcttcaacgatcgactatgtatacaacaaccatagaggttactaaccatgctctgtcccgccctatctgtctaaaagcctgcagaaccttcatcgagcaattctcagccgtttatcaagatcttccaatctattcaagccgcaagccaagttagtgcagctttttctttcatttcgagcgtgatagaaggacctgtctctcatcccccttctcctattctgcttgacatcgatcgaaactttgcattggaaagtctatccgacgatcaatgaaattgatgggagaatcagccggcgtacctattgagcctgatgagcaaacggaattgcttgacaaatgccagactctacctggtgtcttgggttgtggagtacccggaggttagccctttgttttgttctaacaaaacttactcttgtcttcctatactttttgtatttgtcctcgttcgttgacacttgcaaattcggccctcttctttggcatatcttgttcctatttttttgtttttatttttgttttccatgcgcttgtgtttcttcgtacagcgggaggatacgatgccctgtgggtcctcattctcgataccccctccacgtcgacagcacaagttgtagagaagacatggacggaacacacaggtctatctgtttgtcctcttctcgcacatgaggatccgatgggtggtcttcaaattcatgatgtagatcatgtcaccggtttgagggaatgtctgtagacaacaaaaagatcaagggaatggcacgaagcagatggatagagccgatggagacgatatatattgaaacttttaatttcctcatagacaatgattgcacctcttgtctataacccttcatggttctcttcctctcgggttgatgctagtttccatgaagggaggaggataggtacgatgtgatgtgtagaatcagcctgtagaactaagaggaaaaaatagagggaagggaagggataaagcaataaattacggtatagcatatagttgcgtccataagtctgacaagacttcaaaaaatagaaaaaggaaaggtatacaacatagcaaacatgcttgaactctataactgaggcgctgaaagaaccgctcgaaagaaagaatagaaaagaaagagaaaagaaaaacgggaagtagacagttgccaagaaacatggtggaaaggttgaatcattcagtccctaactcatcctcccaatcgccttcatcttccagaacccacttgtcacccaaccctcccaccatgcctctcttcgtcggatctctcgtcaagagtgaatctactaacgcctttgcttcacttcctgcttttccactcaacaatcttcccggatcgagtgagatactagattgagaacttgtaggagggacaggtggccaagaaaactcccctttagctatgcggagcatacgagatcggcgggttgaagaaggttccatcgttggatcatcatgtggaggagttccgaacggtaaggatcttgtctgtaagtcaagtaaacatatgtattttagaaagacattacggtggatccaacgtttggtcaggaagactcgagcatctgacggccgaacgaagtacatgggcacgcacgagtagagcaaataggacgacgccgcaagcccagctgtctgtcaaccgcccatcatagctttttccaagaattatctctggcgcagcgtagctatcactcccacaacgcgttgtaagcataaagttatctaacgagaactctttggccagaccaaagtcagttaacttgatgagtggttgatctaacgggggaaggattgacttcgaaagttgtctcggggggtttactggagaaggaagaggcgaagtaagaaggacatctggggtgcaaaacagattaacttaggtgtttgaggttgtctgatatccaaagagtgcaagaaaaagacttactctcaagtttgatatctcgatggactatcccgtgactatgtaagaatgatactcctccctctagttccttccatacccgcttgacgaatcctcttccgatcatgccccatttgctgggctcttccacggtggaaaaaagttcgcctccagagataaatgggagaacgagacagtaatgagagaaagtcgcaaaagaggcgatatgggtcatgatggcaggatggtttattttctaagttgaataaggaaaagaaggcatgagactctctgatgatgcaagatttcatatgtgtctgcagtacagcaagatggacaagcgcgcaccttgaggatctcaacctctctggtaaaagatgtaaacattcggtcgtctcctagacacgcttcttttgtcctatgaagatacaaggtgcgaatgttgtgatcagttagttgaactaaacctcaaagatggagaatgcaagaggcttacatcaactttacagccactaattctgtgcccagccccctggtatcttcgcctatacatctagctccccagacacgactgaacgcgcctttgcctaactcgctgccttccaatctccatgatcttttggaaagctcggttctgtcttcggctgtgttccatttggcttttctatctatttcattttcgagagtaggattctctattagaatgtccccctccttcaggtccggaatgatctgtttggccgatggatcggtgcctggtttctgatgatgattgaacgatggagacgtaggcgttaaccgagaacctagtggaggaattttactcggaatgtacagtgaaggaagtgcagagtttgggtgtccgtctcttgtgaccgagcctcttctggagtccataaagccggatgtggatgacagcgatgttgtcgaggacgaagaaggaagaggaaagtctggagtgatgatcccctgactctctttctcaaaggagaagtatggtctggaatcaaacccacccagctgaccgcccctgtgtctgtaggacgcatcagacacacttcgaggatgattgggagatcttcctgccggcccggcaccaagcccagtcaaccgtccgctgacggaaggaacgtccaatccagctcgcccaatacttcccgcacgtgcgagcgaacgtgcaccgccagatgtcccgttcagtggcttaggaggcgtgagagtctctgatggttggaatgatcttgaaaagaaggagtctgtccgggaggacgtggtggagatgatggagtttgatcgcgaaggaggtgagctcgcctgtggggcaggtataggcagcgagatcgtgtggtttgcttctggtgattctgttttgatttctggcggtggtgggcgtggaggtgagggtggtggtgaggaaggttccgaagggacaaccgaaggcgctgtcgaccggagaggtgtagtggaaagagaggacgacgatgatgacgaaggagaaggggacatcgatgacgatagagggtgatgtctcgaatggagatctgaaaaggaacaagagctgttcatatgggttaccaacaggcgtgtcaggcaagatgggatatatgtattagaactatcggagctgagacgttggttcttgcggaagaaaagctggcgagatctacagttgaagtggtattgaataaacctgctggcacttcagaggcatgtggatgtgagatggaggataagacgtggggatgttctatgatgctgctgttggtgatgatgttgatggtggtggtgatggtcaacaggtctaagggtcgagtcactgttgactttgttctcctagcgttcaccctcacattacccatgtttcatttagctgcctccgcatcagcaacacttcttccaacaagctctttcgatagattacccacccagagcttctcgaggcatattccctattcgttcactttacctcctactgcttcttcatcctcctcggaggtctcggacacctctcaaccggtttctaactctctacccagaggtccgattcctcatataagaccgagaccaacggccagaagaacaatagtggcaacagcagccgcaaaccgaactagaattccttcatcctctcgtcgagcagctcaaatatcatcagcgaggtcacaagcgccgaggtctgttctggtggatagagcaagtagtcgtgatgtagagagagctcttgatggaaggttacccctcggcatgaatctcgtactcgaggaccaagacttgagtgacgaagagcttgaaattcttctcaaggttgtgtttcctttcttatcctctatctgctctcaagtctgcttgactgatgcatctaactctgttctacatatatcgatcactagaatcgagaaatcagggattatggtcgaacgttcttgatcccaataggttgtcgacggacacaagaagagatagacgccgtcgttcgttccttccatctgtttctcttttatttattcattctgttttaatccaaaacgtctgtgttgcttccgatcgtatactagcaatcacgttccccatcacccgcccaagcctcgaatgctgaagatcacatccacatgcatggcagagtccaagatgccctggatacctcggcaagtttgaacccggatgaacaacctgatctcgatagagatatctccgacgaagatctcgatgagaatgaagacataagcgaggattagaagtagatccggataacttcagcagattatatgatatgtgatgtattatcttgtgaatagcgcgggatggaaaacaaaagctgtaaatgccactatgaatttatagtttacaaccagagtgcaggattacaagcaagaatgctttctttcgcgggcaagcaaagacagcggtgaaggagctaagagagggaagaccaaacctaagaagaaggagaagaaagaagaaaaggtagaaaatagagatgcaaggggaatctatgctgctctaacacggccacctcgccatgggctttcagcccattaagaaagattccaatccatgaggatctttaaagtcgtgatggaccaagctaaccagccagtactcatccgcgattccctccaaaaacttcctcggttgagacccagcaggatacaggcaggaccaatcctgccagatggaaaaggcttcttctttccaagagaggaacgaaacttcttcgatgatggttgattgtacgatctcttgaccggggaagattgcccaggtgacgacgttcacgtcctctggtgacatatttgttcggaactcaccctgtggcgaacgatgagaataaaccgatatcatcagttcgtgcgcgagagagatcatctgggttcaaaaagagaaaagaacaaacagatttattcccggcatagaacgtgacgacacccttgaagtcctttgccttctcctcaatctctctgacctcagactccttgacaaaaaattctacaaaactcttctggaatatatacccccctcttggaccaaacccgtatatcggatcttcgctcggtgtgccatctaaggtaggctgagagcctacagtccaccaacccttctccggcgagtttaatcggagaagaagaggaaggatcgcccgagattcggattctagaggagaggtgcaccatgggatggaagggatttcgctccgcagatacgacgtaaagagctcagatatggctctcgtgttagacggacttccccaatgactcagcgcttcgttgggctatttggaaaaagaaaagaaaaaagttcccttcactcagtgcgtgcttgataagagcaagaaaagagaacaagaacacgaaccaaaatctttaagccagctccgtatccatccagttcaccatatgccgggcttcgaggatcggtgaatcgtccgttagggaactcgtcccatgattctccctctgggatttgaccagctccatctatcacgcctaacaactcattctggggttgtgcggtagatgttgtctgttctgtgccggtaactgcttgctgaaaggtgatactcgggatattggccgtgagaggtgcgttttcttgagaaggaacaggccactggatatataataaac

SEQ ID NO: 733 - DNA, 26870 bp, Xanthophyllomyces dendrorhous
accttcttctattattattttctgtgttctatcttctttctcttttgtgttttgggctctttctaagttcacagatcgagtagaaaatggatcaaaccttgattccggatccgttcactacttttgcgtctgcgccaggtttgatccaacccaaaccctccaaaactctacgcgcactcttttccagattgagtgtgcagagatgaataccttcaacatggccctcaactgccaatcgcttgcacatcgagattgccagattgacaccgtacgatttgacttgaatatcgtcgtgctatgaagttgacaagagaatatccagagtgatttcacaagattaagtaagaccagagcctatccgagcgccttatcaaagaacaatcaaacgaacctttataggttctaagtcattcaagatagactggggaacgattgctttacataacgtggtcattcgtcggaacgaactgtaattttgaatcgccatcactccagggatgatcggaacggtgatacctgtttgtgacaagaggtgttgatgttcagatcgaagactctatacggccttcgaacaaggttatagagtaactgtaggacgaaccagcctctcgacaacgagtcttccactgaaggaacacatccacgtcgtagaacaactgagtcaagatgaagtcggcaccagcgtcaacctttgtcttgaggaacgcgatgtcatcctcggttgatggcgagtctggatgggtctcgggatagcctggcatggttgcgcccaaagggtaatggtttcttagtactacgtcaagaggagaggctgcctctataggaacaatgctggaaatgaaagagttgaaacgtaccggccacaccgatgcagaacgcgtctccgtagttctctcggatgaaggtgattaagtcaagagcatattcgaaaggctggttggtttgggaaacaggaagcgactgagtgggcgcgtactccgcgtctctgggagggtctgaattgtggtggtttagaaggaagatgtttaggtgaaacgaatttgatatatatgcgaactcgaaggaaaagaagtttcaagtttggccaaaggatttgagaaaccgacctcctcgtagagccaaaatgttcttgacaccacgggctttagcaaacttggttagtcgaggcaaatcagatcgatagtcagtgattcgtatcgacgacatcaattcaaatcaagcccagaggtcaattggaagactcacatccaaagcctcaatcaccttggccttttccatattggtacatgtcaaatgcaacaaacattctacattgtttcctttttcattcttcagatccgaactgatgaatctagcgagttcaagacttcgatcgctggtcgacccaccagctccccaggtaacggagacgagcgctggaccgtcaggcgagagggaagacattcggtagattcggtcgtgcaggttctgcgctccaggttgagtaagtggaggaaaaaactcgaatgaatacgaaggttttccatccgaggtaacataagggcagggtggaggtgccatgttgatatgaagacaacagtagggataggaaggctcaaaatgtgattaagagtgagatttaagctgaaagaaaaaaattacgttttttgtggtttttttttccacaaacttcgatgataagcacgacattgctgagaaagatcgattacaacagaatttacacacccacaaaattcgaacccggagctctagataaaaaaaaacagagagaaaggggaaagagaggcgtcgtccaaggaagaccaagtcgtcgagcagtgtgaatcctttgggtataggtgtatgtctgggtccggctgatgagttgaggttagaaatgacaaaagttgatgatttaacttaaggtagatcaatcaatcaactattaaatcaactatctgtgttcctaccaaaagacccaaattaagggacagcttaccgctaccatctgttcaatcttctttgactatcatcatccatcgagtctagccgatttagcgtcattcatccttgcttcttgtctatctctagatccactcagtatgtcgcacggtcataatcaaagcattatctttgtcaagaatctcaacttcaatactaccggtgaggatctatacgagctctttggctcctacggaccgatacgacaagtccggataggaaacgtgagtttctctcttttgttcttcccattatataccagtttgaccatgtctgggtatgagatggactggtgtcttacagttgtctttgtttatgctatcactgtttgttcaatcgtatcgtctctgtcttttctctgtcttgaaaatcaaattctacagggccaaaagacaaaaggaaccgcctatgtcgttcgttcttctcttacgcctctatccacgtcgtgaagatgaatctttataaactgaccctctacgtttcaatttacacgcgaactaacttacgactgtgcttgctgaattcaggtgtttgaggattatcaggatgcaaagtcggctatggaaaaagtgaatggtttccatcttcaagaccgatacatcgtccgtacgtatcctctctcatttcatttcatattgctttctgctttgtcaaacccgcttttctgatgggtttttgttcttcaactttctcgaccgcctattctacgggtgaccactcgttctttggcaaatatagtgctctatcatcaaccttcgcgtcaagctgcctctgctactaaagctgacatcagagctcgtgaagaagcagtggcggccgagaagaagcgacttggattggacgactaagcgaatacgtagaaagaaaaaaagaggagagaacaatgaagcagatgatggatcactttccctgacgtgatgagacgtcaaattcagacgatgtacgatcaagttgcatatggtggagatctgatttgcagacggggggaggtgaatcaaaagatatatatgttgtatttcatgccattcaactcatttcgatttttgtttgcttaccctcggcagaaagtggagaacgttaacttgtccaagacaaacgaaccaaaaaagagaggagattttcatttgaacgattgacaaagtcaaactctacataatctgtacacgcctaagcaaatgcgaaataaatagcaagaaacaagagaagaacagaataggaatccggtttaaaattgaccagctctcatcttcaggatcccctatgaacatcctgccatgatccgccgctagacgacgaccctccctcctcgtcttccaaaagtcttcgattgtttgatccagaccctacaggaccaccaggcgacagcatcgttctatcttcctcttcttcgttgtactcagtcggcaagcctgggcgatgctgagaatcatgataaagaggggctgaagctccggcctgacgatcttcttgatcatcgtcatccaggaaagagctaacgagaaaaaaaaagcagcaagaaaaagggttcagcaactctcggtatgtttctcatgataagcgacagatacattgtctctccacttactcgtgatatcctaaaccaccagccggtcttccctcttcgtcttccgactcggtcacatccccaaacgcatcatacagctcctttgtctttcctctaccttccccccctcgtctgctttttcgcccactcaacattcccattgcgacgtcctctccgtcacctggccctgctcctcgacgaagaccacctccacttccacccagaatcccatacgcacctcgctcatcatcaccatccatcaaggcgcgccgcctgtttctccatcggagcaacatcaaacctccaccaccaaggccgacaagagcgacgagcccaccagcaccgtacacccatgtcgaaccggatgccaagttttccattccgtcaaagatcccttcgtccaaaccagttgtggcagaggacacggctgaggtcgcagaggtagatgaaccggttcgggtggtcgttccaccatcagtagcgatatcctcgatcccagttttcgtggtcaacaccggattggccaacccagggctattagattctccaggggaagacgcatgatcggatggaagatgagcggttggcttagggagctctttcgtattgttctcggtggctgtggtcgagagcggggggagcggcaaaccggccgaaacagattgggaaacagtcgggtcattttgtgggaaaggagaatcagaatcaccgaggggtagtgtgtaaggtacggctctggccgcattgatagactctccccagagttgcagtgaccatgcttggaatgtcccatttttttcaggatggattcgatcaagaaccgtcattgtccacgtcccgatcggatcttcgtccctgattaatgtagatatggaggagatccaatcatgtcaaagtgcatggttagatcagcaaaccagatgataagaccccgagtaaaattgaccaaccagtgcttcatgctcataaatttccatccattgaacccatcagggtcttcatccgctcttctcgttcgggcaagaacactcttgattcccttgggactgaccaactcaacttctacatcgcctcgtctatcatgttgaatccacacccgagcggtcacatgttcgagtctttcgaagtttgctcgagtgagcatgtcggcagtcacgacgaatgtagagctcaccccggtcggcgggatgaatgcgcctggagaatctcgggtgataatgttggcatcggcatcgatagatgagagaagcgagctttgagtgtgattgtccagatgtacaagcggagactcgaaccaagcttgaggtttcactagcttccaagattctgcatattcaaccagcttgccaacattgatcttcccgtaaccatctgaaggatgtagtaatgacgccaatcagagatatgaacaagccggacatgacttacgaatgcacgtatggaagaaggcggcgaaatgagacatacatttgtagttaaatcttcggccagcagcagtcagctcccaatcgggatcttgaagattgaacgtatcgaccgcgttgacagtgatgtgttggatgtctctccaagtaagatccggtcgaacttgaagggccagtgcatacatgcctaccgcaaggggagcggcagccgatgttccaccatgaccatcggagcacatttcctctccaacgtcagtcgtatgctgtggcacatcaaatatcagcctcaaactcatgaatagtaatgtgaaataaaaaagactcacgatatggtccccactccctgaactgggagcgacagccatgaccgctgcacacagctcagaataatacggatgaagaccctttcggtcgacagcaccgatagtgattgagtaaatactgttagtgtaaccatcaaagttgcactggtcgtccattccacctccattgcctgcagcaaaaacaaacactgatccttttccgtctcgaccattagtagcaccattgacgagggctttgaggataagcccaacaggagcatccatgtttttgccatcgtccggcggaccccaagagcatgagtaaacgtcggttttctggtagttgtagttaagcgcagccgcctcgtcggcgtcagagataggaccagagagaattcgaacaccggcaactttggaggtgtgggccacaccaataccacagacgtcgttcttgatcgctccaatctcaccggcgcagcgggtaccatgggtatcgtcggacagacgaggcataggtaacgggttgtgatcgttgaagtcatacgatccttcggcgtactacatgaaaagaggcgaagatcaaccgtggattataagatactgtgttcttctcgaagctcggatgacaaatgaacaaagaaaacagtcatacgaagttttctttcaggtcgtgactggtatagtcgagcccatcgtcgataagcgcgacatggacgcccttgccggttatccctctgttccagacgtgggtcacgtttagctcgttctctggcatgagtgtgttgacaatatgccactgttttaacaatagtgggtcatgcacatcaagcgtatcttgctgtttgaatatgacgaaccttgaagttagcatataacgtctggtattatcatagtcgcatggggtctggttgacacgtacgagaaagctcaactccgtaaggtcggtctgggccgtcgcagcaaaggtattgaatttcgaaccaaagacatccgctcgctcggaccaggcccgcttggctctctgtctaggtatcatcttctcaaggctccttatctgaccaaatccttccaggttatcatctcttttagcaagccaggtcgactcgaccgaactgtacccaaggtctcgacgtctggtcagctcagcgttctctgttctaacgagataatgtcctttaagctgtccgacctgttcgacgagctcggtacctagaagagcggccgcttcctctggagataaagaggaagaggaagagagttcgagagcgtagtaggtgtgagtagagtatgatctgggtgccgggtggtgtgggagccggcggccataaagattcgagtcggaaaagctgtctgctagggtgagtgcggagactagagtggtcagcgcgagaacccggaggagcatggctgtgtactttcaaaccttgccgatgggagagccgaagattcaaggaggtgcgaggaaggaggaaaggaaagggagaaggcgaaaccaatccagcaccaaagagagtatgcgtgagcgtttgtgtgtgtgttgtgcgatggggcattcaaactagaaggtgtccgggatgatttgttgacttagataattgagataagtatctgataatatagccgatattcaaatacacagtacccgcatcaactcctgtagccacctgctttcgatggtggaacaaattccttataggaaacgcatgtggtgcgctctgggtttattactggttgtgcgccgcatgctgaaggttatgcgatatccacggatgagctccttgatggacatcaaatttctcacgatctacatatgaggcagtcgttttgatacacgatttcgatacacacgaacagccgagtctatacccacatgggctttatcagtatgatccttggcgcagatacgatagtcagcagcggtagcaatctgatatctgtctgtactttatagcatattcttaggacagatgctttagaaacagtgggtactttggtttgaagagttgctccatacctcaacccaaaagggttagtcaccccgtcgcaccgtcttttggaagtacatcttcctttcgctccgcttcgcccgatcatcgctcattcgtccgtcagccgttgcagccagcctgcaagctactcgtcactcactcaatcactcacttgttctctcattccctcgctcactcactcatctgaactcgtactatggccgacgcagatgccctcttggataaagctctcccggtaccgtccgtcaagccgacgtttcctcaagctctggtcgttcgttctcctcttcgtcctcgtatccgtcgttcccagcttccaatgttgtagccgtggcctttgtttattcgtctctgtctctgcctctcgctattgttgatgggaatcgaccaggctggtgccatgtcaggtctttccgtagatctgatgttctttccaatagatactcttaaaacaagacttcagtcccaaaaaggttttctccagagcggaggcttcaacggtgtctacaagggaattggtagtgtgtttgtcggaggagctcctggaggtatgcctccttctcctcttgttgtttactccttctctgttctacctatctgtctatagtttttgcctccccctccttcaatatatcacttcgtgctcattcgacgtcggtttttttaccgccccctacagccgccgcattttttacaacctatgaatatctcaagacgtcactctccaaagatacctctctcccttctgcctttgttcatatgacagctgcttctggtggagagctcgcagcctgtctgattagagtcccaacggaggtcatcaaaacgagagcacagactagcgcgtacggtacgagttcagctggaagtttgaatgcggcaaagagcgtttggagagaggaaggacttcgaggattcagcagaggttttggtatgactgttgctagagaggtgagtcgaaagtgtttctttgtataatttctcaacggaagagaggaggagactcttgcttttttggatccacatctgattagacagcatgcactgacctctgattttcatagattccgttcacatcgatccaatttccattgtacgaatatttgaaggctaccctcgccacccctgcctacttagatagacccactttgcctcatgaggccgcgctctgcggatcagtcgccggtggaatcgcagctgctttgacaactccgttggacgtcgtgaagactagagtcatgctcgaggtcaaggttcgtgttgtctgtatctgtagaggttgtctcttgcgaaagattcacatgtgttcactgctcaaatctgactgttcgctttttttttcctttgcgcaagtacagggatctgccgtgcctagaggtggatcatcatttctctcgatcccgggtcggatggcaacgattgctcgagaagaaggtccaagagcgttgttctctggagttgtccctcgaaccctatggattagtgtaggcggagcggtgtttttgggagtgtacgaggctgctggaggggcactgaaagggatcatctaaaaaagcgttttctttgtattctatctcatctggagtagtctcaatttactactctcaagaaggcatcgtacggtataattgcaatgacagacaccaaagaatgacgagtacaggaaggaaaaacttgaaagcttttatcctgtaaatccaagaacgacacgccaatcaggataggtctcttcagctttggtcagaccttgcgcttcgatcaacgggaacaacaccgagttgatcacctcgtagccctgtaaggtaattttcagccaaacaaagagacgaatgagtcggtcccgaagtggcgatgatagaatacagtcttttcaagcatataaaacgcacctcagccgtcaaatgaagtccgtctgttaatagatcgtctaggtcgccgcccttcttccggtatgcgtccattgcctcccatgcatccaccaagattgtcccttctccactctcagcggccacctctctaacaacctgagcgtatctacccgtgttttcctcactcctatctacagtatcattctctctgaacgctgcccatcgaggtgggttcggaatgggaggggtaatcaagaactttggcacagaagttggagcgagagccaagatagcgagcaagtttgctcgatattcttctatcgagacgtgctgaggatttccagaggattcaaggacagcatcattcgctcctagccagagtgtgaggaaggcgatcggctgagtggccgacgaagaagtcgagttagagggagcaattatggttttagcgataggaagaattgcggatgtattgtatcccgcaaagcctcgattaatcacatcgtgtttcctgatgaacaaatctgtacaaatatccgagaagtttcatcgacaaagattaagaaggaaagttaataaaaattcgaaatagtatgaaggaagaagctggaacggaccagataatctggcggaaaggccaccgggggtatacgaatattgggtgagggaatcaccaagaagaacgatcgccgcctgattttgaatgagagacatctaagatataactgtcaatgagcgcagagtaattgatatgttcgtatatacgtataagaaagagagatggaggggagggaaagagatgtgaagatggattcttgtgtccgagacatcacggagccggactgtcagtctttagtccagcggtaaccatggtttccatatctgcccagcccagatttcattttcagctttctcacccttcttgggtctggctctctcctttgtacacacttcaactaccacaccttgtctgaccatcgtcgatgacacttcagttattctacctcacgtggggaacaacccatggttcattccgtcttccggagcttggtgcgtttctattcatatctctctacctcgcttgaggtagaactatatctcgtcttctattctgtttccctattcattggccgttctcttcctcaatagaatccgtcgcaaagctctacgacatcaactttcatcttcctccgttctctccgaacgttatcgagaagtacaacgctcaaggatgtggactggatgaggagtgggacatcgaaggtcgagctatcttggttcttggactagagaaagtagaggatgcgttcaagttgggtgaacgaggtgtaggcattcggtatgtgcttcacgttacccagagttgcttcctgaggacgaggagaacgaaggtaacaaatgcatgatctaaactccctcgtgtgcatatcttatctcacttccttctcaatcgtagttcgcttcacaaactatacgcgcttgcaccgacacttgcaaccctgcacaccgtgctctcccagttacctcgcacaaaggaggcccggccgtgggatattgaccttgaaggagatgggtcaaccgagcccaaacgatggaaattcagattcgatagtttcgcaaagatgtgggactcccaaacacaacagtacgtgttatcgcataagcgctcgccataaagagaacctcatacacagggacgtacacaacgtctatggaaggtgactgacgaatcgatggtggaaatatactggtttgaaccgatagagaaaaaatgatagcgttcgatcatttggaactcaagggcaagcctgatatgaagactcctgagttggagtttggaatctttgaagaatgtacgtgaagtatccttcatcgtttgtctctcaatcgctagtctggcctgggtaaactgataacgaccgttttctttttcctctgctactcatgattagatcttgatcgaccgtctcctgccaagccggacccgagtgcaactcttgctttgcctgagatggtctactacggtcttctcgtaagtttcctttgttcccgctgtacttgcatcccgcgcgccaaattaatggatcaactgacgaatctttattctgcagacaacgcactcgactgctcgaccgcttctgactcattattcgcttaaaaccagacctcatattggaaacaccagtatggatgccgagatcagtttgttgatggcgaatcaggccttggctcgaaatggaagcttcgtgtgggacccattcgcagggacgggaagcatgctgttgacctgttgcgttctctctatccatcgctatattagtctgactttcgatgggactgaatgctgatgcattggctcgaattacttatctaggtgcccactggggagctttctgcgtaggaagtgatattgatggtcgacaaatgcgagggaaagagaagggcaagaagcgagcgggtaagttcaagaactctgttgtatcactgtcttgctctttctctgtgaagtccacccatctgacgtagatatggtctttgttttggttgtcactatcattcattttctcgatactcgtaacataggtacccccggaattaaactctccgccgcaaagtatggaactcaggatcagatagttgatctgttaacttttgatgtgaccaaaaacccgtggagggtcggaagaatgtttgacgcgttcgttttcctctcttctctttccgccgttggcccttgttctgctcgcgagatatccgtgattgacgccttaatcattctttgaatcttcaaaagtatcgtgacggatcctccgtatggagttcgagcgggagccaagcggcttggccgaaaagatccttcgaaacttcgaaatgagccatacttcttccccgaaggtcacccggacgctgggaaggcttcttacgaacttccagagtgtgagtcggccctcaagtgatgcgagaagtgaaggaggtcgaggactaattcatgcattggtgttgccttacaatctcgattagaccttccaccgttccggccgtatcagatctcacatctggcaatggatcttgtccgattagctaggtatgcgctcaagccagggggtcgattagtcttcttcttgccagtggtaaatgatgagtacgagagtgtggacgtgccgacgatcgagggtatgaagttaatcagcaatagtgtggaggactttgggaagtgggctcggcgtgggtgtctttctactttttttctttcaccgttctttcctttcctctctgttctaataacaactttggcctgacgttctgtctaactctctatctgagcaggattgatcacactcgagcttaatatcaacgctccggctgtggatgcaccgcgattcgattctgagagcttcttcgggaccccttccacttccaaagaggaagccccaggagacgactctgcgcctagtgaacaacgactgcctggtcaccacaacttccgggagaagttcttcaccaaggtcatcaagtctgcaagcactggattaggaaacgaagccaaagctcagtctgagtttgagtctgagagtgtggctgaggctgtggatactcacagcacgtgataaaatgtgttaaaatctatctggtggggcgcagcactgggtgaaaccatcttgccgtaaccacgcgtttacctctctggttcaacatcttctcgtttgacacaagcaagagagcaactaagcaagggtttacaacctcatcctcttctaattccttcgtcaaccagcgagcgagcgagcgtttcattgtctgttgtctggctgtttgtccttgtacatatcttggttagcttcatctgggtcttagctacctcgactcctggttcattttctctcccaccgatttcctctcatgtcatcccggcaacaatatcttcaattcgttccttcgccgagcaacacttcttccattcagccaggacaatctttgagttcaagctatccatcatctacacattctcctttatcaacatctatgtccaccagtcatcagtcaagtgagaggtctggatgggcggccgaccctgccacacatcaggtcaaccctagtcaacaccccgccatcagtcaaaccgggggagatccgacgctagatggtctagaatcggtctcgagggttgatggttcatcccatcctcagcctactgatggccttgtgtcttcaccaatgggctcggtcgaaccgactgtgtcagaacaattggttgacgcgtcgtttgaagccgcaggtgggtctacagaatcatctttctctccagtgtctcggttacgacgcgacgacgtgagcaattgaagggcaacggcagcaggaacagttgtctgattgatggaacgatggccatcattctaagagcgactgctttcaaatgctcaactcgtttcggtaaaggtatattgaccaattggctgacctgtcctgttctttcgatctctatctagatcccccaccagtcgcgaccgctggagcagctccatataacacctcctatcagcctcctgggtccccattttcctctcatccacctaatccccagtcccaatatacacctcatcattcacaccagcagcaacaacatcaacaacatcaacatcagcagcagcagcagcaacaacaacaccatcttccggcctcaacttcgtcttctcagcagccttcgaacgcgccctctcctgccgctcaacatcacatggtctacaatcaaccggtaggatatcatatgctcccacaatatcaaccaggatatcaaacacaccatgcgcctcctcccaacacatatggatactacgccaacccgcttcctcatccccaggctatgcatgttcaacagccagtcgcgtcaagaagcggatactcatcccctcatcttcatcatccattctatcctggatctccaccaaaccaagcctacacgacgtaccctgctcactttgcgcccgctccatccaaccaaatgcatccgccatcataccaatacattgcgtttgctcctcagcaaggttatcgctcgtctcatgggatcttgccgggaagcagctctcatccatccccttcgatacatgatcacccccatgagatggaccctgtagaacgacattctccgctctcatatgatcccacaggagtagacgttcattcacacactcatggagtcgttccgcaggacgatctttctacatccgtcaaacgcgtcaagccctcgaaaaagatgatgccgttggaggacgccttgatagacgatcattccatcaaggatgatgcggactatggaccgtatgatacgttaccagatccaaccagcttgcaaacgtcccaagagtttgatcaggaggatggtgatgatggagatatgttgacagtcggcaagatggggtcgaagaggaagcggtcgtccgatcctgggggtagcaaagaaaagaaacatgtttgtccagaatgtcaccgaggtttcgctcgagcatacaatctgaagacacacgtccaaacacactcgcccgacccgccgaaaccacatgtatgtaactacgactcttgtggcaacaaggctttctcccgatcccacgatcttctacgtcataaaggctctgttcatggtgaaggccgtcaatctaaaatgcattccgatcccggtcgagcaacgaatggcaaacgtaagaaatccgagacgctgcggattcaacgagaagcagtagataattatgaacggatcgcggcggtagccgccgctgctgccgctgcttctactgcctcgggctcagggacaagtgtattggacgaaggtggactgagtgaagcaggctctctagggggtgatggcttaattgacccacaaggggtcagtggaccggaagggcacggtatgttttgtttcattttcagcaagtttttccatctcgggcgcagacctcaatcataatgactcaactttttttttctctatacctggggcttattgaatctcagatccgatagtacatcactctgggacaatggacggtaaccaaatcacttctgagcttggcggatattctgctagttagtaccatagagtccatcttttcgaaaaaattttcccaaacagcagacggcccagaatcgcactcatatatagtattatgtctcgacctaaaattcgtagctattcaagatcaagcagattatcaacaacagatacaccttcgacttcagatgcaacttcaacatgagcaccaccgaatgcaactcgaagccgttcaagccgctcaagctcaatctgacgtccagacgtacgcccaagatgcatctcaggtcgaggaagaacaagataaccccaccgctgttaccgcccacctggtcgatcctcaactcgaggctgatcttcctcaggtctctataccacaggacataggcttattatctgagaacggggaagcttccaacattccatcggacctatcgagagacctgataagctctccatcagtcgaaccgcggtcgacagagttggtcgaagttatagagaatccgatcgagaacgtcgagcaagagtcggaagcggttactgaaaaaactcctgaagaggaagatgccccggctgtgatgtcccctgaaacattggcttcggatagaaaaccgacaacggaagaggacaagcaggccacctcgtcaccgttgacaagcccagagacgaaagttgagaaggttgcagttataagtgtgtcatcagggctgaaagcagaccttgtggaggatggctctaaccacgaggagacggatggcacgaacggggtctctgataaagatatcaaaacggaatatttagaagagaaggaggatgaagaggagcgacgtgtagaggaaggagctgtcaaaaaggatgatccgataacgtcggtgtctatcgacgatataaaagaggaatgatactccctttctttcttcttgactttgggtcccttggtccgaccagggttcttgatcatgtacaaacgaactgtccctagtgggttctctctctctctctctctctctaccttttttcttctcgatacataagtccatctttcttctgatatccttgtgtttgtcctttccatgaaatttcatagttgtccttctctcttcgagttgttaccattcttgtaggcatatctggcggatatataacctcatatctttcttcgttccgttcaccctcttgatatattttttaaaccatttatttccatccgccaactgctagccttctctatatgaccattctcgtgtgttctgtacctattctacttcaagtcatacccacaaaagattcgagtacacaacacgagcttgctctgaagaagattataatcgtctaaagtccacccatcgtcacagtcacagctccccacatcttagatcagaacgacggagtctaaaacactgtacccaaccgcgactccaccttcatcactctcccttccttttgtcctcaacaacgtgcctacgtttccatcgttatggaccgttccagtctcctttccaaagagagttgcgccatagacgcctagctcggagatcgtctctttaagagcgagtgaatagtcagcagttggtttgtccgtttgggggggaacggaccgaaggagcaggttggacagtgttggaggaggagtaatgagcgacatgaggatataggccgattttgaagggggagatgaagccggcaattttctgaatggaagaagaaaagggagaagagacgagtcaacgaaaacaaatcgaccagaaattagaaagtagaaagagatgacctctacaacatacttatcttgctcagccaacttttcgaggaatggtccgatatctgcgttatacacattgtttcctccgccttctctttgaggcttgagcacatacccaataccacctccactctccttgatgagtctctctccttcctcactcagggttgtgtcgtctccaagcggccagagccccatgaaactatctcttaaagcattcagctcaatactatcatacgtctttgcgccttgttttcttgccgacggtgtcacttccttatctgaatcgaccaagtcgccagacgatggtaagaagtactcgagtactcccggcatggtaagcacttgttgaacctttttgctcccagccaattgaagagcgtacgaagggcatttgatggcggttgttcgttctattcgagttctcgtcgtccagtcggtgggagaggcgtagtcgtcgggggtgtaggccgcgcggtagtagactacagagatcagttcaggcgtattttgaggtgagctggggttgcagtagatgagctgataggaagaatttgtgctagaagctcgttgaagtgtggcgagagaggctctgtgagaccggatgccatgcctgagaagggaaggtcattcacaaattgtgatcagtcgacaagaaagaagaagcgcacttggatagacaaatggataggcaggcaaacgactgcttacgtttccaaaagctcatactctagccaacgctgatcaaacgcattccgttctccatcctgaaccacaaacaagatggatgatctagattgggttgcactatgttcaatatatggcgcgctcgtgtgaagtagacgaaaggggagagaagccttactctggaatgttaaaggccttatgtgcttcggccagaccgttagctagtccatgaatgggtgaattggccggcaggttctttatctggagacatggagacgcgttaagataacctgtttgaagggtaagatatctggaggagacttacgttagcccttgccttgcactatacagtatgcagacgcgtaggaacgatcaagatgatgagatacaaagacacaaacctatgaagccctccgactttctcgctcagagagccgaagctggaagagattgtgttaaactcgacttgtttcatggatagtggctcgttcttcttcgataggctttggtgaagcaggtagtctgatctggagagtagcagttggaggggctaattccaaggccgagggatgatgcatgtgagaaaaacgctggctttggcttacagagaatacgattgagagcgaaacgaggactgacctgcttcacgccctcctcttggctatctttccagccctgccagacgtctctcatgaaactgtctccaccattgtctccccagaagcatcctctgacgacgtggtcgagccaccggtcgtccatcgtgattctagcatagagttcgttataggctgactggaggtttatcacacgggtgtaaaggtctctagggaaaggtgaaggaaacagtgagaccggagcagagatggcggaagcgctgaggggattgtgaacggaagggtctgggtagggcggtcggtagatgagtccgtgggagagagcatagtcgagcgcaagagaggccagatggtctagttctggttgagacagacttggtggccatgcagggatggccgaggcaagtgctggatgagccatgggcaagaacgaggttgggaaagaaagagatcgaaagagagagcgaatgtttgatggccaaatgttttgtcgaggaaagaaacatggacgagtgaagttgcgtgatatggttagggttgtgattagtcatgagctagattaccaagcagctcattatcagggcacaagttcttaataaccccagatgaccccaacttcaaccccgtaaaatcccaagccgcttgtggatgacccccgttctaaacggagattccggaccggtgagagcttataccctatcggtgttttaggccgataaattgaaatagttgaatgataacagggttgttgtcgatatctaagtcaaataagccatcaggaagtcgagtcaatctcgaactactaaactcatcatcggactattcctccaggctgttggacgtggcgtgaggagcagtcggtagagcgggcaaacatataatatataaagacagttgaatactgggaaaccttccgtccgagcacttctctattctccctcaaactaaccattattcttcacccgtgggttgagaaaaaatctaaagaaggacaaaaagaagtaaaaggagaacgagaagaagaagcaaactggacgccaataaaagctaaactccactatgcaactaaccgaaaagtcacccaccagctcctcaccagcacttgacgcttctatggataggtcgtcttcctccacctcgctcgaacggtcggcagagaaacctcgagggaatctcgtttcagatcgtaaagttctttctcaagccgagcaggatgaggccagccgcatagacaaggtatgggaagagctcttctctggtgtcatttgcttacgtctggcgctcccgttgaactcctttcttatgtctctgaacctaggcgctcgtttggaaaatcgacagaactctcgtgccgttcttaaccctcctctttttggtatgtgttatggatacctgattcaagcttagaaacaccacattaatatgactctcttctctttctctcttctcacacaatcatctagatgtcctttttggaccggattaatatcggagtcgctaaattggcaggcttaaggtagaccaagattctcgatgtcttacaatgttgagctgcgcatttgaaatgactcacctctgaccttgttctctacagtacggatctcaaattaacatctcttcaggtaagttaagcccctcgaggaaagaattcttcttcaaacactgtgctaattgcctcgttcgaatctgtccatactttcacagtatactatcgccagtacgatattctttgtcagttatgttgcattcgagatcccgtccagtaagcccgacccagacgatttgtccagattgcgcacatgcactgttccctctactaagcttcggttaaactgccactactcctctcgcttccctttagaccttgtcctcaagaaattccgaccatcccgctggattccattcatcatggttctctgggcaatcactcagactatgatgggccttgtcaagaattatcatcagcttctcgcgcttcgattcctccttggtttgtttgagtctggattgttccctggaatctcaatgtacctcggtatgtggtataagcgaagagagcaatctctccggatcgctttgttcttctcggccgctacattggccggcgcgttcggaggaatcctcggttgggctattgcgaagatggcaggtgttggaggcaagaacgggtggtcctggattgtacgtcgtctcgatggatactctcaccacttcatatatgacgcttctctcatcgctgacatgtttcatattggctcattagttcatcatcgaaggactcatgactttcgtaattgcttgcattgctccgttctttgttcatgatttcccagagcaagctaaattcctcactgttcgtccacgccacgtcaagtgttagcagtgcctccgttgttcctcttcggatctcgctaaccatatctgatcactttatacaggaagaggagaggaagttggtcctggacagacttcacttggatacaggagttgccaacgccggaacattcagctggaagcgggtcaaagatgcgctgaccgactacaagtatgtccactgtctatcctctcttttctccatgactaggattctcatttgtttacattttctttccttcgaaatttacgatcagaacttggctctttatgttgatctatatcggttgcgccgagccgatctactctcagagtcttttctcgcctaccgtcgtagcttcccttggtagatggacgacctcccaatcccttcttttaacggtaccaccttacgtgctcgccttcttcaccactgtcgctactgccatcttgagtgacagatacgggaaccgcggttactttatgatgttctgggtatgtcgtttagtcttcatcgccttttacacttacctacgcatgccctctaacctctttgttttcttctttcttgggtggaccctcgatctttgcgttcttgatagtcctctctggccctcatcggatacatcattcttgtcactgtgccgatccaccatcccggagttctctactttgccatcttcttaaccgtcgccagtatcgctcctcaaatcgccattaccatcacttggacgagcaacaacttcggaaaccactacaagaaagctatggctatgggaatggtgttcagcctgggtaattctggaggtatcgtttcctctcaggtctatcgtccgaaagatactccctcgttcaaactaggacacggcgtaaccctcgggttctgcgctatgggtttcatctgttctaccatcgttcatctcttgatgaagcgcgagaacaaaagacgagacgagctgtacggacttccccccacacctttgcgttcaggagaggtccacgatgcggatactctccagagacttgggttgaacgataagtcggaagaagaaatcatcgcgatgggagataagagacctgactttagatatatcgtgagtttctttttttcttggcggacggcgatcagtttcgttcttcgctcttcattcaacacagtgactgacaattactcctcctcggcctttattttcttctttcagctctaatccttctgctttctctctttctaatattaccatgtcaaaacatccaaatagctttaggaaaacttgtcagctcgaccgtcctttgaccccaacctttgtacattaactatttcttctcttccttcactctttactctctatatctcatcatgttatcattgatagagctcactagtaaaattaatctgttctttattgatactcgaatcctattcatcgtccaaacctccttctttcgtatctttgacaccctttgtattgtcccatgtgaacatcaaggtcttgtggcagttaacattaaacagagtacatatgctgtgattcggtcgaagcgaagttagcacaaatgctataatatatcaacaaaacacaagactaactatgagagaaagagaggaaggagagaaagaagaaatcctaataacgtatacaaagtgtatagaaggtaaacatagagatagaggaacaatagatgatcatttgaaaggtctgaagaatttagcagatccagactgcagatcctccaacttgtagctacgttccaccaatagaaacaacagagaggtcaatattgtgtactattcactgcaggccagtttcatcgataatcacttacctagcagcatccaacgtaggatacgcgttcgccttcccgacggcctgcgcgacctttacctttgacttcttggcttcaaactccaacaccacaccattctcgaactcgacatcagtggtgtagtgagtaaggcctttctttcccctgaagtgggcgtgttcaatcaagacgatgtctcccggccgaatatcgtctcgccgcgcttgaacggactttccggtttgatggaagataaggtgaccaaatgacatcccgtcctcggttggaggctggcaatgagcagcatgtagagtttctcgaacaaatccgagagaggtgccgtcctataacgatacatgtaacgcaaatgcgtgaatttcttgtcgtgtatggccattttgagtcatggttgagatgatggacttactgcaatgacggatttcttgctttgatgcaatgaagcgtttgcgatcttcaagacctcagccccgttcgttctggaaagttgtatcaactccacattggaaagatgaacatggtgttgggatagcgaagtgttatctctaactgctggagatggggtagaagcaacagaagaaggagggagaggaagctcgtgacgctcatcaatcgtctgcgatgttgtctgagggctatgactggagtctgctgagggcggttctagcgcttccagaattggacggcccccatccgaagattttcgtgtgttaaacacacccgatattctcttgagggaagaccgtctattcggtgtgataggcgacgatggcgaagcgattgaagaaggagatacaggcaactcggctgtagtttcgggatgaagtttacctgagagggattcagtgactaaaggatgaaggcctcggctcggacgaccggaaggagggggaggaggagcttcttcagaatccggagacgtaagagtaagaggaggagtagaagattcagtctcaaaagatgggacatcgaattgatagtctccaccagcaagcggaaggggaggggcaagcgatgcctcgttcacaactggtgccaggtggtcttgtgattcctcaaatccatcgatcggccctgtctcttcaggttcataggcttcggtttcctcgcgttgttgagaccgatccgtagatctctcctgtgcggttggtgcagattcttttgatgacctttcatgctcaaccggcacttcaataggcggtggcggaggagcggaagctggctgagccattccaaagccacccatcctcattcctcccatggcagccattttagctctcgccctcgctctcctaacctcatcatcttcctcctcctcttcctcgttgacagtgctcgtagcgttttcggctgttgaaccttcttctcttgttgtatcatcatcttcgttgccttcagcggtagcgacgggcttccgaatcgcaaccggtggccctccaaagagccgaaattgatttggtccgcccaatttggccatccgagcagcaatagactgtcttcgagcggcttcggaatcggcatcagcctcagttgattgtgaggtgacttcctgtgtgttgtctacatcgatggcttccacctcagcccttacaggagcaggagcgggtggaggtgataaagctgaaacaggttcttttgagagaatcggcgatcgcacaggaggaagggaaccagggttggctgtgattttttcatctgacgaaggaacagggacacttggtaagggcacagcaggccgctgacggaaggaagatggcgcagtacttcccgaagacgcagcggaagaaggaacgttgccatgggcggtatggggtaatggtatccgagcaggtggtagaggaggagctacaaaatattgtacattgtgtcagttcttcaaaattcttatgatataaaaccaatcactactgaccctcctgttcgatttcggactcatcctcctcgccttcctcaacttcagcgtccgcctcttcctcggcagaggtactagcatctatatcggtttcctcgctcagaacaggggcagatgtaggcagaggaggaagcatagaccttcttctcggaggtggaagagtagcagaaactggttcatcttggataatgagatcaatgtaagtcaagtcagaaaagcgcagattatagctcaagccaaggactggaactcagcagagaaaaaaccctattaaccttcagtttcagaatggcccaagccttcctcctccgtctgggcaccttcctcttcttcactcaagtcgatattcttcggtggcaaagggggcaatatcgtagatctaggaggaggaaggggaggtgatggatcttcgaggttctcctcttcatcctcagacaactcttcggctggcgcctcagagttcgcttcttcttcatttcagttgaattcgagacgatgacagagtaataaatcatatcatcgatcaagaaacaaaggaagaagttggacacgaacgcaggaaaggagcaggacgaattagagggagaagagcatatgaggccatgtcagaaaaacagtgctttaaatcaagaggaaaactgaggcgaattgataggaagaagtaagaagtagagtgcggtagccatggggaaggttatgatagattggagagttgcgtgcttagggcaatgccacacagttaatgaacacacgagagagaatcaagaagagctcgtacccttctctatatcctgttcgggtgatctagagacttctccggacagagcagacccttgaatatgctcttcgtttccgacaaagccaatagaggaaggtgtcttaatggtttgtctgaattcggcctcgtctaatttgacgaaggattctctctccggcaatggaattgatagtttccttttaggtgaagccacatctacatgcgttgtgttcgtatgagagtggactgaatgaccgtccgactcaactacgacggggttctcctgagtatggtcaatcgaagaagcggagttaacagcggacgggtggacctcaaggttggtcgaccggggttgagtagctgtggacccaggcaaatccttcttggtttcggcctcactagaaaccaaaggctgatcatccatctgttccccctcctcaggtgcttctaaagcgattccagctcgctccgcgccctcaacgccatgttcgcccttagccaaggcttccttctccgcgatctctgccttctcttcatctgttttaggataaggaatctcttgagggtttggggcacttggtatcggatctgatgctttgggagtggcattgggcttgcgtcgaggaggtgctgcccgccgaggcatcgcaggaagaggcgcggtggcaggagtagcggagctattgtcttctgcttgggttgacaaggtagtaagggtagatgaagacggctcgctcgcaatcgaagcttcctcagtagttgtgctatcattaatgttttgttttctgataataggagtgggtggcggcggaggaggtgcaaacatgccacgacctcccagcttagccatacgagcagcaatagcggctctgttttccgttgttgttgtttttgttgtcattgttttcaaataaagtaaaaagaggttgcactcagcgacggatgttaagcataaacgattgagagcagttctagaactaaccgtctttctttctccactacctcctcgtcgtcgactgcggctggctcagcttgttcagcttcagttagctcaggaacgacttccttgtcgcctgaggatttgtctatcgtagctgaagtaccggcctcggtattctcttcaagtccttcgttgctcttcaataagtcttcgccactcttgagcacagagccgtccaactcgtccctactaacctcctcaacaacccacttagacttcttcttttcttctggctggaccagctcagagactggggcagaaggagcttcaggtcgcttccaaactctgggctttccagaggggacaggaggagggatcggagccgctccacctatttttccttgcaatgcagccattcgttccttaagagatccacccttggtgatggattctttagcatcagaagccgacattccacctggttgagaagctggtaaggtggttggtggatgagcttcatctgcgcccaaactagaggtagcagattcgaccttgagagaagtcatcgattgctcggctgtagaagaggaggagacagccggcttgtttttccaagaccagttgccagccggcttcgttcgaatcggcgggggaccagaagtcgctggggttgctttctgttgaaacatggccattcgatctttgagggagcctccagacttgatcgactctttcgcatccgaagcgctcattccaccaactttgacggctgaaggaggcggcgaagcaaggatgggcgcaggagatgcagccatattgacaggaggat

SEQ ID NO: 734 - DNA, 897 bp, Xanthophyllomyces dendrorhous
ccaccgtcggtcgcaccgccgacagcgccgtagaacacggcctccgggagactggtgctgacagagttgatggcatatccgcctccaccggtggtcaaaaatcggttcgagaagttggacggcagccagtactgaacctggacgttgtcacccagaccggcatggctgtaggcaaaggtaacgttgcagtaggagatcgtggcatccggaaagttgttctcgccggtgtaggtctcgttgtagacgagagctgcagtaacagaggacgcattgaaggtgacaccctcgatgaagccatcggctggaagggcagcctggacgttcgacgtcgtgcagatctcggagagagaggcagcaaggccgacagagcccaagagaaggggactcaatgcacgtcgcatcttttgggaacaggaaagggaagcgtagattgaaagagaatggacaaccggaaatagacagagagagagagagaggagttgtgaggaacaagaagctttcagccgtatcctaaggagactcacttgctatagatgtcgcccttcgctcgttcagacaacgaatgctacaggtctaaaaggagattcaccgaacatgacgggcgctgcagtgaagcatacgtctgagagcctgatgacgacagtcaatcgttttgccattcgtcccgccagatggaagacggtagatggtaaacgattggtcgggaagacacgctagacagacaacggtatccgcggccgctgtcagtgaccccgggatgtaatataccggagacagagttgaagtatagccttcggagccggcgtcaccggtgtaatcggccggtcgtcgttcaccagcgtttgctgcgggccgggtttggagggcggcctccttccgctggcgacttaaccgatg

SEQ ID NO: 735 - DNA, 464 bp, Xanthophyllomyces dendrorhous
ggtatccatctgggtcggtagctctgatgggctgggggccagtcggctgaacaaagaaagacatgtttaccaggtcaaggctgatgagtctgagttcgacgaaacagacggtgagcgtgtctcggatcgatagtctcctacggccttcgtacgttcatctgtatcgcatcaaaaggcgtgagaaagaacacacatcagacatcgatcagatcgcagagacatgtttggatactgaaagcagaagaagagaacgctaacggacatgagtgtttcctgtcatgagtcttgttttgtgatgactgttttaccacgaaacacgcgtttcgactggttctcgttcgaccaataaagccggatccttgaccagagtaccgatcgtctcttattctcttgcgacttctgcctgcacaacaaccaagtcaagttccgtgtgcgtatatatatatatatatatatatatatat

SEQ ID NO: 736 - DNA, 9534 bp, Xanthophyllomyces dendrorhous
tatatatatatatatatatgtgggtttatcagaatatgtacaaagtcgatcaatagaaataaaggggcaagcaagagaagaacagagtcgacgtgcgaacactgtcagagatcgggacagtcatttggtatatttatctacccagccgaagccatatatctaattactgctttgtgtatgagatcttttcatcattatctttttttcagacttcttagatggctcacccgaattgcattcttgcccctcccttgtcttcctcactcttcctcagttcttgtcacgctcgaagctgacgctctcttcgtcctagattccaggttgggacagtccccatgtaggtctctgtgccaagtggcttgtgactctgtctacctcagaagacttctcttgacagacaccgatgtcgtgccttttcgttctacctcgcttttggagtttgccaatatcggctgttccgggcagcttcaaatttgattgaaaaatagggagctgttcgtggtattctcttcgacggagtcacttgaacaattcaatccaattcttcaattttctaattataatattgattttgattctgattcactcagactaatcctctcaaacaaatgttcgaatcgccacaaggtataatgaaggtggttgagagtaccagaagaagagaagagaagaaaaagaaaaactggcaactgtataggagagatcccataattgtgatataagggaacagaaggaaaggatagaaagacaaatcaacttgtatctctcgttgcctagacaaccaaaccctccagttgatcccatgactgctacaacaaacagaaccactcaatctttgctgttgtctacagttattcccagacagatttcaacaaatacaagcatggtgctccttcatcacaggcactctccaccttgaaaatgacggcctccaaaaattacgacgccattattctcggctctggtcctgcaggactcagcactgcccttggcctcgctcgggttcatcggacttgtgctgtgatctcaaactcacaataccgcaatgcccgaagccacgccgctcatgcaatcttgacccgcgatcacaccgatccggaagagatccgaaggattggtcgcgagcagatcgagcgttacggaaacaccgactttatcgagggcaagatcacgaaggtgaagaaggaggttggagataattatgagtttgttgtcgaggaggatgctgacaagggaggacgacggtggaaaggacgcactttggtttttgccacgggatgtcgcgatatcttcccagatctcgcaggatacgtagaaaattggggggaaaacatgttcgtgtttttctttgcctaccaaccctcttgttcaatcttctgatggagaaattgagaaaataacctataccttttctttacagctatcaatgcctcttttgtgatggtcacgagcgatctcatcttccatcaggggtcttagcgtatccgattcttgatcctatgacgatcaagctactcaccacggcgcacttcatctctcttccgccagacagagcacatgctatgcctccatctgggaagggaagtgaaacgtcacccccaaagtcaaaagtgacgttcttcaccaacggtcctctcagcccttctgatgaatccagccacgcaggtgccctcgagatttgtgccgcctacggcataaccgtcgaccaacgcagagttttgaaactagttgcagacgacaaggagggtgttcatatacatcttgctaacgacatttgtgctggcaaaacccctgattcaacgtcgtctatccatttaggatggattgcccacaaacctcctactgagccctcggttccgaatttgatcagccagtcggggcttgagataccaaactcacccttcgggagctacctcaccgcgaccccgcctttcaacagtacgagcatgcctggcgtcttcgcttgtggagatacaggcgtggtgatgacccatgtcactgtcgcgatgagtactggtattgcttgtgcggccggtgttctcgattggtgtaatcagaaggataaccagatcgctctagagatttggagaggcagggataaaagaaatatagttatgaagctcagagaggaagaggctgggactgctgttgatggcactgggtgttctgtcgaagatgggaggacatgagaaggtcaaccaggatgacctatacgtttgttttaagcaatacgtatcaagctaggtgttacagtatcttttcacatctcaatatgattgctatgtcaaaatactattgctgctgggggtaagctcgtgttacggattacatccttaaaatcagattggtctgatcggtggggtggatcttttttatcttccgtttatgtagcatctgttcaaatggaaaagagaaataagctcttgtcataaccatatgtgtttatggatgtcttgttcatttgtctggacaaaatccgagtggaggaacgaagagaaaggaagacatagagagaacttcgaagaaagcacaagcgacaaagtgtttgcgtttctttgtcgctcgggcataaagataagacgaatagagtgcatatacattttgagaggggttagatgagaattttgtgcagtcagagatgtatctaccgatgttcggcataatccacccggtttgttcccagacacttgccaagtcagacaaagcataaatcgccggcggcaaccaagatgaatgaggaaggagaagagagggaagtaaaggatgacggtaaggaggaaaatgaatccttcggattgttttcgctttgttcatcatttattgtcaacgttgttcttcatggctaagcgttcgcctggaagttttccagcctcttgaatttgctttgaaactacgaagttatatcacagtagagaaaagccaatcgatcttttcgtacagtatcggatttggctcttggtcatccttcaactcctgtcgaggatgttcctcatcactgctcagctgtatactaatgcccttcatcatcaactctcgctaactgcccgtagatagaccaggtagtcctgccaggttatctatagttgatattgcaagctctttatttattctctcttagattcttactagatgtcgatgcttgtattaccatcgtatgaggatctacacataagccgtaccgctcaaaaaattgcgcattctgctcaagccactcaaaagtatctttgagtgcagtaaagattgaacgacacagttatcattgtgactacagcatctactgaagctcacagcagtcacgctgagacaagttctgctatcgcgcagatgtatgtctgtaagttgatatattcataagaattaaaaaggcttccatggtccgcttttgactcatttctacttgccttctttccactctttcttcttgaggagatttgagtactcatcactgccaaatctacaatctggaagcatttctgactgttaccaggaatgagcagcacacttgaacaagcacttacgatgcagtttcacaccattgataactcagatgatacgttgaaagacatactacttctcatcggaaacgagaggaaaccatcgcatctcctcgacatgttctggcagagttgatatcacagcttctgatgggtatgaggtactgacagcgagcgtatgcgccctcttgagatagaccagaaatatttcctctctaacattgaaagtcggttgtcgggttgatagcatagaggttacgcatggtagaggctccactgggcggttgttgcgatgcgtccataacccagtaaacacgttcaggatataccgatttagaaaagccctaccatgcgcgtcgacaaagtcgacagcatcgatgatgaagcgaatagacggcaacgtcatggggtaattgaaaatgacatgtatccatcctgacttgaggccgatatacccctggcagataactcagtccagcctatgtaatcgctcgtcgccgatatcaagcagatctgcgccgtatagtccggcaaaggagcagccgcctcaagcttgtatgccgaaaagatcgttcagaagggcgaccataaagttgtaatgtagcgctccctccgcatgcttgacaacaaagccgattatagagggacaggggcattgaaattgccaagtatctcgatagaaggatttcggctccattgagctattgccaattgattgtaaagggttattgcctctcgatataacccgctcctatctcttgcttgattctaaactccaaccccgcgggtaaaggttcaatgatatccggtgttgctccctcctccctatgcaccgggctcgtctcgtatcgctacgaatgtttgatgataaacgatatagttctaccgcccggctgagttggtcttctatcgttcaagagatgtcgcttgatgattaaattgccgggcgtacctggaccgccaacaaacttgtgaggcgagataaagacagccccttgtttcgcgggccttgctcgccatcaggattcatattgatactgacgtgtggagcggcggcggcataatcccataaagcgagagcagagtgttgatgaaggagggaactgatagtgtccacatcagtcaaaattcctgtgacattggaaccagccgaaaaaactgccaattttgatagggcaatctttatatcgaagaagttcagctgcaagttcgacttgatcgatatatcccgagctgctcgcttggatgacaatgacatctgcgctcgctttgcgccatgggagaatattggaatgatgcccatatgggcagacaaagaccacagccctggcgtccgataagtcatctccttcttgaggtccagtatatccaccatcctgttaactgcaaaggtagatcctgatcccccaaaaatcaccacatcttcgactcctgcgcctaccgcttgctgaatgatatctcttgcgttttcgcgaagacgagatgtctgacggccagtctgggaaacctcggtatgcgtgttggcatgaaaaggcacaacctcgtgacgaacgacgtcttcaatgaatgacgtacttcgacctgacgcagcgtagtctgcgtaagtgatgcgcctaagaccgaacctaccatcgaagatgtttccctcaccaatgactgtctggcgaatgcagtcgatgagacctgtagagatactgctggaatttttggtattgtcagaccacttcatgccaggcaaagaggagaacgtagaggagggctggtgggatatgtcagtgtgattagcggatgcgcggtatgttgccttgcgagacggtcttgacttggaggcggtagcctatcaaaccataggatctctcaaagcctgatatcggcggttcataggcatagtaacagtgatgggatcagtatgtacttcaggatcttgatcgattcgctgtttgaatgtgtcaatcccgacatgagtttggtgttcggtaatcacaggactggtgtagaaatctagcatgttgttttatatatgtgtttttatttttatttttcaaaagcattgtttgaaatagcatatagataaaatagggttttttctcttcttgttcctgattttctcagtcacttcacttgcaccttatattggtatatatttccgtctcaaagcattagaatcaggttgagaacagtataatcatgtttgaagcagattggtactgtatctaggtgacccttctatatatctcaacataagaagttccctgaatttgctgttcgctcactcacaaaaggaacaaagatatgtgtctgtgcgctgacatccgcccaactaatcagagttacgatcggcctttgacggatgagcgcttcgattaatggacaaaccatctgacgatacacaacccgtataactcatcgtggtccatggacctcttgtttttcattgccaaaatatgttcatgtgtttcaagctttttgggcaatagacgctgtctagaaacacccctgacggatcgcaaaagttcgacgaaggactaatttggtgcaagtatcgtttccaagtcaagggagcgacctagtctcgtcaattttctgcttcgaacatggtgcatgcctggcagctatgtggatatatgctcgaataaaaattgctaaaaatgaaagggaacgcaaaaagagaaggtttttaatgggcaactacgatgattgtagaggttttagctcaagagtacatgtatatatattgactagaaaactaccgaaacgcacttgctactcccatacgctccatctttttcctcgtccacgtcggaatcacgagatatgccggaaaacgaggcgataaggaaaagaaagtagaaagtgaaggcatacgcttcagacataatgggtgacaaaagcatacacatccatgagcacacagctccgctattcttccggcgcagccatcgtatcagctggacatgagtagtcgtccgaccaaggcaggcataagtgcgttagaagaggaagggaaaacaagggtgtcagatgtacgtagcacggggtcagcggatgagggtgttggcttcatgttatcatccaggaaggtcagtagatactgatggcggacgacgctcgcccaaagaagaagaagaaatagaatgaagtgatgaatactgaaaggagaaaacttggccatattcaacaaagtcatgacattttcgaactaatctacctcatgttgcttagttctgaactgactaatctgagagaaaagtggtagaagagaaagaaagtaaaaaagaagagaggaagggtagcctttacatttcaatgtgagaacagcagcatccggttctgaagcgggatcacccagagctagctcataaaaaacaaagcccttcttggtggatggaatgctcgataggagaagcgttcgtgaatcactcattttcgagagatccaacctgctctgaggagagtagcggctacggctttagcaaacagggaatgcaccacccgcgtaggatggatctgaactcaagagatacacagaaagccatgcttagttcgaatgatcatcgaccgtcagtaaaccatatgcaaggcagcgaaaagacgcaccgcatcccagtagaagtatgagtccgggtcagaacatatgctggagccgatgacacacctccggccgatcgtctcgttcgccaggccgtaggcctgaggctgactgaggatggccttcgcagccacccatgtgtcgaccacgacgaactcagcagtgggcaacgtcgcgttctgaacggctgatgcctgagcatcgatctcagagtagagggcgttgttgtagtcgatcaggctgttcgtcatcacagatgcgacctctgaccccatgagatcgacgaaagggcggccgatgtcatagatgttgttgatgacaaagtgtttggcacctgaaacagtcatgtctagttagtcttcagatcccattcagatggtgacgtcgctccacagccgatgcaagcagccggccagccgagaacgagaagcacagtagaatgaatgatagaagagcacgatgagaacatgccagaacataccggcagcttgcagcttctcgataccaatgaaggtatcccggacgagatcagccccggtgaacgaaaggttgctctcgatcttggcgaacaggtcgttcgatccgatccagatggcaaacagcgtgtcgtcaagggggttgcgaccggacgacgagtttgtcaagctgatgaacgcatcgatctgctcgagggccgacggaacacgacgggtgacattggtaagataagcaggcgtccgagtattgttgacggtagcccctccgctagctggagaggacgaggccgatgtagagaacgacaatcacacctcatcagatcagggaaccacgctcgcccagagtacacatatcagaaaccgcgtggacagaccatagtcaaacaacgggacatccatccctggaaatgaccatagatgagaaaaagatcagaagatttcacactaaatatagtacacataacgaagccgacatacgttcggccaaatcttcgatccagaccggtccgttcgaccagcggtatttccagaatagctattcagacaagtatgcacggatgtcagggtgctggtgtcgaccaccatgtctctcatcgagaaaagcagggagtttcttacgtcggggtttggtctggtgccattcgagagaactccggtgccgtttccattgtcgctgagtgaatccccgaacatgaccaagcgggaaaagttggacgagtagacacctggctcacgaccaggagcaaacatcgtcatgttgaacacagcggcaggatcggacgtgctggtctgatgggccgtcgaaggtgctgcgtccacagaataagccagagaaagggaggcccagagggcagaaatgagggcagaggaaatcatatcgctcaagtcgggtctgtttgaagatggggaaggaagatcagcaagaagtgaaaaagaaacgaagaaagaagtcagcacaaaactgttgcagctttatagcccatagttcactcacacccaactcatgattgccaaaagtctcgagtgtccgttggggatgatcatcgttggggcccaccagagtcggaatgaagctggcaggcgatagatcaaagaaagatgagcccttatatgtcacctcaaccaccccacacttatgacgctgtcctgatggacgctgcctttgtgaacccttcaggtgtcagcatctacgaccagccagtctgcaagtagtccgagaacgtccgagtgtactgttttgatgtgggtcagagcttccagtcagtccgtccgactgcaggctgaaatgcggtagccaggccattcttcctgtcaagtcgcaggtagatgtctcaccggaacatcgatgcgaccggcgtacccctacgagagcaacgtccattagcaagccgtgaattctgtggatgccagtctcgcacgaatctggcaaagtcactggccctgtcattggtcaattacagcatgaagtgcgcgatgatagtcagtcttcaaacggcgatgaagacgacaacggggggatgtcatagaagctgtcagatatcggttgcttgtagttgtggtcgagcgagactcgagagttaactactgactttcctatcaacaagaaaacccagatgactacgccgacgtgcgcccgagccatcaccgcaagtcacgtcgttttcctgcaattggttcggcgaccaatgtcgttcggaacgactcatgatccaattatcagtatcataaagaacgaccgttcacagtagctcatcggtacgtgaaaggaacccttcttggaggttcgacatcatacaacatgcaatacctgactgaccgaccggtggatcaccttggactagatgacgtcagggtgatccaagttttcgcgtgtcattttgtccaaatagatccatctcacccgttcacccgctccgatctgccaagctacgttgctcattctttagatacaacctgtctgttcatcatgtcgtct

SEQ ID NO: 737 - DNA, 392 bp, Xanthophyllomyces dendrorhous
gtctgttcatcatgtcgtcttatatatacggaaacaaaaactactctatgtacgctgtgcctgcagcttgggtcatgactggtcagtgtttctgcaatcgattcaacgattcggcgcactcaacgtctacttactcatggcgaccccaattgggcgctacatacagccgcccctttcctctatacccttcacacatggggtcctctgaaggatggtgagatacctaaattaagtatggttttttttctcgatcagacttgcccatagaaaacacatagaacgggaagggtcgaccaatgtcctgtctatcaacttgactacgagggttgaaacatatatatggtccatcttgggctgactgatttttgcgttcaaacacatatcgtttttct

SEQ ID NO: 738 - DNA, 939 bp, Xanthophyllomyces dendrorhous
ctataggtccccagagatactttgaccagcaggaggcgaaagagaatctgaccaaagagtacggtctattcttgtctttatcagatctactcctctttatgaggtatgataaccggctgagtatggagaggctgaggctgatgtagtcttctacattcgtgatatagcgagaagttcgtcctccgagctaaggcggctcaccaggatggaatagataacatcccaatattagcattggctctggtaggatgacctcctaatgatatgtcttttgcatttgacgaatggagggaaaggcatcgatctgatgtctgttctgtcattcgcagctcaccggaaactatgccaagcttcctacctctactttgaatcgtttggctgctacttatcttatctccaggtattttctagtgaactactgtctcttttctcgtcttccttcttctcgaatcgattgagctcacctcgtcttctcattgttcccttcatttgctgctgtctttcagggtgttctactacatcgcatgcatcaatatcgatagagatgatgtatatcctcttcgatctgtctcttacctttctggaacagcgtgctgtctcactctgttcatcaactctgcccatgcgctctatcttgatagttaggatgttcatcttgtccatgtgcggctgagcatataacaaagtctgctagctgcgtacatgtcagcaaccgcatcgggtggcttgcattgtatagaagtagatgatctccgactgcacatgtttctgatctagcctcctctgatatctgtgtgcgatcttctcgtcatgcttctttgtccggtcgatgagagatgcaggcactttgccgtctctcctttcccagaaacatagtcaggaatatagccacagacatagtctgagatgtgtaagaaggaagtacagtaaaccacagac

SEQ ID NO: 739 - DNA, 1551 bp, Xanthophyllomyces dendrorhous
gttacttcatgggcggaagagcccagaattcgacacattgcgattgggattgcttgtgattcatctggcatgagtcccggtgttatgggcgcaggcaagggggctgagtgaggacagtactcagtacgcttgagctctcaggcaggaatggatcatgcaatactgcagagtagggatgatgatcaggaactagaggatttaacgaggttccaagcttgggaggcaaaaggggagatagccaacgactacctagtatatatgtcattcgagatatgaagccaaggacacacaaggaaacacaagcaagagcgaagagataccaaggacgagtcaagatgtaccaagagagaatcaagcgataccaagagagagtaaggaaggccacgagctacatgatctcgatgctaagtctgttgcaagactaagtctacaatgcgcaaggtcaccctgcgcgggtcaacccgggtcagatcatgacactcgcagaacgaacggaaagaaagcggagaatggtagaaacgaatcaagtcaaccctcctttgtcaccgatcggcttcttgatcttgagcaggatttctgtcttccaatcatcgagttttttgacctggtcgtactcgaccacatgggcggtaaaggctttgacatcgccgtcaccgtatgcggtcacgacgttgttcaggaatcgggcttccctagtggaggggaaagtatcatctttggtgtggacgcacacaacggaaacaggaatgaagcagtgctatggttgtttccttgtattcgctaccaaacaaaaacggacacgataggacaaaccttgttgagcaaacttgtcgactagctcacgagccagcacgacatcgtcagctcccagcgcactgaaccatcagaaacaaatagcgcaattagcctgatgggccgttcgcgatctctggccgcaagaggatgaaagcaaaacggaccaaagaccagccttgagccagatctccttgacgctgtactttgccagtggactgcttagattccagtttgcgacctggacaaacgtatcgatcgcccgttcgtaatctccaaccaagccagagatctctgctgcccctctgaggatagcgtttcccatgctgtgaatgatccgagaacgtgaacaggaaagcgcagagcggtcaaacatggtgcgaacaagaaagaagggagagatagagaacctacgcttgggcgccatccatctggtacaaatgtcccgccttttcgtacgcgtccctagcggcgggccgattcgacactctgaagatgtcgccgacttcgttctgtcgatcggcagcttgccggaatcggccttgctcagtgagaatcttggttgcccggttcagcgcgttgacagcgtcccgaacggaggtttctgaagtggatcgctttaacctgaggcggatgagaagaggtaatgtggcgtcagatgggggaggggaacgcaacgtgccctcggcgagggtcacagagcggtatagggaaagtaagtggaacttacaattcggatgcatcacacaaggccgctat

SEQ ID NO: 740 - DNA, 1316 bp, Xanthophyllomyces dendrorhous
gcgtcatccttcttgttcgccttgagtctacgttctccttccctgagcgacggtaggacgggttgagtcaacaagcagaaagacgagagctgattagggtgacaagccctgggtctgatcttggttgtcaactcacctgaccaaagctctgccatgaagatcccagtactctccaggattgaacgctttgcccgctcgatgaaactgtggtggtgtttccgcaacaagatcaggtagatagaagctcaacgatcaatcagctggacgaccgtctgcggtcgagtggaaagaaaaaattacatgcatgaggatgaacaagatcggtatctttctcgaactttgttgctgaaaaagaggaacagcttgtgagagaagcaaccttcttttcaagcctctgccaggacacctaccgaattacaatacttgttctgtgtgcaagtgtgatggagctgtgaggtgtgtgagagcaggtacttgatggatgagtggatcgaacgggaagtgagagaaggacaaactttgtcatagcgtctttcttatagagctttccgtcgtgctctcttccccctccctcccttccttacttggctttgagcgttcgaactctcggctctcagttgatctttcgtatccgcgcatccatcttctgccgaggcatccgatccggatacacataagatgagtcatctgttgggaatacttgaataccatgcatcgttttctacatatcatctacctacctacttaccaacctagctagctagctagatatgaacagaagaagtaggaaacagcctagcctggtgcgctagctgagtctgaggcagctaaacaacaaatacggacaatgccccgtattcaggtattctccgcgtacacttcgtcgttttgtcctttcgtgtttcttgatttttccctttttcgcccatatctccatcaatcctgcccagactgccttcccacttgcaccatcctcaccgggcagcttccctccatcgacccataccgttctttccatcttttcgtgtgcttcacttctctcgacttttcactggcttgtctccggcttttcacctgctggtttcgtcatcttccatttctatcagatcacctcacagactctatcacctcttgtcacaatgtctgctcgtttctatatatcctgttctatcgatctgtttttatttcatttgtctctgatgctcagagtctgccctcgcatggctcgtgtctcttgccagtcatgtcaacagtgtacatactcgactgctctgtctctggtctgagcgccatcatgaacaacgaaagaagagtgc

SEQ ID NO: 741 - DNA, 1680 bp, Xanthophyllomyces dendrorhous
tagatacatcacacaacatgacatgacatgacacaactgatcgctactcatccgtgcgccatctcttcctcttacagttttgccttcgtctctgcctcgccctcctcgcccacactctggtcctcagttgactcatccagccgcagtgccttggagtggccctctgccagtatgttgcttaccacaatcgatgcatcttcgtccatgctagtcaccagtttgccagaggacaccgggtcctccggtatgactatgtagtccatcagtggatgatgctctgcatttcgtcccatcttgtacattgcctcgtctaggttccaatgagtttccccatcacgtgttcccacatacagcttcatgttggaaacacggtagactagattgtcagtgttgatgccgtgggcggccgccgctttccagaactcgctcggctgtagctctctcagctcagctcttccacttgactgggcgacaagctcgctcagagggaagtcccccaattgacccccctgggtcgcagtgatcagccagcaatcgcagtatacgtcacacacgaatggctccctgaccggtgtgtatatctcatccaaagtatccggcttgtatcttctgttgggatacttgtcctccggcatgatagtcgatagctgaatgaaagctctaccacggaacagccaggacaagtctcgatcagcgaagtagctttgcgcgcacacactagatctggtgacggacgtactggcggggagagtggagttgtcaggtcagtacggagactcgataagaactgaagatgacgcaagctagacaagatagattgaagacagtgggtgatagaagaagagcagtctgacgaaatgtgacgactttatagaaaggcacggcgaaggaaaagcaaacgaaacgagtcgccacatagactttgtttcgtcgttccaagcttcctcttctcttggcctgtccatcttttcttattcgtactttctctcttcttcagttgtttctctctcttctcttcagttgtttttctcttcctgtttgatgccattttcattcttatactcattcctttcattcttgcgctggtttgaggcataggctgacagtatcgaatacgacccggatgtacagtctacctctctctcacattccttcgcttcccatcctttctactctccgtgtcagagatctggccgagttgtatacgtagtattcatttgcatacgatctcgacaacatgtgtttcttacctttcgcgcggtcgatacctgtgtgcatctttccgccttgcacccttttggtcttcaatcctttctttactgcatccttgcccaagaggcgaagagacaggagtgctccgtcgctttccttttctatactgttcttcttctcttttctctcacgtttgagttctgtgaccctcattcaagatcgtttgatccatgattcttaaaatgtctctatctctggcgcgcctgtgaagatccaaaagtctgagtttcgaaacgatttgagacaatagaactcttcacctagtctagtcgcgacatatcagttgccgcgctcttccgcccttgcgcatctactcgttccagtatatctagccattcgatacattcttcacttctactcacatgagcacggacggggcaaaaagaagtgaccgtagggtgaattgaa

SEQ ID NO: 742 - DNA, 5968 bp, Xanthophyllomyces dendrorhous
tgaccgtagggtgaattgaacacccgtcgtccgcgactttgcgtttcggctgaagaaccacaagcggaagtactaaccactatactatacgatcctggtatcttgcaggcggtcgatagtaagctagactgttgacatgcacgcataggttgatgaacacacattggaatagctgcctgactgttacctaagattcagcggtcagagtgatctcttcgctttggcactcgctctcagtcatgtcctcactgctttcccacagccataaacacactatccaggtgtgccagtaggaatgggtcgagaaaccaggagaacagaagagaactagctagacgttcagcagctttgtgaagagacgctctcgggacccctcacaagatctgtgggtgctgcgtttgggagaacgagagcaaagtagaactacaatgatgtcaaaacggtcaaacacgcaacaaagatgagtgcaggccaaaaggcatgcgcctcgtggagattgcgagctcgcgtcgagggctgaccagggttgccacaatggctacggcatgactacagaatgtgacgtaccacgattacggtctcccttgttttggtcttgcagccggatacctcatctcgtttgacagtccgccatcacagtaactcaccaccggttctcctcggctctctactccttctcctcaccatcatcttcatcattgctctgctgcatcgtagaaccggtagccaccgcattgaagctcgtctgctgcctgggatctatagagacactgtgcagagaacgatatagtcaagtgacgacagaggacagaacacgacacgactgatgtcttgttctcatctaatggctgtatgttcctttcatcacgttgcatcatgttgtatacgatgtcgtttttcggctgtgtttgtagtgattgaaagatatggtaatcgttgtgctacgatcgaggtgattcgtggggtattttttgggttgttttgtgaattgctggcttggttgagttgtttggccattgggatgctggtcgttcagtgtcagaacatgcccaccagctcaggctctcgagaaaccatgcgatggccaaagacgtatgcgtagacgtgtatgtgaagtatgaagacgggtgcttcgaatagaaacggcaggatccagatacgagagtaaatgagagaagatgacagaaaaaaagaagacgaaagaggaagaagacacgaacgacgaagaaaggaaaggcaacaaagtgcttgtatctgtttttcatacaaacgcagaagcaacaagggaagaatgcatacagacctcagaagctgggagatgggaaacacatagcgtcaaggttgcatctactagaatacggtgtgagccactctgaccgatctttgacggcttggtgataggtatgtgatggctgtcgctctattggttactagttgagattcgtggtggtcggtgatttctttctctttgccctattccttgtttactttctcctgccctcactctccgttcctctttgttcctttccttgcctttgcatttcgtttctttctctttctgcctctacttctgtctaacccttcttctgctttcacacatgaccgacctcgctcacaagcatatgcatatatttgtacatggcactgacaccctgagaacgtcaagggaacgatggcgctgggctgttggtgctggatctcgagcattgatctcgagcttggatccttgtcgctctctctcgtttgtcttacgtcgctgactgtgcttgacaagactatctatctgcatctgctggactcgttccctaaaatcccgaagtctatttctcgccttggcacccgtgtcaatggtatgcgtgtgactcactccgttggcatcctcggtccgtcccatactgccggccaaccgtgggtcacgtcacacaaaaggtggagaaagacgtctgagtcgccaccacatccgtcgaattactcgtcgtaccactaaccatgctcttttggttcaacggaggattcaacgtcctacattgggtcaaacggtttcagaccgattttgacgaagaacgatcctcctctgaagagtcagtttgtacatcagatctgccatccgtcgatctctcaagtcgatgctgacctggcttgctttcttgtctgcttgtgatagaccatcgttcgtccaatatctctttactactgaatgacaaggaggatgactagcagcatgggcatctgttgacaactctgccttgttgtcttgttctcttgtggcttatcttgttaccttctacagaacatgtaagcttccgtcggcatctgctagtaggacgaaagtgctccgactcatcctgtcctattcgctttgatctgctccggccttagtccaggacgtggagactctgctccagacagaagatgatctgcaccaacaggagctccggcgtgcgcagggatcgaaagaagtgggacaacccctgacgtggagacttcttgcttacgacggcaagcacttctcaacgcgtccgttgcaagagctagaacggatcgagctgggtgacatgatgtggcacaagattcactatgtaagcttcttcctatcttatctctcttatctcagtcttatccttaccgttctcctatatctctatgcgacttctggcgaatcggcagccaggatggctaacatggcttggctgcttctttggctctgcttgaacactctcagggccgatatctgctcgttcggatcgtctctcgtcccactaggatcacttccatccgtttcatcggccaagacccgtcaggccgggccgagcttatcgagctccaaacggctgtcgacatgcttgtggagactggaccggaactggatgcgctctaccctatgggcagcttgctagctattcgggagccccactacgtccgatgtctggatgaagacacgatcaatgattctcatcggaaacgtatcaagttgacgaaggtatccaggatcagggtcgagtctccctcggatgtcgtctggctgggtgcagacgatcaacttgtcagcgagctcacatggacgagcttacctgtttgtccgacgaccgagacagatgctcagagactgactgctgaacaggcaaagtcaatcggagacggacggctggacaaaggatggctcatggcggccgagcgcgcgtatacggagggtctgaccgtcgacagcaagcatattgtgctcagacttgaccgagcgcactgccggatccgactctcacggttcaggggcgcatttgtcgatggcgagcatgcgctgcgtggccttcttgacgctatgcgcgcggaggaacctgcacgggcgaacatggcccattcggatctgctgcagaaagcataccactggcttgtgctagcttcgatcggtctgcgcgactggtcggtcgcacatgagcactgcactgcatttgctgagcggtttcctgattgtgctcctgctctggacttgctggcgttcacacaggccagagtggacgaggctcggacgggtgtgtacgattggccatcgatcttccggggggatcttcagccggggggaacgaggaatgtagttgctgactgggtgtcgccatctttcaaggtaggccgcagtcctacgttgggtgggatccggggcgtcatcgctgaccgaacgatcgagcccggtgagctacttgtggtatgcaagccgtttatttctgttgacttgaaggatcgagatttacggccggtgacggaggtagtcaatttgtcggttcaacaatgtttcccagaaatggcgtatgcatatctggtacgagcgatggtagacaaaatcaaggatgaaccgagggcctcggacatactgaataggctgtatgctggacctaaatactcggatccagagctggtcgatctaagcgccttcaaactgcctggcgcgctgggagacaccgagaaggaggatgagccgcgagatgtggacgtatcgaggctggagggggtcagggcattcagctcttttgcgactaggtcagctgttattaacgagactttgcccttcaaatacggccgatatggagatcaattatgttctggtacatctcatctcttgccttggtcatggtccctcttttctctgaccttcttgctctctctgtcctattgtcttctctaacgatgctttgtatgcgttacatgtttttttgccaaacgatatcaaaccttggtttgtacaggtgtctaccttgtcccctcgttatttaaccatgcctgcttcgccaacgtcagttgggtgttttggggcgacatcatggtccttcgttctcgccagactatttcgccaggcgaagagctgaagattacctatcttcctggtagatcattggttcggcgaacaaaactgattggcaatctcgagattggtctatgtgactgtgtcttgtgcaaggagaagaggcttgaccccccaaacagacgtaccatgtggtcagactacgtatggacatctgcgtatgacgaatacatattaggagttgccgagatagaatatgggaagatgcataggccgaaaagaagaaccctcaagaaggtcatgaaaatgacccggtccatcgaatcgacatacgatcccagacgctcaccaagtttcatgcctgagctgttccgcttctataacaccttgtcgggccttcacatgaataaagtgacgggcggcatgaaggaccccgtagaaacgttgctgttgatggagcaagcgatctactggaagaaacgtgcgcttgagtgttgtgggttcaaagggatagagtctgatgggagagggacaatgacgtctagtccgttcacatacgagacgagatgtatgagtgtagggttgtcgatcgtgtcgatactcgatagcatggataggaaggaggatgcgcaacgatgggccagagtggtgttggagatgcatgacatcgttttcggaggtgggaaggaaacactggtcgttctgtggaggggtccgttggactcgatgaacttgcttccgtacttcagttgacctcgtgtggatgagatcgcatatgaatgcatgtcttgctttgtatcacaacagcgatagtactaggccaggtagtcgatagcatatggtgtcttcccgtgtgtcaaactagacgcatcacgatcgagtggaacaagcagaggacacagagaatcttgtcatctatatacattcagtcctcagccttcgttcgcttctgcttgtgcttgtcagcaggcacaacttgctggtgcgcggctgggtgtcgagcgagttccgaagccaaagagtatcggtgccgacgttgggcacgtcacgtcagtcatcgtccagagcttattactctcttatgaagtaaagcgaatgacaatacagaaacaataaaagaggaatgaaagaaaaacaaacagggaaatagagagaaaagaggataaatggaggagggaggggacgaacatggcttccgcaccttcttgagacagaaacgtgatggcaatacccgtctgtccagctcgatcggtatatcccatgacttgcatgcggagggcagaacaagaaataggattggaccggttcgacatgcgtaagcctcgatcgcatctgacatctgccaggtgatgacaagcgagacgaccccaacaccgacctctcgtgcagcctgtgtgagcgagcgcagatgccgggcattggttcggccgtgagctaagtgggctcatcggaaactgacaaaatataagagagccgaatcagattgtcggtgaagctagtatcgcacgtcccgtctcttgagacttgacaaagcatctttccgccggtcctgcgacctgttcgagtggagcgccataacagaagactgaagctgagtatgggaaacgggaatcaagtcaacagagtcacgtacttgaatcagcttgtacaagtcaaagatgaagagaggccaagggt

SEQ ID NO: 743 - DNA, 382 bp, Xanthophyllomyces dendrorhous
acagaaagggaagtaaagaagggcagagaggaaagcagaaaagtcgaagagacaacggacctctgctcgctgagcgctctcgagaatggtattggccgtcttcttctgtttgcgaatgattaccatggacggtgtcaagccagctgtaaggggtatctgtatgttttgtcgttcatcgcgatgagcaacacgccagagcatagtaaagcagaacgacatataaacgatcggaacaagagagcaaacataggtagagaacgaaggacagatctgatctcatttagggttagggttttagattcatagatagttcttttagcaaggtctggttgtagcgagcaggaagaagaaagaaagaggaccgacaggtgtaggaggtgta

SEQ ID NO: 744 - DNA, 965 bp, Xanthophyllomyces dendrorhous
gtggaggagcgtacgccctcaccatgttctccagtactcctgtcgtcacagtcgacccgacaacggtcgccaacttctcgtccgccggctgctggcaagactcagctaccgaccgagtgctcaccggttcgtcctcgacactcggcctgatgacgacggcgcagtgcgtgtcctcttgcagcacccagggctttatctacgctggactggaagcaagcttctactgctactgtggtaacacgatcgcctcgtcaagcctgctcctggctgcttcatcttgcacgtcaccatgtggtggtaactcgaccgagatctgcggtggtccgtccgcgctgtcgatctacagtaccgaagcggtagagaacacagacagctcgaacagcacgtggaccgatgagggttgctgggtcttcaatggtaacgacacgaccacactgtctggcttgacgacgtcgtctagcgcgatgactcagtcgctctgccgatcgcggtgtgatttcgggggctatgcgttcgccggtctgcagggcgactactgctactgtgctaacacgatgggcgtgtcgagtgtgctcttgtcgagctactgtacctggcagtgttctggtagctcaaccgatatctgcggtggctcgggtacgatgtcactctctcgatcaacctcggcggcggcggctgctcttccagctgctcctggttggacggcgctcggttgccgaagcgactcgagcgaccgaacactgcttgactcgacccaggtcgtgagcagctggatgacggacgattggtgtatccgatcgtgtgaaagtcacggctatacgctcgctggtctggaggacggtaacgagtgctactgtggtaacgagatgagctcgacatcgacctacctggcttcatcgtcttgttacaagacctgtccaggactgggaagcaaacaatgtggaggagcgtacgccctcaccatg

SEQ ID NO: 745 - DNA, 697 bp, Xanthophyllomyces dendrorhous
tcatttccttcattttcgtattttcatacactgtgatgtcttcgttcattctctcgtctttatgcatgtcgtttttctctccatttgctatatttttttaccttcatcatctcttcatatgcttcactctcgtcagttgcttcactctcgtcattcgcatcactacagtcaccctcgctgttctctatacttgctcttgctcttcctcatcccacactcgctcgacgttgatcgcttctcgttgccatatatgatatatgtcgttcgagtacacacccatcagctgcccttctctttttctctctcgcttgatctccgccttgcctttcccaagcgatcccactcctgtcctcagctcagcacagccagtcctcgtgagccttgtttagccacacgcacccactcatgacactcaccagacaccctacagctcaccataacacgtctctcctggcggccatgcagctcatgacccgcgacctacgacccatgtcccatggcatccgtgagcctcgaccgtccggcaaccgtctcgacatcgtcgtccacgctgaagacacgcccgacaagcccctctgtctgccagtagctcgtcactcactgtctgctgcttcctcatgctgtcagatccctgcgtatcggtgcacatacagctgcctccatgtccgtcaagaacctctcgacagccagctcgtct

SEQ ID NO: 746 - DNA, 762 bp, Xanthophyllomyces dendrorhous
cccgattactagttctctcaaactgattcctctgatcccctgattctctcaacaagaatacacacacagagtgagtaagttgattgagagaatcagaaaggagaagagagaaaagaaaacaaactagctactgtatattcgagatcaccaagatggaaacgatatagaaacaagatggaaataaagtagaatggaaataaaacgagagagaagtgaaataaagatgatgtagaaaatagaaatgaaataacatgttgaacgagaaaccgaagagatagaaagtcaaccaactcgcaacactcggtggttggtgtctagactgctatatccaatacttccatcgtggctgtttctcttagtgtctttttagcctctttcttcttatctttcttctcatccaagcacattgtgttctctcacatatatctgcgctcgatactttcgtttcttttcttttctttttctttttctttctcttttttgttaagaatacttgaatatggtgcattcgtttctgcttatcatctatgtaccttaagccttagctagcgcactctgccagctgccatacttcttttcttctccttccttctttttttctttttctttttctccttcctcagcatttaccataactgtttcgttggtgctgaggttggttttcttctgtctttatgttgttaacgctttccatacaaatatgcttacaaaacgattgtcattagattactttattttagtttctcaggttcgtttataaat

SEQ ID NO: 747 - DNA, 484 bp, Xanthophyllomyces dendrorhous
  misc_feature (73)..(82): n is a, c, g, or t
agataccaaaattatgaaagtcgaaaacaccggtgcctttcatgatcagtacgcgacgcaattgaatcttgannnnnnnnnncaaatacaggagaggtcatttgttcacactgttacaagagagcgaacacaaatgtaatcccttagataccaaaattatgaaagtcgaaaacaccggtgcctttcatgatcagtacgcgacgcaattgaatcttgacgatttttgttctgatcagctcatttcaaacgtacctttgtatcgttttggcagtgctactcttcttcgatttttgattcgactactttatcaagtcagaaaatgcttcaaaaaggtggaggttaagattcttcatattccgttgttctagataattgaaaaatactgtaagcagctttgatattcaaatgctagaaaaggtctacttgtacaatagtatgtaaggtacgcttcgttcattctgaatacatgcatccaacttcttat

SEQ ID NO: 748 - DNA, 459 bp, Xanthophyllomyces dendrorhous
gtcaggaaccagagttaggtaacatatacacgacagcgtgaccatgctcacattccattattcatcatgccttccatttcgttatgctccttctcctcaccttatgcgcttgataatccttctcagctacgttcccttgattagtgataggattagtgatatggattagtgatctgttgcttgataatctctagttgataatcctgtagtttagtaatcgagtggcaaccaggtggccacttcatcgtagctagaacacataaaaggatcgcgtgcgcgctccttcaagatgtggttcttcaagttaggatccttgttaaataacctagtagctaccagtgctattcaatcacgattcatcctctcttccctgagcctggaagcctaaacctccacgcctcgagcatccctagtcaactacagtcaccttgcgtaaccctgtaacccggccccttacac

SEQ ID NO: 749 - DNA, 798 bp, Xanthophyllomyces dendrorhous
acgaggtagctcccaccaataaggggtccactaccccacctacggggagcacgaggggacaagacaaacacctcctgttcatccttctacaccacctaataggtgtagaccaaagcctaaagattcatatacaaacatgctaacggcgaagttaggcctcgtatacggctcaatcgttgcagaggcctttctgaggcatcaataccctaatgggcagagcctcatccagcgctcacaagagtgctctaaaaagtatagggctctactagcccctaaaggtttataagtagagcttccatagctctctaaggcgcaaagccaaaaagaagaatagtatcctcttccaaatcaacaagccaatggctatttctcaaaagtcctctgcgagggagagcgctcgacgtcacatgtcctttccgacgctctgacgagtacaatacctcaatagccaatagagaccgcttaaacttaccaaagagggctctagaggctacaagagtttttcaagaatggggtaacacccctcaaagcggggtccattacccctagcaagctaaacaaaagcaaaggcgttctctgcagagtaaagccgaagctaaacaaagcttaaaagctagagcttttctcagtactcaaagagctcagaggctaagcctcctatctatgccatccaaaagcagatagataggagtgcttagagtgaaagctcgtagagtaccgcgcacatgcgccttcctcccttacgaggaaagctttcaaagtttaaaaatctcttcaaagctttccgagaacaatagc

SEQ ID NO: 750 - DNA, 326 bp, Xanthophyllomyces dendrorhous
  misc_feature (227)..(236): n is a, c, g, or t
ccttctctctcaagtttagattccactgtcttcgttcgaagcatctctcgtcttacctatcacaaggcagaattgagccagcgcaagtccaatagaagagaaagaagagaaaagtctggcaaggcaagcatctgagtatgtgttgagcttattctatagagatcaaagattgagaacgacagcaagactgttggccgactcgactactctgaggttcatgttgtatnnnnnnnnnntgctgtctatatacaatctcatcatctggctcctagccatgcgcgacagagtgatacagctgctttttcgccttgcccttcttcgtcgtt

SEQ ID NO: 751 - DNA, 552 bp, Xanthophyllomyces dendrorhous
gaagacgaagacgaagacgaagacgaagacgaagacgaagacgaagacgaagacgaagacgaagacgaagacgaagacgaagacgaagatgaacatgtacatgtgagcatgatagcacagagaacgactctcggcggacagaccgtccatacgtccgttacccgtgttcttgttcggtttcttgcgttcttgtccgcttgcgtacgttcttggttgttcgttctctggcccatctatatctggtcgtgttctgtcttgccgtccgatgaggagagcaagctcggtgggctgagcaaatttgacgagagcgcgagcttctgactgctggtcgcccagccttgccttctctccgagaggctgaacctgctggccatgccttggctagacgatcatatctgtctggtgtttctgtttctatcttgtctctatttttgtgcgagaaacatcagtgtgtgccgtgtgctacatgctgttcccttttccgtcgatgatctttccctcttgcccttctcgctcttctttcggctgtgctctcttctcattcgctgctcc

SEQ ID NO: 752 - DNA, 2410 bp, Xanthophyllomyces dendrorhous
cctctaggagcggaactcagctgggtgcgggactgtctaccgtcttgagtctcagcatgggactggccacactccttctctgagcatgcgcaatcttccagcaacgcgggctcgatcgatccactcgttattctctactttattgcatttcactctcctttttcactaccactcgatctttctgcctatcatcgcgtttcatcttgccgagaacatacctctggacactatatcgaacacacggactcttttagagatacatttaccatccacatagctagctaccccatctcgtttggcgctctcgaacacgatttcaactgaatttgctcaacatagccttattccggtaaaatctttcaggactgtatggggttgtatctccagttgtttcgcacagttcgactgtcggatctggagggaagattttgacgatacgcactttgcttattatccacagccccgacagatatacttggcaaaaaagtgttttacacaatggctgtgccatccttttccaccaaaactttctgtggcgttgaacggcggccgtcgagcgaatgccaacttaccgcacttcaaggcggtgcaggggtcaaatgaattatattacaacatcgagctaggagcaccgctacctcatctccaatccgtaatgagccacttgagctttgactaatgagcggtactgacggcggccgtgagggcgcaacactaacatctttctgttgagcatcccttctctccgacttgcttaaaaatgaggtgtctagtagagagcatggaagaagcaacttaccttccctccgattctcattgacactcgctcgcaattcagctcacctcggcacatacttgaacaggaagaaacagatacctcaatctcgaagatgccctctcacaaggccgagatcaggctgattaacatcatccatgctatccaattcgttcttactgtcgctgtcctcgccatcggtctggtcaagatgtttatcatcaaaccgagaacatcaagctccagatggttgctcagtgtggtaagcattgactgatgttctattcttgataggacggactgtccagaagccgacactgatatccttatcgcttgtatatagtctgccaagtctctgatcacactggcatacatagtgttgagcgagaacgtgtcctacttccatcgatgggccagtttgaaggcaaacatgatactcaacatcttggaagccgtcttttggatcgccgccatcgttctaacaaccatgggattgatcaatggaggatgtgcggcaggagtcggctgtggaacaacatacgccgccattgccatcggatccttgcttgcgtgagcggtcttattatattcgaatgcatgcgattgtcgatcatcatgagctgacgatcatctctcaccttctaacagagctttggccctgccgatggcgtacctctctataaaacacttcatgaaccgaaacaagaatcagtatcaaatcaatgacgattcgagctctgatgggtcgaccccaatgataacgaagaactatggccatcaggttgtggtcaacccgacctatgcgaaccatccatcccgtgtttaaacatattttcccctgcctttcctcgctccactgagcctgcataaatactgctattcccttttggtctcgtttatagagatagatagttattcatgattttacgagcaaatagttcaacaagctaggacatcacccagattcagcactaaatttcatacagtcgcagatattgggtttgatgagctcaacctcaaccaacaacggtcgatacatggtccttcttggtcttaggtttccttggactagaatctaacaacggccagtgtctttagagtagcctatccttccaaattcttttttcattcaagctgtggccgctttggaacaccgccagcagagacaacccaccggatttcatgccttcaaaaacacacatcacgagtccgagcaaatgcagtatgtgtgatttttctgcaaaatacatatcattctgacctcatgatacgatacacaaagctggcaaagacatatctagctaccgagacctgtactacacgctctcagttgagccctcctatcctctcgcccacccggaccagggtttccatggcttgctcgcttgatcttctgatgtcttcatcccaggtcgtacttcctgtgggcgtcacaaggatcaccgtgctcccaccgtacctgttgacgtcgagatctcaaaacgagacgatccatgtcagtctatgctggctaagcatatctcgtttacccttctagacctgagcagcgatcagggcaaacgatcaaggcagcacagaagctcggtacgtacgcgaaccaaccaagctcgtctcctttctctaccttcgtccctt

SEQ ID NO: 753 - DNA, 2605 bp, Xanthophyllomyces dendrorhous
  misc_feature (867)..(876): n is a, c, g, or t
ctgggtgtgcgtccagttaatcgaaccaaccagcatggccccgacggcaacgacgtacacagtttggcccgaaggaagatggataggaaggaccgatctcgagttctcagtaaagacatccaggtcctcgttaatcgcttgctgcgtttcagaagatggccccacacaacagcacatatcagcccacgtagccacctcctagacggtctgaacggcgaaacacacgcagtcgaccacagcaggacgcaccgggtttacagtgtacagcttccctgggatgtttatgctctttccaagcgttccagacactggcgtatggaaccgatggtagtcctgtggggccagccggaagactgcaacagcaggactggggccgagagtggaggcaaaggcctcgctccccagtagcgcagggatagtaaactgctttcctttgatcctaggtatcgacatcaaccaaagacagacgtccagtcgcaaacatcttgagacagaggacatctagtgagatgcatcacccatcgcgagatccatgcttaccatatccgggtggcatcctcaacacactgccaaacagtcagtcggcagtccgcctgggagactaccactgccgggtcggaaggcgaagcgataggtcgagcatccgctctgagcttccggtagaagaactcgttgaacgtctgggaacaaggtatgtcagaccacgtgtcaaaacgctgagcttgacagtcctctcaatcagtcagacagatgacatacattgtacttgctcagatcaggttccaaaagatcagaaagcggcagtccaaactgatcgacaaacgattgtatgtgaggaagaacctggaagatcgagaatcatcagcnnnnnnnnnncgagcaggtgtctgtccggcttgactcacctggggacccatggcatcgaacgtctggccttgtttcacactctgagcgagtagcagcttttcgatcttggcctgagacatcaacggatggccagtcacgaagagtagatgcatgccactggagggaccacagttgggttccatagagtcatggctcagtcgaacgctttcaaggcaaatgggccgagtagagcgagaggatgtatatagaaactcgagacatatcactcacatccggacatagatcggcatctcttcaaagatcctctctcctgtcgaccggacgatcacaaagctacaagggtggacaaccagcggcagatcagctacgccggcgtccggtcgagcacggtcgctatgtccttgcaagacaggcttactttcccatatgttcagaagcaaaaagctgggaaacacaaagtctcatcagcagccagcacaagggaccaaaagaccgccagtacagaagctatagcaggcgacagacgccttatggggtccttctcaccttgttcatatcgtcctggtcaaagaacttggcaagccagcctcgcttcgagcctccttcttgagactgatacgaatgagcatcggactcgcaggagtctgtcttgccggctagtccagatgttggccaggatatcgacacaagtcacagatccagccaccagccggtcagaactcggtcgagatcgatctgacggtacgaagataggcggtcttgggcaacgcgagaacacaccttgctcaacgctctgcacactgcccggctggacaagatcctcgagggctgcttgtagtttgaccgggttctcgtctttgttggccgtcttgacggtctcatgagaaaccgagtttggagaggatttaggttggccgaagcttgggatgtgcatcttgcgagatgattgttcaggcgtgaacaacagcgagtgccagaggccatctcggtctggcgatgttgaccggtcgcggcgaatgcaatagtgacgtcaaccgagatacgcttcatgccagtcgcgacggatgaagttcgcctgtttttctactcaactccttcgacttggttttctatctagtagaaaacacattctgtctcagtttctgcccgaacatctgtacactgttgcaccggaagcgatgtccgaatatgagctagctagacaggaaaacatcagagccaaccagcttctgctagcgtcgctaggtatagatcccgttcaggtagatgctgctattttgtgtcgttcccgtaatcgtctatgttgctgatctctcgcttcccatgctgcatacggctcgatcatcagacgaagccagctccaacaccgaaggctgagcctgatggaaaaccaaagaaccgaaggccggctcgatccaagccgtatgagcgagctcgagcagtccctattcgacagtcagcccgaatatctgctctcgatgcgcctatatactcagaccacctttctatcgctgcatcgatggatgacaagcagggcagtattcgccgggtttactcagactcacctcctgcagtaagaaaggcgatccggcagctacctcgagcgccttctccgtatgttgaggacgatgtcgactactcgatcgtcgcgcctcaacctgcgagagacgacgacgggacattccgtttcgaggctggctacgaaggcttcacaccaaacatggctccgtgggagatg

SEQ ID NO: 754 - DNA, 587 bp, Xanthophyllomyces dendrorhous
catacgccgcccgggcatccttgtactcaaacaccttgcccacgatcggccgcatcttgtgcagcgagatcgcatcgcacatctgctcaaactgtcgcctcgagccgacgaggaagcccctgaagaccgcacccttgacgagcgcaagaagagcgacattcggaggcatatcccccggcttggccaaaaagccgatacagctcaccacgccaccctgcttgaggcacgagaacgccttctcgatcgtgccctgtcctccgacctcaagaacatgcgcgacaccctggtttcctgtcttcttcagcacctcctcgtcccactcgggcgtcgtcttgtagttgatcgtctccagtcggctccctccgagcgtcttgacggcctcggcaacctgcccaagcttctcgtcagaggatgaagtgatgatcgctcgggcaccggccatcagcgcaaactggacacagccaagcgacagaccgggatgtaacagatcagagtgtgacagcacaggtcagcattgggaagcatacgggtacacaggcgcacggacgcatgagtacgggtgcatggacacacacacacacacacac

SEQ ID NO: 755 - DNA, 763 bp, Xanthophyllomyces dendrorhous
caagaagcatcgaaagacatcgaagaatatcaacagagtcgaccgacgtacagcacaaggaagagtggcagcctcctcgtatgtcaggtgctcaggcacccggacaagaccactcgtaggcatgatcacatactcggcaagcatcccgtcgatagcaccgccgatcgtgctgtcgaggaaagaggcctcgtcaaagtatccgttctggtggtcgagggtgaaggtcgcctgggcagacagaaccgagcgagggtcggtgagtgtccgatgagcgtccggttagcgttcggtcagacatcagcaagaggccgggcgagaaggcagtgtgcactcaccatgacccggtctccagccttccagttggacacaccgtctccgacggcgacgacgtcacctgctccgtcagatgcagggatgacctggctcataggacggagcgcagattgatcagcttgaccgcgacgagagaagagagagaagagagagaagagagagaagacagaatgcatgcactcacacgctcagggacggcgctcagcgggtactggtccttggcgatgatcagatctcggtagttgagcgagacggcacggaccctgatgagcacctggttcaggccgggtgccttgagcgggacgtcctgcttgaacttgatcgagtcaaacgtccctcggttctcgaggtagtagtgagagtatgtcttgggaagcgagctggtcgacattgtcgtggaagtggatggtagtggatgacagtggatggt

SEQ ID NO: 756 - DNA, 637 bp, Xanthophyllomyces dendrorhous
tgtagtggcaggcacagatagagcggttgccgacgtgtttgatgatattggccgagagttcgaagttgacgatagaggtgatctcaacccggggtcgctactagggatggagttcaccagagatagatcaaacgggacgatcagcatctctcagaagtcatacatcgaggacgtactcgaccggtttgactcgacctcgatcacccctcgccggatcccgatgcagcctgacctccagctatgggagtcagacgcaccgaaaccaaacgaagggctccagaagcgatatcaggaactagtgggatgtttgacttacctggtgacgtgcacgaggtatgatatcgcttattcggtcggagtgcttgcccgtttctgttcgaaccctgcacaagtccatatggaagcagctcagcgggtgttggcctatctagcatgcacaaagcagtttgcactcaccatcggagggaaagcaagcaagatgcgaccggcaatcgagctgttcaccgactcggatcatgctggtgacaaagaaacaagaaagtcagtcacggggatcatggtcttcgtgtttggagctcttgtttactggaaaagcaagaagataccttccatcacgaaatcatcatgggagtccgag

SEQ ID NO: 757 - DNA, 711 bp, Xanthophyllomyces dendrorhous
ctcaacagacgacaagtacgatggtcgatggtgctgaactcgtacaagtatgtctttaactttcgtcctgggaagaaaaacaccaaagtaagtgctttcactcgacggcacgactatacagaggggggtaacgctcgagcatctgacgaggctccccagttgctgctacgaccagtcgaggtatcacctttcgagacggacggggccatggaagactcagcagacaataacccagaaaatgccttggaaaatattacggatagcgcaacgtcggatattgcgactcgcgtgaaagcaggttatcagactgacaactatctgaccgaactcctcccttttctcaagaacccctctcgtcaagctcccgtccagttgacaaaacaactcaagaaactcactcttgagcctgacggactaattttatatcaaggcttggtctatgttccagatgaccaagacttatagactgacattcttaaacagtgtcatgaccacccctcagcgggtcactacggtcggtacaagacgctcgaactgttgtcccgcaacttttactggccgaacatatccaggtttgtcagagactacattcgttcttatgatatctgtcaacgatcgaaacctcgccggcatcggccgtatggtcttctgcagtcactgcctgttccagaccgaccttggtctttgatctcacttgaccacatcgtcgac

SEQ ID NO: 758 - DNA, 920 bp, Xanthophyllomyces dendrorhous
cctgtcggtcctctttctttcttcttcctgctcgctacaaccagaccttgctaaaagaactatctatgaatctaaaaccctaaccctaacccactgtcttcactctatcttgtctagcttgcgtcatcttcagttcttatcgagtctccgtactgacctgacaactccactctccccgccagtacgtccgtcaccagatctagtgtgtgcgcgcaaagctacttcgctgatcgagacttgtcctggctgttccgtggtagagctttcattcagctatcgactatcatgccggaggacaagtatcccaacagaagatacaagccggatactttggatgagatatacacaccggtcagggagccattcgtgtgtgacgtatactgcgattgctggctgatcactgcgacccaggggggtcaattgggggacttccctctgagcgagcttgtcgcccagtcaagtggaagagctgagctgagagagctacagccgagcgagttctggaaagcggcggccgcccacggcatcaacactgacaatctagtctaccgtgtttccaacatgaagctgtatgtgggaacacgtgatggggaaactcattggaacctagacgaggcaatgtacaagatgggacgaaatgcagagcatcatccactgatggactacatagtcataccggaggacccggtgtcctctggcaaactggtgactagcatggacgaagatgcatcgattgtggtaagcaacatactggcagagggccactccaaggcactgcggctggatgagtcaactgaggaccagagtgtgggcgaggagggcgaggcagagacgaaggcaaaactgtaagaggaagagatggcgcacggatgagtagcgatcagttgtgtcatgtcatgtcatgttgtgtgatgtatcta

SEQ ID NO: 759 - DNA, 1316 bp, Xanthophyllomyces dendrorhous
gcactcttctttcgttgttcatgatggcgctcagaccagagacagagcagtcgagtatgtacactgttgacatgactggcaagagacacgagccatgcgagggcagactctgagcatcagagacaaatgaaataaaaacagatcgatagaacaggatatatagaaacgagcagacattgtgacaagaggtgatagagtctgtgaggtgatctgatagaaatggaagatgacgaaaccagcaggtgaaaagccggagacaagccagtgaaaagtcgagagaagtgaagcacacgaaaagatggaaagaacggtatgggtcgatggagggaagctgcccggtgaggatggtgcaagtgggaaggcagtctgggcaggattgatggagatatgggcgaaaaagggaaaaatcaagaaacacgaaaggacaaaacgacgaagtgtacgcggagaatacctgaatacggggcattgtccgtatttgttgtttagctgcctcagactcagctagcgcaccaggctaggctgtttcctacttcttctgttcatatctagctagctagctaggttggtaagtaggtaggtagatgatatgtagaaaacgatgcatggtattcaagtattcccaacagatgactcatcttatgtgtatccggatcggatgcctcggcagaagatggatgcgcggatacgaaagatcaactgagagccgagagttcgaacgctcaaagccaagtaaggaagggagggagggggaagagagcacgacggaaagctctataagaaagacgctatgacaaagtttgtccttctctcacttcccgttcgatccactcatccatcaagtacctgctctcacacacctcacagctccatcacacttgcacacagaacaagtattgtaattcggtaggtgtcctggcagaggcttgaaaagaaggttgcttctctcacaagctgttcctctttttcagcaacaaagttcgagaaagataccgatcttgttcatcctcatgcatgtaattttttctttccactcgaccgcagacggtcgtccagctgattgatcgttgagcttctatctacctgatcttgttgcggaaacaccaccacagtttcatcgagcgggcaaagcgttcaatcctggagagtactgggatcttcatggcagagctttggtcaggtgagttgacaaccaagatcagacccagggcttgtcaccctaatcagctctcgtctttctgcttgttgactcaacccgtcctaccgtcgctcagggaaggagaacgtagactcaaggcgaacaagaaggatgacgc

SEQ ID NO: 760 - DNA, 1551 bp, Xanthophyllomyces dendrorhous
atagcggccttgtgtgatgcatccgaattgtaagttccacttactttccctataccgctctgtgaccctcgccgagggcacgttgcgttcccctcccccatctgacgccacattacctcttctcatccgcctcaggttaaagcgatccacttcagaaacctccgttcgggacgctgtcaacgcgctgaaccgggcaaccaagattctcactgagcaaggccgattccggcaagctgccgatcgacagaacgaagtcggcgacatcttcagagtgtcgaatcggcccgccgctagggacgcgtacgaaaaggcgggacatttgtaccagatggatggcgcccaagcgtaggttctctatctctcccttctttcttgttcgcaccatgtttgaccgctctgcgctttcctgttcacgttctcggatcattcacagcatgggaaacgctatcctcagaggggcagcagagatctctggcttggttggagattacgaacgggcgatcgatacgtttgtccaggtcgcaaactggaatctaagcagtccactggcaaagtacagcgtcaaggagatctggctcaaggctggtctttggtccgttttgctttcatcctcttgcggccagagatcgcgaacggcccatcaggctaattgcgctatttgtttctgatggttcagtgcgctgggagctgacgatgtcgtgctggctcgtgagctagtcgacaagtttgctcaacaaggtttgtcctatcgtgtccgtttttgtttggtagcgaatacaaggaaacaaccatagcactgcttcattcctgtttccgttgtgtgcgtccacaccaaagatgatactttcccctccactagggaagcccgattcctgaacaacgtcgtgaccgcatacggtgacggcgatgtcaaagcctttaccgcccatgtggtcgagtacgaccaggtcaaaaaactcgatgattggaagacagaaatcctgctcaagatcaagaagccgatcggtgacaaaggagggttgacttgattcgtttctaccattctccgctttctttccgttcgttctgcgagtgtcatgatctgacccgggttgacccgcgcagggtgaccttgcgcattgtagacttagtcttgcaacagacttagcatcgagatcatgtagctcgtggccttccttactctctcttggtatcgcttgattctctcttggtacatcttgactcgtccttggtatctcttcgctcttgcttgtgtttccttgtgtgtccttggcttcatatctcgaatgacatatatactaggtagtcgttggctatctccccttttgcctcccaagcttggaacctcgttaaatcctctagttcctgatcatcatccctactctgcagtattgcatgatccattcctgcctgagagctcaagcgtactgagtactgtcctcactcagcccccttgcctgcgcccataacaccgggactcatgccagatgaatcacaagcaatcccaatcgcaatgtgtcgaattctgggctcttccgcccatgaagtaac

SEQ ID NO: 761 - DNA, 939 bp, Xanthophyllomyces dendrorhous
gtctgtggtttactgtacttccttcttacacatctcagactatgtctgtggctatattcctgactatgtttctgggaaaggagagacggcaaagtgcctgcatctctcatcgaccggacaaagaagcatgacgagaagatcgcacacagatatcagaggaggctagatcagaaacatgtgcagtcggagatcatctacttctatacaatgcaagccacccgatgcggttgctgacatgtacgcagctagcagactttgttatatgctcagccgcacatggacaagatgaacatcctaactatcaagatagagcgcatgggcagagttgatgaacagagtgagacagcacgctgttccagaaaggtaagagacagatcgaagaggatatacatcatctctatcgatattgatgcatgcgatgtagtagaacaccctgaaagacagcagcaaatgaagggaacaatgagaagacgaggtgagctcaatcgattcgagaagaaggaagacgagaaaagagacagtagttcactagaaaatacctggagataagataagtagcagccaaacgattcaaagtagaggtaggaagcttggcatagtttccggtgagctgcgaatgacagaacagacatcagatcgatgcctttccctccattcgtcaaatgcaaaagacatatcattaggaggtcatcctaccagagccaatgctaatattgggatgttatctattccatcctggtgagccgccttagctcggaggacgaacttctcgctatatcacgaatgtagaagactacatcagcctcagcctctccatactcagccggttatcatacctcataaagaggagtagatctgataaagacaagaatagaccgtactctttggtcagattctctttcgcctcctgctggtcaaagtatctctggggacctatag

SEQ ID NO: 762 - DNA, 388 bp, Xanthophyllomyces dendrorhous
agaaaaacgatatgtgtttgaacgcaaaaatcagtcagcccaagatggaccatatatatgtttcaaccctcgtagtcaagttgatagacaggacattggtcgacccttcccgttctatgtgttttctatgggcaagtctgatcgagaaaaaaaaccatacttaatttaggtatctcaccatccttcagaggaccccatgtgtgaagggtatagaggaaaggggcggctgtatgtagcgcccaattggggtcgccatgagtaagtagacgttgagtgcgccgaatcgttgaatcgattgcagaaacactgaccagtcatgacccaagctgcaggcacagcgtacatagagtagtttttgtttccgtatatataagacgacatgatgaac

SEQ ID NO: 763 - DNA, 591 bp, Xanthophyllomyces dendrorhous
cacgatgggagaagatatctaccaagatgtcgactgagacagaatgggttagaggtgaaagagagcaagtttgaaaatgattccgacaccaatacttccgacacaatcaattccagaaagtgattctagaaggcaattcgagaagaggattcgaacagataattctaacaataattccaacactcccaatcatcgttgctgtttaaacaacgatgtgaggatagattgatactgaaaaacaagagataaaagatagaatgaggataagataaaaacatgaagaaagaagatgattagataaggataaaataaaataaactaaaaagaaatcaaccaggatgaaaagagaaaaactgaaataaagatggtcgaaacagctcaatccgaagcagaaagaagcgaaaacgattgaagcgaaatgagtaaagtgaacaaatcaaaatgatcgaagagtgaacacgaaatgtcaaagacgaagcgtcaagacgtcgaaaggtcgaaaggttggaaagacaaaaacagtcgcgactcaaccaccatcttttacttcttgcttcacctctggggtcagctcatgagctcccactcgac

SEQ ID NO: 764 - DNA, 458 bp, Xanthophyllomyces dendrorhous
atgaagatgatgttgaagaacgagaaggaagagagaaagaaagagagaatgttgttgggggccaagtcgttggaatcgcagaagaaagtgcagctgacgacaatgtagaagaagaaagcgaggctgttcaagtggaggagaaagaaagaacggaagaaaaggaggaggaagaagaagaggaagaggaagaagaccaaagtccaatcgaaacagaggtagtgtcagcagacgagtcagactcggatagcaccatcatctatgaacctcgaacgactagaatagtgcctgctgatgttgtgtttccagttcagacagacacagtaatggaatctgcttcggttgttgctggatctattattgggccagaaagggtgatagtgttggaattgttgttggaattatctgttcgaatccttttctcgaactatctgttcgaattaccttctggatttctttag

SEQ ID NO: 765 - DNA, 1327 bp, Xanthophyllomyces dendrorhous
agagagagaaacgaaaaactcggaacaagttttccgagagagactagagatctctctctatatccgggtaaagtgttacggtagcactcttgctttccaagcaagctgctagggttcgactccctatacccggaataacgcagcactgctgtgcaccgctattcctaatggtaaggagctggtttttgtaccagaaaatcgggggttcgattcccccggcggagcccctctccccattcgtgaagccttcgccttcacttggggttgaggaggcccctcccagggattcttccccaactacgttggacaagaagaacccccgacgggtggggtggggacctggcgtagtggtagcgcccagcctttgcgtggctgtagccccggttcgattccgggggtctccaaccgacgagcgagtcgccggttgtattgcccggaatcttccgtggcttgcagcctcgaaagtcgggcgtacctctacgcgggtgccctctctccttctctctcccctgctgggtcgttcggtttcgggatcgagatcctttttctaggcccctcttttgatttcctttgttccaaggaacaaaggggagggacggggccttgaaaaaagatctctccccccgaagccgagactccggcagggagagaagggagcctctgctcccttacctcctggtaaagaagtcggagcaggcctaaaggccctactccgccttctctccacaggagaagcggggcagaggacgggcagaacagcgtcctgaggggtctgatggacacgcgtctagagtagcgtactctcctccgaccgttagctacggagagtactactctagaacgctacgctgttctccccacccctccctgctttctccgggcggctggacgcgtctaacggacccgcgtgctctctcctattgcagccctcggcgtacagctcgggctgcaatggagcggagcaacgcttctcgccctgcgaaagctaggagggtcttttagtcttcttcactcccttatctgtcccccccgggccttcctccttgccttagtattccggtagccactacgggaatactaaggaggagagaagacgaaaaagggggcttcattgactcgtcccttcggttctcctcaattcttccctccttttcctaacccgggtacccgggccacggggaaaagaagactaaaagtcagttcttcttcctttactatccactccctggtcgtggagtaaagaaatgagaactgattgcgaggcttgtcccggacctcaccaccgagtttcagaggtcccgtttctttgcctcctcttcttcttact

SEQ ID NO: 766 - DNA, 2478 bp, Xanthophyllomyces dendrorhous
  misc_feature (774)..(783): n is a, c, g, or t
  misc_feature (1133)..(1142): n is a, c, g, or t
tttcttttcttttcttgccctgatctggctgacctcaggaaaggatgggtgtgaacgaagctttgtctgaactcatcgcctcatcgtctaatcgcatcatcgcatcatcgctgctttcttgcttgtgtgaatgcctgcctgcctgcctgctcgctcactcgctagctctgatcgtccactcattgtctgacgcatctgatccggctggagacgtctgtgtctatgtgtaggcacgcccagggagacttccagtcgaggctgacgatccagctcgcagatggagctgacgtgccaggtgtcaagcacactatgttgcatgcatactgagagtgatctgccgggtcgatctgtacgtgccactctttgacctgctagtcacaaacggtcgtcggacaacggcagccagctgacgacgagaacacggacagacaaatagatgaatagatgaacagacaagcagacaaacagacaaacatacacccatacgagtgcacactgatagctgcaggccgagcatggcctttcgagtctgctcggtcgaccagtctctctgccggacccttctgggtgtcagcccccacgtcggacaccacagccgatggttccggtggtggccggactggaggacagggcggctctgattgttgctctatcgatctactggtcgtggtgatttgactgagcgattggtaaatcatttgtcctgttctctttgcgttctctgcgttctcgactgcttcttcacttttattttactttatttattcatttatnnnnnnnnnnttatctactcaattctcttcccatccgtcttttctctattcgtgttttctactcttgttttctctatttgcgttttctatatttttgttttctctatttgcgttattctattcacttttttttctttctattcacgtctttcctatatgccctttctctctgttcgctctccgctctattcttttttccctcccgcttgccgttcacttgacttacaagcttcctcttcgttttcgtctcgttcgacctcgctacgccttccagtgccttgcttctctctgccttgtcttgttcagcctagctttctcaacttagccaagcttcattccatctttctctctttgtttctnnnnnnnnnnttatctactcaattctcttcccatccgtcttttctctattcgtgttttctactcttgttttctctatttgcgttttctatattttcgttttctctatttgcgttattctattcacttttttttctttctattcacgtctttcctatatgccctttctctctgttcgctctccgctctattcttttttccctcccgcttgccgttcacttgacttacaagcttcctcttcgttttcgtctcgttcgacctcgctacgccttccagtgccttgcttctctctgccttgtcttgttcagcctagctttctcaacttagccaagcttcattccatctttctctctttgtttcttctctgctctccttccctatttccactcctttctgtctccagccttcttctgctctggcaatgcctgagacgatctatggcggatgtctcgctaacaagcgtaagcacgagtgagtggccgacccttgatcacatgtctggactatgcttctctctgattgccaaacggacggccgaccgagcgatggttgatcgtgatgtccttgtcgaaagcacgtcgcagctttgcacaggctcttgactgactgtcctgttgcttctttcttttcttgtcactgatctgttgcgactggccttctgctatctctgttacttcttctgctggttccgtgcgcgttcctctgttcttgtggtcttgcgaactcgtgatcttgtggtccatcgttctgcctgcctgtctgtccacctatcggctgctgcgttggctgtttgctcgatctctccaccgccccttcagattgcaggagatagcccgtgcgatggggatccgcgtgaacggaacgcccacgaaggcagcgctcacaaagctgatccaggacgagctggacgcgtgtaaagaggtgcgcatgtcgaacgaccttcctttccttcctctctttctttctcttttttctaccttttttctttttcttttcttctttgtttccttcgtttctctctttctttgcctgctatcggaggaacatcgtgctcacactcgtttgcctttctctctatgtttgtgcatttccatttttctgctttgtgcgatctttttctctcccttcttctctgcctcattttgtttcgcaccttcctttactcgatcccttttctcccaccggcttgtggtcttggtcatccgtgtctgactgacaggtctacctctcgcaagcacagttcagagggctctatgtgtctgctcgggtggctcgcaagtcagccacgagacgttctctgtcgcctccggtcgtgtatccgaacatcagccaccagtccgacttggcc

SEQ ID NO: 767 - DNA, 696 bp, Xanthophyllomyces dendrorhous
ctggttgtggtagtccttgaacgcgtcgttacccttctgaccggctcggatcgatcgataggcgacgatgaacccgtttttgatctcttttccatgataaagaatactgtggacaacagtggcagagtatacagcaaagaatgcgccatacatgaccaggttggaagcggacatgacaggctgggagtaaagctggtactttgtaacgtccaagttcttttttgcatcaaggattttggtgacgttgtaggattttccggtgttgtcaaatattcggttggagaccatagggaagtagccagtattccagatgttgtgggcccagaatccggcgatgatggggatggtagcagccattccagcagcgacgttgacggtcgagaagaatgggtagatcattgggtaccatgagttaggattgtaccacgaccaatcgagcgatggaataggcgagataccgagcccagagattccaccggtaatggcgcttagggtaatggacttcggattgatccaggtgatccagttaaagtacgaaatgcattgtaatagtgaaccagggagccagtagtagacaaacatggcggcaaaagcgacgaagaagaacttcattcgggaaatcttccagccatttgcagatcggttttctgtatcgtggaaggacttgtttaatgcaatagtagacaggttaaagag

SEQ ID NO: 768 - DNA, 689 bp, Xanthophyllomyces dendrorhous
atagtagacaggttaaagagcctacgcataaatggagaggtagacatctttaactctagttgcacgatccaagattaggtccaagtccagacgtatgactgaggaatgcttaccagatacagtgctcggggtaaacgatgaaacgtcgagccatgccggcaaatccaaaaccaatcatctgcatggaaagtccagtcaatatttggtatccgaaatctcctgcccataattgtccatagaaaatactgtgagaagggagagaggcaattagagatcgaatttgatagcagtgaacaaattgtggaacatactcgagcttctggactgcgtgccccggaagtcatgaacaagtaagaagaggaggcagaatcaaacatcagtatcctcatcgagttagaggcgtggttaaatatgataagaattagaaagaacataccgatgatgatatgcgtggtgtagggagcaaacattccgatgttggccatgatggtgataagcatgtgctccttctcgttgaacggtccaggctggaagtagagaggatggggcggaacaggatcagaataggtcaggtcaggtcaggtcggcaaggcagagataccaccaggaagagatgactgaacagctggagagagccggagagatcgagacttacgttcatgttgaagccgtgtcctcggaaccggaac

SEQ ID NO: 769 - DNA, 37480 bp, Xanthophyllomyces dendrorhous
  misc_feature (1837)..(1846): n is a, c, g, or t
cccaatggggatcaccatgatcaccgtcagggcaagaccgaagaagatgcaagacacgctcgactcggtagggtacacagtcagaccgatgcagccgaagacgacggcgatgacggtaagaccgaagtaccagagctcgggaacctcgtcgtactttgccatggcctggttgtggtagtccttgaacgcgtcgttacccttctgaccggctcggatcgatcgataggcgacgatgaacccgtttttgatctcttttcggtgataaaggatggtatgaacctatttgatttcgtttaggagtaaagagactaattgagtcaaaaagccactttattatatacatgaagaaggacgtacaatggtagcggagtacacggcaaagaagcaagcatagacgaccagattggaagcggccatgacgggctgagagtacagctggtactttgcaacatccaagttcttgttcacgtcgagaaccttggtaacattgaaggcttttccggtgttgtcaaagattcggttggagaccatgggaaggtagccagtgttccagatgttattagcccagaatccagcaatgatggggatggtagcagccattccagcagcgacgttgacggtcgagaagaatgggtagatcatcgcgttcgaactagtggcccacgaccaatcgagcgaaggaagaggcgagataccgagcccagagattccaccggtgacggcgctgacattaatggacttcggattgatccaggtgatccagttaaagtacgagacgcaagagacgagcgccccaggaatccaatagtagataaacatggcggcaaaagcaacgaagaagaacttcatccgggaaatcttccagccatttgcaggtcgattcgttgtgtcatggaaggacttgttcaaagcgatagtagacaggttgaaaagccagatgcagtgttcggggtaaacaatgaaccgtctgctgagaccagcgaatccgaaaccgatcatctggatagacagaccggtaagaatctgataaccaaagtctccggcccatgcttgtccgtagaaaatatcaagcttttgagtgatcaacacgttgacggtgtagggagcaaacattccgacgttggccatgatggtgataagcatgtgctccttctcgttgaacggtccaggctggaagtagagaggatggggcggaacaggatcagaataggtcaggtcaggtcaggtcggcaaggcagagataccaccaggaagagatgactgaacagctggagagagccggagagatcgagacttacgttcatgttgaagccgtgtcctcggaaccggaaccacaccttgttcggcagcaccttctccatgatctttgcgatcgggtacgacagaatctggatctcgttcaccgtgagcgagaacgaaggcgtacggatcgagaagaactggttgatgaacgagccgataccacaccagatcgtgccgatgacccagactcggaaggtgctgacaggagtagacgtgtcgtcatggcagccgacgaccgctcggacctcagggtaaggggacgagaaccggatgagcgcggcctctgtgggtgcaagagggaagggagagaagagagggaaggaaagagtggaaggttagtgagccgtcctgaggacgcgcagcctggcttgagcgcggaaagagagagagagagagagggaaaggcaggactgaccgattcgcatctcttcgagcaaggcatcatagttctcgagcgtgctagcatcgcccgacaagaagtactcgatcttgaccttgacgggggtagggaagttgggatcgtcgtggtgctcannnnnnnnnnatctggatctcgttcaccgtgagcgagaacgaaggcgtacggatcgagaagaactggttgatgaacgagccgataccacaccagatcgtgccgatgacccagactcggaaggtgctgacaggagtagacgtgtcgtcatggcagccgacgaccgctcggacctcagggtaaggggacgagaaccggatgagcgcggcctctgtgggtgcaagagggaagggagagaagagagggaaggaaagagtggaaggttagtgagccgtcctgaggacgcgcagcctggcttgagcgcggaaagagagagagagagagagggaaaggcaggactgaccgattcgcatctcttcgagcaaggcatcatagttctcgagcgtgctagcatcgcccgacaagaagtactcgatcttgaccttgacgggggtagggaagttgggatcgtcgtggtgctcaagccaagcgtcttctagaatttcgacaatttcttcaaccgacagagtcaaagccctatcgtagacggcgtcgacatcctgggagagcacgataagatcatcctgaacgacctgcgactcgagaactggagctgcatgctggccgtgatattcaccaaactgcggttcaaaagaaatgtgacggtaccggatagaacgaaggggaataagttgtcagctaattggttgtgtttgggttggatgaatgttcttcaaagtgaggaacgtacggcatccttcttttcatcctccacggggtattcgttgaccaaggctacttccttggtctcgtacttgcctagctcatttggtgtcgccattttgaaagaggtgtgatagtgcgactaggaaggtatttgtagcaagggtggaagttccctatggcctgataagtgtggctagaaagacgatgaacggaaagagaacagagcggttgcttgcttcctttctattgttcttgagagaaaagagagaacagatgggtgaagaaaaggaaaccccatcttggtcggtttgattggacctttaagaaggaaagcagaaagaggcgagttagtcgggaatgagatggatagatagatagatagatagatagatagataggtcagaagctaccggaatggcacattatcgcgagcgataggatgtacaatgtgcttcactagaggtcctataagattgcgtgtaaagcaagagtcataaacggaaggaggggtacaacgtggtggcagcggatatcaatttttgtggcgtacgccgatggtgtcgtgtggtaccaaaaatcttggagtttaccttctacctgactccttccgactgagtacctactcgctgatcgctggctatatttcgcctcctcagctcatgatcggccatgggaaggctgaatactcggttcacgggagctaagtctaggatgcgttccatcatatctctctaaatcgaccttgtgagttctgccccgtatgacttctttccagctgtctcttacgcggatatattaaatcaagtcgcgttgaccatctgttccgtatgagcgagatgataatggtcgcagttcagccggctgtcaggagagacaacgaaagaattcaatactttgggacacatgcgcacccaagagtatgcgcgaaacatattttcagaacacctcccatctgaactatgatcagcagtgaggatcagtgtgcgagcaaaagtaaaatcgaagctccacatgtgtggaggagagatcagtcttggcacgagagaccgtaatcagtttcgcaaatgccgtccgttatcactcaagagtgttatcattagtatcagtagcctcgctcgtctccgttgtcgtatccatccgacgtactcgtcagtctttcgacttttcctgattgaatgcaaactgatcaagctacaaggagaagggtgaataaacatacagccgtgaccggggtttgtaccacacgtcgcccacgtatcgtccgtcattcagcgctccgataagccgagcagaaaattatttctgtttcgaccatgtggaggaaaaaaacgccgaatacaaccacaagctctcttcgccatttctatcagcgaaggtaacctgacggaaggtcattcatcagtagcgtcctctcctttctacttcttccttcgtgctctttgagaagaagtcacagaatggaagagatttgaaattgagaaacctcgtgtgtctatttttctcttcttgatcatccaaatcactttatcgttagctaaaaattgttgcatcaaccaagaatacatgcatacagaccacatatgaatcagcctctaagttctatcctgtcttccatctggctggcctagcattggaagcagtgtaaagttttcatcagtggtggtggcagatggtagtcatattatcatcagtagtagtaatagtagcagcagccggccatcaccggccctagcaccgggccaatgactgccgcgtcatttcctaggcgtaaccatattttcaatcgatcggtaaccatcatgttgtaaccagcaatgatccgtttgttcgatcagattcactaccaactcgcctgaacacacactctttgaatccctatcaccctcatacacatgctcaaacgtacatctcatcttcgtccagcctcacgcaggctcatctcttcggttccttcgtcgtccgtcggtccggggcggataggtgtcaccctgctcgtcagcactctcggtgttactgccgccggtctggcctactttgcatccgccgatcgaaaggtctacgctgaacctctggtggcggagttggatccttcggttgtaagcgagaaaaagaagaccaaacgtatatctagttcgtccggtaaaaccacagtcagggaaaaaggagaactcgatgtattcttctggggttccaacaggtgagagctttcaaatgaatatacttctcacttgatcgatcgagagagttgttcccgattgaaattcttgagagccgactttaactgactggtgctgtttggtaaatctacaagcaataacgtcttgggccaaggagtgagctcaactctgccgatcaaataccctcgactggtggccgccttatccggtccaggcgtcgcatttagggatctgacgatggaggagacctatggagccgtggttgatgccgctggagatctgtatatgtggggtaagaagatctctgatggggagatcgagaaagtacagtcgacttctggtgggctgaaacgatgtcttgtcggcctagtaagttcatgagactccttcactcgtctgttgtttgaggtagccgctagctcagcttggtctctactctatctcaaaacacaacatccagaacatcactcatctggctgcagcaaaatcaaagctatatgcgctctcttcctcaggcacggtctactgtctaccgaccggtagtgaactccaacaggcttccgatcgaccactcaccaaacgatcgttttgggcccggctcgatttccttcatctgttcacaacgtttatcccggaccagccggtcgactatgtgtccctagattactcgactccagaaggactcttcctcaacaagcgcgagaaggtcacccaaatcgatgccggaaagcaccacttgctcgcattgacaaaccagggaagtgagtctgacctgaacggtcctctatctcttgcttccgtgtgtccatgctgattcttcctttggcccttctccgcatctaaggggtctttggacatgctatatccgaactggccaactcaaaccaccagttggttgacatggattccatcgttcttcctagtcccactacatcctccctatcagccgagactcgggcgatatttaatctgacgcccctggacctgccagactactcggaccgagcgattcgtcaacgagcccaactctccaggacagccgatccattcattctcaagaatcttccacaggaccctcggattcaagacttgagtgccgtaccgacagcagatactgcgcgagtgaaggaagaaatcttgacgaggcgtgggttgaaaccagaggaagatatcagatggtcgaccacgttgtacgagatacctgtgctgaacgggatcaaagtcgaccaggttgcagccggtgaacgaacgagtttcattagatctagaggaagagttcttggatggggtgcgaacgagtacgggtacgatagtcttccttttttcttctttctcagtcctgtgtctgacagaaatttcgtgcgcgcttttacctaaaacatccttgatctttgctttctttcatacagtcaaattggactaggctcgagatacaccacagacaacatcacctcgcccacagaggttatctttaccaggttgctcggttacaacacttcatccgggataaactgtacaaacgttaccatcgcggccaacacaacgtacttcacgatttctagagtgacgtcgcctgacaacaaggagtacatcgatttgttagccgccgggcatggagtcagaggagaactcggaaatggacaatggaaccaggtcagcggtggttgcgtcaaagtcaaaggtgtcagcggtctgatcgaatgtcagtcaaactttccgtttcctcttctctgatcttctttgtcagaaaaggttttgacttgagaaatccttttttcggcgcttgggtgaaacctcttagactctgagctcgagaacaaacaagtcccactctcgatccataatgtgtcgacttcaaagagcggccacaccgcggtctcactaaacacgtctcctttggctgataaagacggaggattcgcgtacggtcgggacgtcatgatctggggttacaatggtatgttctcttcttccttgtttttttatgccctgctgctgctctgattaaattgactgtctctaaaacgtcgtcggggtctcttctttttcaaaaaaaaaatgcaaactctagcgtcctaccaactaggaacgggcaaacgatcgaatcttgccatcccccagcacatctcgcccttgccgtcgaacgtgtcgtcgagcccgttcagcctggggtcgaaagaatccttgatatcctcaggaacggcctcgccgatgcctcactcgaggctccagctgggcgaacgggtgatcccgtctggtgagctcagagacctacagggtagaaaggtaggcggcgggaagaagatggtcgagcaggtcgtccatgctggctatgagagctcggccgtctattggaaacttgtctgaacgagcgtgcgagagggcgatcgaaaggggtgagcgcaagagaacatggcgttgtaattgtacacctacccttgttcatccgattaaacgaacacgttccatccagtcctctcttcgtccatcttcgagtatatgttttcctcttcttttcctttttcatgttctctctctctttcttcctttatttgtcacagaaatcagagacgtaggacgcaagacggacagagaggaatgagggacccaacgaagaattggaggttattacatggtatcgatttcgtcttcttcttttttccttcttcaatgaaaagatcacaacaacagagatagtagtaacgacaataaccagcagataggaaccaaaaaaaccaagaagagagagagatataaaaagtgacaaagagaatctacaagagagctaagcgcaaagaaagaatctgggaataagagacgatacaagacgaacgtacgggagtgattggtaccagatagaagataataaggtgagtttgagttttagttcaagtcaaggttaaagagaggagggagaaaggatacaaacaggcaaaataagaacatgaggcaaggtaaggcacgtcaagtggcacagagtacaaatagggcttggggagggaataccaatgaaagactgtacaagtccaggacagcgtaggaatatggaatgtttagatcaagtaagaagaaaagaacgaaacacacaaatacgcatacagccatatacacacatataggcatagacacatgcacgtaagaagaagaagaagaagaagaagaaaacgcccccaggaaagagacgagccaaataaattacctcatccctgggagagatcaagttggaagataaggagagggaaagaagaaaagggatacggagtgtcgttcacttcgtcaatgtaggagacggaatggaaggtcttctggctggtggcccggggaacaacccctggtacgttctcggactgattaagaacggatcaggcgttctcccgtttccgaccgtcaaggccggtagtccggaggaaggactaggactgatcgtcagagaggaggaggaacaggtgagactctgaatggaaggtaaccgagggtagtcgcctgcggaaaaggtagctcgtctaggggcgtgagagtttccactgagactattgttcgtcgttgtcgtcaccaccgttgtagtcggtagtggtggtttggccgatactgccgctaccgatgaagatgcagaagatgaagacgaggacgataagaacggagggactcgagagctaaaaccatttagagatgtcactcctctcatcgccgatgatgagaccaaccccgaccccgccaacgtcgtcgaagaggaaacgtccgactgtgattttcgagaggtagaaacgaaagcgaggccgctatcgaatccccagacttggtaattctctttccagagcgcggccaatctttcgtcagaagcaaggatctgggacctccatttcgaagcgatctgttccagtgatcagaacaaggtaggggaagaccaagaaggcgtcaaatcagttcaattaggatctgattcgatttcaaacagagaagaatgacatacgtataatgggaaaaagcctatttttttttatcaaaagattgagaagaaggagttaataaacccatgtcggtatgaccatccaatgtaagaagagagagagaacaaacaggaagggttccgtcttcctttctcgcccacggcttccaaaagaaagacaatgttctcaatcgcctgtgcttgtcttctcgagaggaattcttcttttggagtgtcgatcccagacgacgatttcttaacggcctgcagatggaaaaacatggcgacctgtaggggagaaagaaagaaggaagaaacgttgttggggaacgattcagtatacaagagggaaaaaaagatagatacgaaaacaaagctgaaaagaactcacctcggcagccatatgaatgccggcaaagagatgccctgtgcttcctccgttctcactctgctcgccctcttcgacagcccaggtgccatctttgatctttctgccggctgcctcgagattcgctttgttgaactgtagtcccgggggcaagctctgagcccaggcggcgagggaagcttcctgatcttgaatcgagctcgagctggccggactgagtggggtggacaccgttttctgaaagatttctgccactctggcaaggtagcctagctcagatatcggcgttccttcgaggtcccctcctctgagacctactctgggtgagctgggttcgatcccaaggtcgaacgatgcgtcatcgaccgggagcgccaacgaacaggcttcttctgtgaaccttccagctggtctgacggtccagacttgggcatctaggaaacaagtgagagagtaagaaaaccagaagatccttgaccgggtctctcttctagtgatcgcccgtctagacatgccggaggaggattgatcggaggaaatcctatccgggttggtcaatctggtgatgtacggaattaggatgtctaggtggcccaaagaagggatgttggtgtgagcaaacttaccgaacggtgtagggatgggaggaatgtagatagagaaagattataaaaacgaacccatgtaaaacaccatggactttcccctgcgcatgagactttcgtatacgaccatgagtgctaatccctgagcgagctcttcctctctatcttctgtatcccaagcggaagggtcgttggtgttaaaaaacgcgtcgacctctttggcgaagatgtcccctttggtagatcgttctctctgttccgttcccgtcccgccggcttgtctagatcggaagaagggatgtgaggaaaacctggcggcaaaggcgtaaatggcaagggtgaggaccgggtgtaggttatcattgtagaacgcgtggtcgaacgagggccggtggaagattgagcagatcggttcaccaaccgtctggaagaaagtctgaatgagggatcgtctaagaactgcgggaacagccgtcaggatcgacggctgcggtgatgaatggatagggatcaaggcggaacgaccagaagggataacgttgttagactgatgcttcttgatcatggtgttattggagttggtaagtgagccgttggagagggcaggagtggagagatagagtggtttccccatcagcggaacattcttcagattgctgctaccgccggcaccggcggcgaaaccggtcccactggcagcaggtctggaataaaagccttctcctagtaaactggttcccatcgagagtggactaggcttgacggatggagggatggagcctagtggttgttcgactggggcgactgcgacgacgatctttgaacgtttggcaatattttgtttcgagctgaccgatgccgatacggaggtcggagggatggggaccgagtttgaaacaagaagatccggagaatgtcgaccattggaactagtgatagatacggccgagcctgatctcggtctatttgctctcggcgcaggtacgggttgaccggaggaggacaggtagatacattccctgccggagaattcacagtttgaacatggaagttcaccagagcagcgtcttttattctgtaaaggagggaaagaaggaaaaggtaggagtgatagaagaaagaatggtggagtaagttgaaaggtgaggggattgtcgaacagagaattaacatggacgtaccttgtggcaagcgcctatcggtccaaaagaggatttccaaatagaagaggaaggaggggaaacaagaaggttctgtgagtatgagaaaacgaaagagggataggacgaacgaacaggagtaagagagaacaaagagggagacgtactagatagaaaagtaacgacggcgacacacggatataaacacggagaaattccaaagaaaaagggttgagaattgaagagcgcaggcgagacggcttttgatggatagatggatggagaaactaacctgcaagcttttgccaagcgctgagagttggaaagaacggagtcaaacaggaaaagaagatgaaggccatggagaaggaaccaagatgtcagccaacaaagtccagcagaggttccgtaggattccaacggagaatgcaaaggcaaaggacaaagatagcaggaaagagaacagacctttcgcttctttcctttcgtcgtcaactcctccgcctcgcccggttcttctaaaaatgctgttggcaccgagtcgacgacggatccattcaatttggcctctgtcggatttgatcttgaacttgacccgataggggaacactgtctaattagtattgtgagctctggtttgggtgcgggtgcggacgtgattgtggacgcagctactgactgtgtagccatcactgtggacgtgtgggccgtagaggtgcgggttaaggaagaagaagaggaagaattctgagccgctggtaccgtcgcgccaagggcggatgcggttggaagggctgatagagacggcggttcctgcctggccgtcgatccggttaacgccgaagggggagaagatccatcggctgatgagccggacgaccggtcggacgcgctggacagttcctctgccgcagacagcaagacgtccagtgcggacagatggtcggtcgacgtggcgatggtggtggcagcagtggcagcggttgggtctggatgaacgactgaactgaccagggcggccggcaacgacgacgatggagctgctgctgctggtgatgaggatgaagatgaggatgatgacctgatagaatgagtcttgcgttctgtctgatcttgaggccctgatcttattgacggtgtgatcgttcctggagatgacaacccggaggatgacaacggagcagacggggaggaacacggggacccagtggtcgattggaacacggacgacgagggccgtgtaggtggatgagtgtaggtagaagtagccatggcagtggtagtgacggtagctatggattctaccgggaacaactcagacaacactggtcgaaccgagagatccatcgtgtgtagtatgagtggcggtatggatgaatggatgtaagaggacacaacgctacgagactggatcgacagaacccagagaaccaacgggtgagggcaaacagaccagacggggggataaagattgaaaaagggagcaagaaaaagaagctctcgagacaacagccggcggcggcagcggacgagagaaggacttttttggtcgatttttctctttctttctgctcgatctcgtgaacgtgaacgtgaatgggcaggtcagggcagagtggaagagtgcactcagggcaaaggcacaccaggtgcacgcctgtcaggcacaaaaggcacaacaggcgcatagacacctacccacgcacggtatgcctaacgggccagagccagtgcgggcgaatcgatagcacccatcgactggtcatgtggcccttgaccgatagagcccgaggagaattttgcttatgtaagcttgtagttccgcttaggtaactctcactcggtgttacctcgcttctgtcgatctgtgcccacttggcaagtgtaggctcttctttacccgggtctatttggtctctcgcttaaatgcatatgtgtgtgtttttcgtttgaagtgacgtatcaactttgttgtcgcgggtccgtccggtgctcgtttcgtgctcgtctcgagatccgagtaactggacgaggcctgtgctttctatccactcggcgacattcgatcgtgtgtagtttgtagtgtgcactgtgtgatattgagcattgtacatacatagacccgcacatacataaacacatacacacccgcatacacattcaccttacaactcggcagaatccacgttgagcatgagccctccgaagaaccggacgttgttcacaaacgctaccgctttctataggatcgttttgttgttgttgtttttttgcaccgtcattgtcgttgccatcggtcagtcacagctagtaagaaaaagaaagagagagagaaaaggagagaaaaaacgtacgagcgcttcgttcacagagtggattccagaataagtgtacctacagagaagagtgcaatgcaaagaacgatgaagaaagataagcgaccctagtacatgaagaataacagataagataaaaattaaagagagatgagaaagacttgcatatctccttcagtcagatggttgtatcgatagatctggtccgtcaagttccctacgatttgcaaacagatatttcagtttgaccaatcaaatatccgtcagatcaacaaagaaagaaagaaagaaagaagaaagacgaacagtagtacttggtgctgtttgatttatttatttgttttgaaaagaaaacaaagagaggaacgtcagaagaattctgattcaactaacaaccacatacacacagagaatacctactcggtgtttcctgtcatgatggatggagaagtgatgatttcatcgtcctcgtcgtcatcgtccgactctttgagtcgagaagcatacgcgcccttgatcgttccggaaagaaccttccatccgtttgtcgactttgtcgtcggtgtcaacggagaaggctccaacctaaggaagcaaaagacgttcggtcagttaaatcacaaacgcccgctctcaacaactgctttctctcatgtacccctcccgcaaagtttcaaaaaagaaggaaaagattgtctgtattcaccacttatcgaaagcctcggtcaactcgacatgtccaactccggagtgagtcaacacatccttcccgaacgaactcaacgtaaggttcaactccttggccttctcctccacgatgctagtgattctttgcctcagctcttcagttgatgaagcaacgttgattcgatgattgatcaccgcgaacgccgtctctggcaaggcattcaccttgatccctcctccaatcagatcgaccgcctgagttgtcttgaccaaacttcggtattcccctcggctatccaggaaagtctccaacagcccgagcgccttattactcttggctgatgccttgatcaactttcggagcacggtattcacatctggcgcgtattcagcagcgcacgtcaacgtagagtagaaagggttcgaccgcgtcaggttcgccttgtgtggattcgcttctaggtgagcaaccaagagtgaaagaagtccgatcccggtatgatccggagggaccgacctgtacgtgggtagggtgaagtggggtgaggtaaagtgtatcagtcttccttgttctccttgtcaatgtcaagccaaaaactcacgaatgaccgccgagtgtcttgacagtcattctgacgtccccatagcctttctcgcctgtaccgagagctgcgatcggctttccgtacgccttagtgtaccctcctccttcgtcgaccaagagaccgaatggagaagacccgaacttaggggtgtatgtgtcttcgagatatttcgcgatatgggctaatagtggtatttggaggtgaggtttaaaatgaaattaagaaaagtcagatctgcccacgaatcagatgagagaagaaagacgagtggtacttacccgctcctttgaatccagagacttcctcgtccatcccgaaagcgagcacaatcgtccgcttgggggtgtagtccttattggccctgagaagagactcgaccgcagactttatttgtttgtttccgttcgatgattcattcgtttccagtacattcaaaagagagaaggattagatagtctgtaaatggtatcaaaaaaaagggggaagagaaagaagaaaacgtaccatgataccaatcgtgccagatttgtcgtcgatcgaacctttatcgagaaaggggacaagggacgcgagtgagtacctcaatattccagatagtttcctcaggctggtcggcaagaagggagaaaagagacaaacctcgaccccagatgtaagtcccatcataatgaccggagaaaggaggatggatccaggcgtcataagtcgacttttcaacagggactacatcttgatgacccgtcagaagcaatggcttcagagaagagtccgagccggtccactcgaacacgagtccgtacgtgttgaccttgtccagcttaaggtgcttatgactttaagatagagatttaacacatattcacacgcacacacataagcacagccatcatgttgatcaagtctgaatagagaccatacgtacaccaatggataagatttctcaaggtctaagttcaagggttccaagtcagagaccaatcagcgactgatccaacggcaaggaaagaatcaaagggttacggggagaaactaacaatcgtgaaacttctggaacttgtgccatcggccatctttaccaacctcgtccattccatcgtaactactcatagcaagcatcatccagttccagatcagtccacagaagagtatcatattacaatctattacagtaagaaatggagggactaacctttcggtctcgactcggacagccccaccgagccattcgacggcttgatccttgaacgcatcagacttccagaccttatctaactccttgtagaagtctgtctttggccagagtggttcatgctgatagcaaagtcccccatcagcttcagccccgacggcgtccagacctcttcctccgtctccacggccagtcagtccgatggtctcgtccaggccgaaatagtagaacgcttgggtgagcaaaaagattgggagaattgcctttcggaaagatttgagagccgaagaagatttggccggcctggtgtccccgggtagaggaaggctttctgggtggtaggcagggtttttctcgtcaagactcatgtttgtttttcctttcttttctctgtagctagaatggatggatggatggatagataaagcacaatgatggtaagtggtggtagatgatagatgataaacggacgatagaacaaatccggcattttaaacgatcggccatccgctgtgtcggaggtgaccggggcgaggggcgtatcggcttattccgtcggtcagagccgatgatctgagactcacccgtccgaaacggatagctcgttcttttcagagacagtctactcttgatctgatttgagtgtgactatgttatatttcttaaggtgtttcgttgcttgatctacttcatgaccatatgtgtaacatgcacactcattcatctagttgaatatatgttgatcaactgtgatagtgtcggctgcgagcccggtgggttcctcatccgaagtgggctcttcaaactcgtaatcatcgagctcatcaagagattcgtcaggtctgatggtaaggattccgattttcaaattaaaaagaaagagagatatcacaaaatttggtcaacaacggcgcgcagaaagaataagcagacgcaagaaatttaagacttgccgcttctgctctgctgccgtcggtttgagagattctcctacgatgacgatctccattgatccctcttgctttggtctgttcttcgaaccaggatatgacaccctaggtcttggtgctactctcactcctctagtcttcctctctgcatcctcgtcttcgctttcttctctcggcttcctctctcctctcttctttttctttgtccgcgctaccgcctttcctcctcggccttctccttctccatccaagtcggtatcactctcttcatagctcacagctgacgcaccgttcgctcgtcgactgctcgttctcctcttcaattctccacccaaatcgccatcgatccccaactcatctccgccaagacctctgcctcgaacagcctgtatgccattctcctcgataaggtcgccttccaagaacccagtcatcaaaactccgccgaccgtctcgccttcttcggctgcgaacctcgagtttccgtactctctagattcagccattacgtcgaacgcatctttgaacctgtcgagtccgagatcttgctggatcaagatgatcgttaactctggaatgagtacaaagtagagaaaatcggaggccgtcagaggggacgccgttgcggaggtcacaaccggctcacaaggcaggtatggttcaataggacagctaggtggatctatgaacagttcgctcaaggtctgatgaaacaagatttggccgatctctccgaagctatagaagaagaaggaaaaggagaggaagaagagacagattaaataaacgacttttgaagataacctttgaggcaaaacgaaagaaagcaggacactcactacccaggctggcacttttcaaacacctcaaactgtcctctcgcactcctgctctgtccttttcccagatctctgacacgctccttggcaaaatcatagaacagactatcctctttttcctttacgatcgtctttagtctacgcacgatcggctcactctttattcgagagatataattctcccagttgatctgcatcggccatctttttttcttcgctagaggaatcaacaatgattctgaccggtgaagcgcacaagcgttgatcgactgagccattggtaactttcgagcaccagggttggtgaccgtggggctcggttgagatacagagtggagaaatgacaaaatggcttccagcttggcggatggagcagagggcagccgttcggaacaatacggacacaaggatttaggtttgatcttttgtggccgtttctttgcttgaacttttatcaattccgcccatcggggtcaggagttgaaagagttgatcagagatgaataaagagataaagagtagacaagcgcaacacactcacgacgttgagcagcttcgtcccgttccatcgctttggtttgtaaaaagatccgttcctgcaccgtcaatgacccctccccaccttgttcggcaacattcccaccgtctgcatcctccccgttatcaaccgcgccgacttccttactattctttccgatagattcgcctcctccgagggaggtagacgaggatgatcttgcccctgttaatttagaaatcgtggccatcagaccaacaggggccatcctactctttaccggtatcggcttcttgtcggtctgcttttccttcagattgagagttctttgaacctttcgaatcggactagtctttttctttcctgatcttttccttttcggggtcgcctcgttatcgttgtgggagtcggagtcacaatcggtatttgtacgtgtgcttgggtcatgctcgtcctctaggtccgtcagatcagacaaatctgaatcccctccgaaagctatcgataaacccggatttgaactctgagagttagccgtcaccgtcgttgccgctgtcggagttgaagaagaagattgatttgagagtgttatagggaacggaataactggtttagcccctactatattcgttctcgacttcgagtccgattgcgtcattgtggctctaggcgttaccggatcagtatcggtagatagaagcagagtgtttaaagcgggaccaggaggtgaatcatgatagccggttgacttgaggcgggtcgatgagaatttagagggcccgggcgcgtaggctgagagaggtttgaaaccaggtttagatgatgaaactatcgattcggagagtgacctttttgttggtttgacaaacgacaggctctcatcttcagagctcgagtcggttggttttttagacttcatggtggtacgtgggcgttctttagaggatgagagagaggagaaagcattcgatgtaaagccgaaactttgtccagcagatgtcgaatcatcctttctcttgaatgaaggaagggtatttttctgaatcaaccaatatcaggccagccagtcagtagagtaggaagaaggacgcgacgggaagaaaaggagaaagaggaaagatagtgtataggaagacatacttgctgatgcattttgacttctgctgctcttcgctctttcttatcctcgatttcaaggctttccttggctgacaaaacgaacgcattgtttcttgatcgaccgttaggagacctgcgcgctgcaggcaactcgggtgggggacttgacgctttgagactctgttgtagaggcgagagagaaagaaacatccagaaaggaggaaggcatcgttgagatttctttgatacatttatacagcctctatatctgcagctcttcgtttgcggagacagtcatctgagggaatagtcaaaagaggaaaactgaccatttcgtcgcttccggaatcctcctcaccctcgatcggcccggacatatcaaccatgtttctaagttttgtactttcaccaacaccttcgtcagctgaattctcggtccactgggctgatcctagttcatcctcattgtcgtctgataagactgttttcccagtgaactcatcgagcttagctatccgcctagaccgcttgaaagaagaagaagaggtcgattgatcagatgaatccctgaacggaggaatgcctttggactgaggaagatgatgacgtttcaatggtgggtatggacgtgtcctagttggtctactaatcaggagagctttttgttcatcctgaaaggtatcttgatcgacagaggaggaggcagtgagggctgatgtacgtccggaaggaccagatacgatggttttgggattagaactaggattcatgttgaagcttggtccaagggtctgtcgacgcctgagatcttccatcaggcttgcctcttattatgatgtgatgggtatcccagagcagttaagagacaaatgtcttggaggatttaccggaaggtctagagaagagaagagagaatgaaggaaagagaaggagtgcaagagggaagatagtaccaacacagacgcgtttcggtcaacactcatcatgtttaatgcggaccctgctcgctttctccaagtgcgtttgctcagtgtgaaattttctcaaaagaaggaaggatacacggaagtgtctctctttctattctgtacgtgttcttttctatcatcccatccagcacaatccgaggcaaccattatcatcttcatcgtcacttgttgctggtgtaaagaccaggagagagatgtttttaaacctagtagggcagacgatgggactgatgcatagttagggttatactgacgtaagcagatacattaggggttgacgaactggcatggcctacacagcatttgaaccggacccaaccggtatgaaccttcggtgaaccggagtatgctcgccgaaaggccgatgatccggcggcggatgagaccgaaccgccacaaaccatcatgaaccagccgggttcagccgccgatcacacgtcatgtcttggctgtacaaccgaccgcacaggcctccttgctcatccttctcgactggccccacttaagaaggaaaaccgtctgagagctttctttcctcttattcttctcaacgatcatctcgattctttgctcttccccgctcacatccagaccatgctatctacgtctacagctctcatccttgctactgtgttggcatcccagttttctcaagcacacgcatggaccgtatgcaggaacagctttgttcgtccctatcgtctgcggctttactgacagtggtcaacgaccatacggaaaagcgatctgatctagtgggatgtcttggcacacacaatcgctaaattttctttcctctttctcgcttcttttatttcttttcatccttatccatactctgtgcacagggtcaatactatcgatgcaattcaggactttcggctgcagctcgatggggaatcggcgtgggagcaggttcgtcttcaaaatagtaatctatatccttcaactctcgatccaaacgggctaatcttttccttctatcatatctcttttcccagctgtgttgtttgtctttgcccttcttatgctcggattgactcgaaggcgaaggatccaaaggcaaaatctgtactacgcccaacagcaagctgagcttggtagcggcaaccaattctacaatcctgcagccaatccccagcaacagcaacaacactcggctccgccacagactcaacagacgggtaccttcggcgggttctttaaaaagaacaaccagggttcgtccctcatttctctcttctttttgtcagccaagttgaacgttcccgctaactcttgattttgcttcggttctttcaatcatccatattatcaaaagctcctcctccccctcctccggtctaccctgggccacagcagacctatgccccgtatgtctcattcccttttccttgttttctctttcgttactcacagaccttatggtcttcctctccgaattacattcaactgaccttatcccttgactcaccgtctttcatcttcagtcccgctgctccctttcccggataccagaccacaccagacgtcaacccccatgaagattacgagcgacgtcaacacgaagagaaccttcggttggaagctcaacggcagcagcgaacctaagttccttcgtttagtttcagcatcatagagcattatcgtaacttctggtctgctccataggggttcttttccttctctttcgtcaagtttagacgaagttcttgagctttatcattcttgttctgtttggtcgaccgattcggtatacacacgcaccctggcgtccttcttctcctttcttgtctgaaactatctctatttatgtagccatagcaaatctcttgtaattctttttttaaatagataagcacacgcatgcttttgaacccccggatgccattaaaagatcatgagcatacggaatcttagcaagcgttaaggaagtccaaaagattggatctagcgagatgaccacaaaagattatatacaggtaagatagaacgtactcaggccgacacgataggttcacgaaatatatagaaatatagaaatacagaaagacaaataaacagtttaaaggagagaaagagaggagcgaggagagagggaagggagagaggaggcaaaacgatttactcatcccgagtcaaaaggggggaacgttcatctgcagtaagatcagcgtgcacgctcgagtccacggttgattgaccatcttcggtcgatcggggtttatctcggatccgaatcatcgagagtactttatatcgagtccagtttggagaagaacaaacaaacaaagaaaggagaaaggaggatgtttgtcagatcatatcgaagtcgataaatcagtcgaaaaagaagaagaaagaaagaagggccgataggaagaccgaccgataagagtcagaacaaggaatcccaaagcgagcacaatgaatgtttgaggatagattccagtagtagcagcatacgtcaatccgaacagcatcggtcccaccaccgtacccaacaccgcggtcaacacgctcatcgcgcctaacattttacctgtcgacgtaggatcattcacaaggagtaacgctagagaagagacaaggggatcgactccttcgcctatggtggatacaaggagagagataacgaacgcggtaggcgtggtggagaagatgatactagagtaggtgaggatgctgataaccaaggagaacatgatcagttgatgttcggatttagcattggaggatgcgctggaaggagtcgaggaggtggaagaggatccgatgtatctgaagaaccggataatgactttattgattaaaaaaaaaccaagaagggaggaaatcatatcagagtaagcgtgattggatgcagggacaagaagaaaagaaactagagagaccactaacaaggaaggacgaataaaaggtagacagcttgagtagtaccaaacgtagagatgaaaaggcctatctcagctggtccccagccgaagacgagttgagtgtactgaaatagtgaatctcccgacccctgtgtttctccgccgaaagaaagagaagaattgatgatcatatgagtacatcgatgcaacaaagaggtgataaggctgaaataagaaagggaagagggaacacacagcaaccaatatcataaagcagaatccaacagccaaccgagtaaggttccaatctcgttttcctttcgggtttgatatatccctcttgggccagaagattgccagggggctcagcgtggtccatatggtgttgcctatggacttgatgacccatctgatcctcatcttcatctttttccagactcccgtcaatcctccttcgccgtcgttgtctccttgggcccgtccatattcctcagcatccctctgctcatttgctaaggattgttcccgttcagtctcttttacggcctccatcgattcagccgacaaagattctggcaaaaacagaacggtaaccgctacgaagaacgttctgatggcaagcgagaggtagaagaccgatagagcaccagaaaaccatctgacgatgaatgcgcctgacagtggaccaagagcgacaccgaccatacccattcccatgagaccggcaaaatatcgggagcgttcactgtcagctgtacaatcggcaatataggcttgttttactgccgagacagtgatctgacctccgaagaggccagaaaagatagcacccttttgaaaggagtcgagtgtgagaacaggaagattcgagatggacgaacgacagttgagagatagtattgaggagattactcactgcatagaggaacttgtatcctcctggaactatagtaggatactttgcggtaagaagaaagacaacatcactttgagaagaaaaaaatgatgagagaggaacggatcatcatcagttgagattgaactggtatactgtatgacaaaacaaaacaaaacaaatgaaggagaactcaacccaaccatcacactagccattgcaagactcaagacgggctttcgaccccacttgtcggacatgcgagtccaccatccggtcgtcagcgcggacataacgccaagaaggattccgacgactggaaagaagagcggacggacacggtaatcatcgtatgtaagcgttcagatgtgaccaggatctaggcgccgtaagtcagtgcgaacttacctgtattgaaccttgcggcaattctgaacagaacaacgaagacacacagggagtaacggaaacatcagggttaattagcgtccacgaaagagagaacagacaaaaggaacagaaagcctccgactcacgcctgaacggctgggttctttctacacatgattggatcaagaatcatctgctctttctcaacctccgacgtcctgtcctgctgtgcattcgacaaggggatctcgccaaagtcaacaatgacagaggtcttgttgatggagatatcatctgaatcaagagccgagggagcgaacgaagtatgaacggcctgggcgtttggttgtacgggcaagatggttatatcattcgggcttcgcgaatggtgaatgtcgctgcatagttgggtggtcaatgcaaagatacagcgtaaggaccgacagatcgcaagatcgatgatggggaaagaatgagcacgaaccaggcgagctggttgaagagctcgatctttggccccaagctcatggcgagcgagaaagccatgccagtatggatccagagtaccctatgtttccatgtgccagacgatcggatcatacggtcagcacgtctgactcgagagcaccatcagagactcaagggccgtaccaataaggactggctttcctccatccggacttctgtcctctggaagaatgaccagtggtagcactcctgctgacagtctgttcaagccgaatggcaccgcagaaagaagacacggaagagcaggatgagtgatgagttggatccggatgagcccgaattgattgagcaggaattcaagataggcgttcagcaagggttgaaacagaacacgcactgggaacccttgagtctccagagtgatacccgcggccatctctcctggatgaatcagatcgtcaactactgggtgagcatgatatggtccgtctggaagcggctcctgatggccatggctatggtgatggtgatcatgctggtggtgatggtgatgaatttgtgcgtcatcgatcgttaccggcgctatcggaacgtaagataacgaaattttcgtcaacggcccaccagagttgaccacggcaagatccgagacccaccactatccacaactggggtttgatgtgtgctgtccgtatgatgcatcgtaatacaagatgtgtgtatggacgagtgaaagaagaagaagaagaagactgatagcagagaaggtcatcgattaatgagacggaatgaacagccaaggctgagtttattccggcccgacgttcccacgtggttccccttgggagtcgctgatcgccgacaaccagccggaaagaagacctcatagaaaagaggtattggcaagatagcttcatcagacgcacgtacgcacacatgtcgagctagatagatagacatattatgggtatgcatgtgtgtttgtgtgttagtgtacagataagcacactctccttcaggccagaaagtcatcaaagatctcaaagtctaaaacatcataggaaacccatcaggctctgcctgttcctccaattcgtactcttcgagctcaccctcaaataacaggatgaccgaatcgacccagtcgtctcctgctcttctcgctctgccgacctctttctcgacttctaacctcatctcccggtcccaccatgcttcctggcctctcttcacccaaacgacctctacaaccgtgtcggatcctaccagcccttcacataggtactttagatctcgcacgctcacagccgggtacgctcggacttggacgacttccaacgaggggacggagagcggagtgaacctaggtaggtgtccgatctggtgagaggcaatcgagagaaactcggtgtgggcaagatgatgagctgtgatcgctgcgagagtgacctcggaagaagacgtaggatcaaacaggaacgtccgaggagagaacgtgccgagaagcttggtgatcctccgagacaatggtttaggaggggcgctcgaataggatgaaccgagagcaagatggagggaaagcgtatgtagttttggaaatagcaccagtccggatactggatctatacctgataactctataggaatctaaattgaaagaaatgaaattgaatgaaatcccagtcagcgtttcctcttttctctgaaaagaaacttcgcctctgtgtagaacttggatgcacccaccttcttgagagtagcaaagttcagagtaagcgtctcgagctgtctgtagtcagccaaccgttgaagtttaatttccttcctccagccgtccagatgacctcctaaaagaaaatagctatcatatcctttctgagaagacagctttgtttggacgttcatcccatcgaaatcacgagcaaaagtaagcaatacgaatttcaagagagtgggagaaaagatcgtgaagtaagaaacgagagaagcgaaagaaaagctcacaacgacacgctgataaaacttccttctaccaagctcgtggaacgtccaacagactaacaagacattcgcgcctgactttcttcctggaacaatcgcctgtttcacgatcggttctaaaagctcaaacggaagatcattgatggtcgattttcgcttcgactctggctttgatggcggagggggagaggacgatggagttgggatcgaagaagtaaagatggagggatcggaaataagtgatcggtcggccatgattcaaaggacatctcgatcggtcaagagagatgaaagaagttcgagttgagattgataggaaggtatcaatcaactagattgagagggacattgcgagtcgtcagatcgggttggcgatggtggtggtggtggtgaaacaaagaaaaacagacgatgacgagttcatttttatacaactctgctcacaccgttctttgaccgaccatcctcaaaggcttacagctcgtgagcccatctaacgcttgcctcacttgttagcagccttgtctgtatgaatatggcacagacacgatggaatacctgtccgacgttcttactgatcagctattcgctctggacgatgacgatccactcgacatgtaaagcattcaatctatagtgtgcaatcatacgcggtattgcgctgtccaaaaaaaaatcagagagacgaaacgaaagaaaaaacaatgaatgacaccaacaaagtaagagtaaaaagaggatagcgtttggtttagaagttctctgattacatgcaacatcggctgacccaagttcaagaaagaaaaaagagaagagaaggatggaaacaagtccgggatagataaggacaggttattacatggcaactaacttaaggtctaagaccaagttttctctggattccctcaaccgcgttcttgatgacattctccggagcgtcgtcaatgtttactatgacgatatcgtcctctgactctttcgccggaggttcctctatcgtcgctagctgagagttcagcatctggcaaacatgaaataatttggacatataagcagttgagccgatagaagtgacaaaaagaaaacgagaagacgtacatcctccttcatatagtgtccgctccggcccttcatcctagcagccaagacttccttagtaccatatagatagacaaagattgtcttgacgttctctccacccgatggggcttgcaatccatcaggaaggcagggcaatgtgtttggcgggagggctaaaggaaacccacaggagggtgccagaagagagagcattggtgagtgagaaaacatccatgaggcaacgcacacgcaaagaaaacgcgaaaatgcgcacaatgtccacgctggatttctctgtatgcatgcttaagggatgaagcggcaaggacacagcctgtaggtttgatctctaattctccgactgcatgggatctgatccgtttgagctagattatatttccaagtaagaaaggtataagaacgaaaaaaaggcaggaggtgacgtcagcgtcgagaaaaacggcagaatccttttttctctctcatacgctttcgaacgatgaaagacacgcaaacaaggacaaacccaagggattcggtccgagtctgttaatggaatgttgttcctcatctgttcgacggcctctggggtatgaagagtgtctccatcgacatacgggatggaaaagtattgggcaatccctgttccgaccgttgattttccactacatttaggcagaagagacggacgtcagtctgaagtagtatatacagatcaagagatacatgatagggtaacataccatccgcatacaccctatcggtttccagcacagagagatcagaccggcacatacaccaaagaatcaaggttgagtcagccccaaagcacaatgcactctagcaaggggaacgtaacgaaccatgacatagatgatgaccggttgcgggcccaagccaatcgtcttgataggttctatagccattcgagtaatgtcaagttttgtaatccgagtgagtgagcggttgagcaagtgagtctgaggccggaaagagtatagagtaaggtgaggtaagagttggctccctcagccctttcccctacacggttctctcgttcggggcccccgtctatgtaaaagtcctcgttcgtaatccgtccatctatacatttcgacactttggattcacatcaatctcaatctatccatcatgaaagacagacatttcctcggaacagatggagaaagagaaatgcgagcaaatcgagaattgaaatgaatacaaagagaaaacaaaagaaaaaacctaccctgtacgatgtcagcctcagagttctccaccatcttctcaacgaccgcgcttccagctccttttccagtttgagacatctcatgcgaggccgctgtaaagtagagagcggatgctgtcaagaatagagctgcattgagctgggaagcaaagtttgggttggacattgctaaggcggatgtgtattgccaagattgttataaaaagtgggatatttcttgggtcgtctttcgatagtatttcggcgagtttggggacaagcacaacactggacagagcagacgataggcgaataagagaaaataaaaaggatggtgatcgaggaggaggttccagtttaggtcgaaggaaaaaagaaaaagaaaaaaaggggagatgcgggtatttattcgttcgcccccagaaaatcggaacttcggcccgcggctgtatttcttctcgcacacggggctttctctccttttttgacagagttcacatttcattcgctcatgcataccggtataagaagtagagagaaacaaagatgacacctaaggatacaatgaaattgttcagaaagaagaagggagggaagaagtagaaacacaagggggaggtgtgctaatgcaacaagatcgatgatcactcaagtcaaggtggggaataaggcagagaacaggaggcaggaaacgctgatttttcttctccactggtttacttcttgtgcacggtgtgctctcctcgatcagcgtgctagattggtgaacatatgaacaagaaggtaagttcgaaggatcgtttcacgacagcagaggtgtcatgatgtaaacttacgacagcagcctcggacccagtggggttggggctggaaggcacggctgcaagtaacaagtccattcatccatttatccgtcaggatctcggtatctacatgaatccgacaagacgtagggagaaaaaaaacataccctgatttccaagagctccctcttcagagtggtggtgtcgctcgatctgatcagcagtctttttctgtagctgctccacagagatatccttggacttgtcggccatgatgttggcctctccatcactctgtgttttgcgagtaaccaaacaaggaaacaaaattatgtcatccaagggattagcacatgtgtcatctctcgcatatggacgacacaagatggagtaggtagagagcaaacaaacatacagcaaggttctcgttccatccgggagcgtgagagtcgtcaaacggagccgagctagactgctgtcccttcaagtttcgagccttctcctttgcaaggacatcagggtcgtttccgtgctgagttcctccgctggcaagtcggattctgtgtagacccggaagcaggatagaaacaagatgttcggtattggatcgctcacggagagaagtattgaaaaaatgcaaggaaaggaaatggactccgatgggtcggaaaccgacggcaagtgatcaaaggagatgcaaaggactcacgatgagtacgagatcggtcgaacggacgcgacagatcgggcagggatgttgagtgccttggtaagtctgaacattgtgtgtaggtatacgtgtatgtttgtgtttgtgtttgtatgtgtgagatgaagcgagtaatagatgatctttcgttggttgaaggaagaaagaaagaagaaaaatgaatggcttctcttttttcgccttttaaacccagacgatcatcagaatccgtccgttacgtcatagcgtcatcgactgagttagactagatttatccatcaccatcggatatagcaatacaagaaagaatactcatgtttccgtacaagagcatgtacatacatacacacacacatatacacgcacatacacacaaaaacccatacacgttatacagatgaatttacaatcaaacagaaccgatgtccattcgtacaaagttgttgtacacgtctcccttcctaagaatagtattccatcggcttttagccaattcaggcaagaagaaccctccgtatggagcgtggaactctgaaagggggtacgagtaattcaaaaagcaacggcggccaaaaggttctgtcaattttagactgagaaagcaagaaagaaagtgacattgctcacctaaataggctccgtcttgaaacaaaacaacaaaaaagagagaaaacaggtcgtcagccttgacagctcagaacggacaatacaagaacctggagagaatacaaagaaagacacctacaatcgagcccataatcagggtcctggtcgccctcggtggcatgcagatcttttctcttgactccctttcctcctccgggcgcggtgtagagctgaacgccagcttggtttgaatcaaacttcaaggaaagtcccgactttgtggaagaaagaatgactaaaggtgagccaataggctcagttgtggagagcacggctgataaataatccacatcggccagcccagtctccggaaatattgttgggttctccgaaaaatctcggttcacgtcaaacatgtagaaatcatcatagcccttctcggggtagctcttcccaatcaacttaccctctcggtgatcatgggacgtgcctctgtccgaaggaacgagtgaccccgtaggaagggaagtctttgggtcgagatccaacgtgtgcgaagactgtatcgtcagttggtggctcttaatactgctcgacccactcttctcagtagaaatgtccaggttgaacccccaatgttgggtcaagttgatcggcgtctccagatcgtccactccaacgagagccgctcggtagacgatgacaacgcctccttttccaaatgattcctccgtaagcgcgatcaaaacttcggatttgaccgttccaggatatccaccctctccatcgggtgaggtgtatgtaaatatctgggattgaggagcaggcgtctctgaggtaatcactttcctctcggcatcggaaaacaaggttgaagtagaagtctcaatcggctgccactctcgaagatcccacccttcctttcctccgtggagcgagactccaggggtagaagcaggataagtttgaggagtggcgactcctccagaaggaagctttagcggcttctcggccggtagtctattcacgtatcggccgactgtttggacgacgacgatgatgatgatcagtcataatatccgacactaatcaaaagaaaagaatcaagtagctcaccgatgcaatgtcggaactatttgaataacatatacatggtgtaagtctcaaaatctagaagctcgacggaaagagactcacatctctggtcttgcccgtccaatcctcaacctctgggatgatatcatttactctcccaccctttgctccatccagctcggtcaccaatagcctatggattgtcactatagttcatcagatatgaaaagatcaataagaagaaaagtgagaaaatatgataggtttccccggatagagattggagggtcaaatacccatctggacgaacatccttgatgaaacacagagagggtgagctgagaggaaggaatggagagtacagtcgattgaggagccattcttgtcagtatcaggatgagtggtgatagtttcctgtgtcttttgagcgggaaaaaaatgtatgaattaagaagagaatggagaactctgatgggacgaatgaagagatcttaagatgttcgctaaggatctcggacggaccggagaaataccaaatccggcaagtggccggctaaagccaagttgcgtctattgcctatttatttccctttcgtttctctttatctcttcttcatgtctttcccttcttgcttcttcttctcttctggtatccatgatctaacggaagacgatgccaatcggcttcacgtctgatgtctatcaacatactgattgaatgagcggaatccttaattctactccacggattatttccacttcggcaaatctaatagagcccgatcaccgcggagttttccagtatgtgttttttgggggggaggacgtcatcgtattagacacacgccattcgaagactacgggagaaagaaagacccaaagaaaaaaccaaaagaaaagagcaagtcgtcgaaaaagaatgaaagagatcaagtggaagaaagaaggtaattgaaagaaaacgtaaggagaaaactcaagatataaagacgagatctgatttgaagaaagctatctattaaacaaatggctagtgatcagtgttaaccagatcaactagcctcctatcctagaaaagggaaagttgaatgactgcatagatataaggaacacagatcgagaaaacagcataagcgagaagagagaaaatgacaagaaaagggatatataaggagaagaaaccacctaattcacaaccgaaggagaagtccatgatacaatctaatcagtgttttgattctcgaagacatctctactggaagctcgaccgtactggaggaaccagtgtacagcacaaacaatgggagccagtcggtcagtttatcctcttcttgaactcaaagctttatggcggacgtactcaaatgtggcatggttgagcagatcattgaacgcgtcggcctctatggcggtggatgaaccagcgggttgacttctcggctgagcaacctctctgtggggatatgaatgtaacctgatatcagtatagacttcttttctgatagtgaggacagaccggattaaagacgaacctaaagcccattgaccacgactcaaaatctctcttctgaacaacctgattgatcaaggtgatgatcgtgttgtgtctcggatcgcaggaaatacgatcatagagcggagttactactactctaggcccttcgagaaactgtacaaattggccatcccgactgtacatgttttcaaaccaatatggtacggtttcagatgcacagaaacatgaaaactactgacagagacgagacataagactggataatactaactacaagagtagaccggtgattcctagactagtattgtttcgtctggcttgcctaaggattgtttggatatcctcactgctgatgtttcgtgaatacgaagaagagcaatatactggccagagtggagacgtaacgtacagaaaagaagatagacaaatgaatgacgaatcaagagagaacggtagcggaatgcaaactcacctaactgaagtatctcttcaccattcggcagtggtgatggagtggggagagaggatggagcagaggcggagtcagaggcggagtcagagggttgggccttgttagaacaaggaatggttgagcttgaggtctcaggcatgggctaaaaggattcaggttgttggcttccaaaacacagttcggaaacgtatgtgttgataccgattcctttggaggagaagggaagaaaagaggaagaagaggatgcgttaaatctgtatgtgtacgtaagtgtgaatgaccaccgggtggatgggcaatgggatgtgtcattagcaataccctgagaggcggcaagccaagaaaagcctgcttacctcaggtgttggatgggagcgaggacaatatcaggagattctctttctctctcacaccacacacagaggatgagaatgatagagaacacaggatggagagtggcgtagagtagagtacggtagagtacaggatagaaagtagttgcatattcaacaaacgtagaattagcctgtgggagtgtatcgtgcacattagagtcattaaccctaataatcttggatcaggggaaatctgcgatgaattctaggaacaggtttattaacctctagctgttaccacaccattcggctcccctgccaggtcatctctcatctttctcctcctccttctgcttctcccctctcctctccgctttctttctggcagatgtcagaagacgccttgggactgctcactcaagctttgtccgctcaggagccaacagctcaggctgagcttcttaaaagaaccctccaagctcttgaagacaacccggtacccatcccgcagattgcaggctacctcttgccccatgtcggacagggcgagggacagatggttatcaccggattcttgattaacgtgagtctctgtcattccccctttgtcttctaatgttcctccaagaaggaccaagtcggccaaaagttaggataacctaggaaggaaggaaggagcgaacgaaagaacatgtcgggtgtaccattagccaagaccttctttcatgggctgatatcttggattcgttcgcgtttctatcttacttctctctcttgcaatgttttcgtggcaaacagatcttagagattggaatatgtagatcgacgcttccaatagaagtcaaagttccgcgtaagatcttgaatcctcttttttctctcttcttttcttcttcttcatcttgctgtctcaagtacatacacctcgctctgacgaatatttcctcttccgctgattctgagacaatctctagtatccttgcaaacgattgagacgctcgctcaactgcttgtaccatccactcggcctcaatctctcaaattagtcatccaaatattcacctctttctaccctctcttatttccatacatgtgggttatccaggactcttcttctgatcttatcccagttcattatccgatgtatgacgcacgacacaggtcgctcattatgtctcctttgcttcctccactcaggtgtaacaacaaaaccaacattcatctttggaacactttgacaacgagtaggattaagatcaccgaatgggctacgtatggccagttctcatctgatggaggaaaccaaccgataccactccccccgatgacaaagggcatcagaatccaagctataaagttcttgcagagggttgtgttggtacagagtcggatcacagggacagacccacgcgtgcgtttctcgtttccattttcttcgacgcgtctgctcgacgagcttgttggtctgcataggaaccgcgtacatcagatactgagtttctatgtactttgttccactcttctttcacaattcatacagttaaataactcacggctagaccctaacatagccatggttcctccagatcatcctttcattcaagtacgcgatctggagcaggagggggtcaagcttatcgagttcattctcaccaccatgtacacgtgccggtacgtattctggaattcaaatatgtatagtaatcaacccgtgtcagttccatacgctgaacttgaatgtcattcttctttcttcttacgttgtccgtctctttcttgacgcgcgcgacaaatgaacctttagggataccgacctcttgacgtctctactgacatcattgttgactctaattcgtctgcgaacacatctgtcagcggtgtttataccggcattgaccggatggacaccagacttcttgactggactgccgagaagtgagatcagaagtgtggagaaagtcgtccgggcgcttatgatttatcttgaccggtccgttcctttcctccttgtatcaacccttctaggccttactaatatatatttcgatgtccccttccttatatgtcaacataaaaaacaaataggtcgaatcttcagccgactctgaagcctacgattatcgaagctttgcagcgacaacagattcgaatggacgtatcctatcgtgaaggtctggaagagtctcgtgcacaaaaacgacagttccaagcaatgcagcaggcttccttgattcctccaagatctttttcttccactcctctaactgaagccgaccagcaaggattctcaaacaaacgggccagattagactctgaacccgctggtttcaccgttaaggaggaagaagtcgttcagacctcatcggctcccaaagaagcagctgtctcctctgtcgaggcacctggtagtggagaaatcctgagagggagcgttgagccggcgagagggatggagggaaccttatttgacgtgtcaagattacctgtagagttggtcgtggacctgatgatggcgaatctagacatcattaaagaagatgtattgattcaaaccattcgagtgagtgacttaatcactttttcattttgaaaacgacgtattattgtactgattgggtgaccttctttcaaacggaatgacttgcaggatattcgggcccaactcacactttctctgcctccaaactcgatacctccttcagcctctatcacactccttactaaagcaatcgttcctgaaggtcgttccgccggtggcgccgtcacatctacaggtgaagtcgaggccgagatcgatgaatcctcagcggatgtagtgaatccactagacaggacatcccctgaggacgatgacgatgaagacattatcaaacctagtctgatcgcgctcaaggaggaagaagatggtttctcggaagaccataagaatccaaccttgatgacgacaacgacaatga

SEQ ID NO: 770 - DNA, 2195 bp, Xanthophyllomyces dendrorhous
  misc_feature (1831)..(1840): n is a, c, g, or t
gtattggtctgagtattggtctgatcatctgggtgagatactcacccatgtatccatctatccgcccatctgtctatctatcttcatctgacagcatcctccttccgctcttctgtctctctctactcctctttctgctgcctctgctttatctatgtcctctgcgtgctctatctcctctctccgctcgttgattcatcttccctatcgctcgtccaaccgatgatcgcttgccatgtcattcctttctgcaagagttgtggcatacttggggtcagaaacggacacatcatcacgattgactatggagacagtgtgtggagccagagaaagcagaacaacccaaaagaaataaactacaagtatcagactacaggaaacaaactacacgagacaggagaagacatccctaggcaaaggaaaggcaaagaagaaggggaacagaaagaaggagaggaagcgaaggaaagcaaaggaaagcaaagggcacaagagggatcacaacgaaaaaagatagagaaagacaaagagaagactggaatgacaaacggcagcacacaaggaccgatcgtcccgtccattctgtttgccgtgtttgtcctgcccgatcatctccagacatggccgcttagcgatcgctagcttggctcgcccgcagaaagctgctcgtcgtcgatgaacgccactccttgtctccggccgatctgacatccacacaggtcgagcctgtcgaacggaagcagaaagctctgcagagaggaaacgctctgaccggacgaccttggctgcatccttgatccggggagacgccagtttggcaagagaaggagcagaccggtctaggtcatcgacaagctcgaccttgatcgttggtatcgtcggccgtcgagtctgtttgccaaacagaggcgagctagcaggtgaggagtcagaacgctcgacaggtggagcagacagaacggacggagcaggcgggctagacagagcagatccagaaagcttggctgaagataggtcaaagcggcgcttcgcaggacgaacgtccgaccgcctcttctcctcgtcactaccatcatcgtcattgtcgtctttgtcatcatctatcactcttcgtcgcttaggtgactcgaagggaggccggggcacttggagtcgctctcgatcgaccatctccgtccagctcgctgatcagacaaaaaatcaccagaaaaacatcagtcacaggcacaacaagggcgagcaagaagcccgggtgagaagacaggagaaaggctcgacagaagagagacacccacaagaagccgcctgaggcaaaggcttcggtatcgccgatgggttcagaaacgcatccatctcggcatccgtcatcggctccatcccccgcagctcgaagcgctgtatgggcgtgaggctcttgagatacgacctctctcgacactctgtcgtcgtcgtcggtagtctgtgcgaacaacagaaggatggaagaacagaaggatggaagaacggaagaacggaagaaccataccacgtcagtctagaaacaaacatctgacaaactgaaggcgtaagcagccaaatgcatcactgacctcatagcctcggcctttctgacccttccagccctcttgacgggctgaggccggtcgccctgcctggctcgactggccacgttggcccgttcattctgcgatgcagcgataagaaagtcagtcgacacgaccgagacaagccatgacaaacaaggacggcaggcgaaagaagagacgaactatgggcaagccctcgacaggatatctcttcgccggccggagcggcttagcggcgggagcannnnnnnnnngatgcgggcatgggctgcgtgtccgaggaaaagtgcggagcatccaatgaggcgtaagaggggctgaacgcgtgtaaagcatatgatggggaagacgcataggagatgctggaagtgtcagaagtgctggaagcgtcggaggcgccggacgtatcagaggtgtcgagaacgttggagacggaagaggcaggagggagggaaagactgtaacgagaggacgcaaggctgaggctcatcgcggtttgtatgtaatgctagtatccggactgcgtcgaacggtagtgggacaggaaatgagacaagtgcaccaggtggtgtgcgagcagggtgcaggtgagtgtgagtgtgcaagggg

SEQ ID NO: 771 - DNA, 1131 bp, Xanthophyllomyces dendrorhous
agatcaataggtcgaaaggtcggcaggtcattcgctaggtaaaggactggcttggtacaagaagaagtcgagacatctgacatgaacagagcgaaagatcacaagagcgggaccagctagcgcgtcctgagggcgagcgactgtccggacggccagctagccaccagactaggcatgaccaccctggccatcggtcgtctatcactgagaagcaagtcaaagaacagagtggaagatggcatgacacacagagatcaaacagagaacagagaaaagagaacagagaggacaggggaaacggggaaagaaaagaaatggagtaatcgaggaaaacaaaggggaaaagggactgcgttctgtacgaccaggaatggcaaacctgcgtatcgtacctggccaagctcacaccacacagctcggcggccgacgtccgggtacaagacactcgatcgcttgctcgtccgttcgctcactcggtctgtgtctgagctctcttcgtcaggcagactggtagatggacatgtgtggttgttggcagcagcgggagcaggaacagaacgaacgagcagtcggatcgagacatggtcagcttgtgcacaagagaaagcagaggcaaggcagtagaacacatgaacatccagaggagaaagccatcagagtgtcagagtatcagagcaccagagtgtcagagtgctagagcatcaaggtatcagaccgtcgggaggtcaaggtggacagggatgtcagtccagtcagcgacgctgcactctggaacaaccgaatgagccgccgacaagagatacagccgacaagatctttgcccatccgtcgcaagcgagtcagttactagccatggtcggtacatgcagaatcacaggtactatcacaggagcctctacgggcactgatgctggtattgacaccagcacgggcactgggtaagtgaaacggagatggaggcttgccggactcgacgaccggatgtagtccagctagtgaccgcgactagggatgcgatcgtagttgcgacgactgtgcctttcaactgtaaccctaatcatagtccggtcgtacatcgagtatcaggccatccacaccacgagacgacgactcatctagagaactatcaaa

SEQ ID NO: 772 - DNA, 569 bp, Xanthophyllomyces dendrorhous
atgacgaaactccatgctatcgagaagcaagtacccgttgcgctcgtcgcccgagtcagggaggaggagccgaggatcgagcgagcttactatccgaacccatatccgtgttgagaatacttgaatatggtgcattcgtttctgcttatcatctatgtacctaagccttagctagcgcactctgccagctggcatacctcttttcttctcctacctctttttctttttctttttctccttcctcagcatttaccataactgttcgttggtgctgagattactttgttcttatatctcagcaatacgaaaccgtatttgctgtcaactttttcctctttttctttttcagtgtctgtttttccttccttagcagttatcagaactgtctcgttggtgctgagtttgaatttcttgttttccactctattttatatcacaaagagtttacttgctatcaatctaggcaaaacacttggatattctcacagattcttttttctattgataccatatggtcacacaatgtacgagagccagatgacatgtaagaccccagatgctctgaaaag

SEQ ID NO: 773 - DNA, 2151 bp, Xanthophyllomyces dendrorhous
gtgaaaatggacttttcgttctggcacttgttcccaatcaagtcctcactggtttcccaaaccatatacacaccacccaggtgtttcagtaaaatggattgagaaaccagaaaagaaaaaaaaaacaggaagaaacccgctagaaaatttatagctcttcggaaagagagccttgggactccgcgcaaacggaggtcggaaggtgatgtctcaagaagagataaccaattacagatgaaattatgtcaagactgctgaaactccaacaaaacccaacacggaatccgattttacatattggaattcatgtgtggttcaatatgtatgaggccgtttggcggagtggtctaacgcggtagccttgaattcaattttagatagctactcttctctgaaggcgtaggttcaaaccctacagcggtcgatttttcttttgccaaattttttcaccacacagtttgtatatcgccagactggctgttgtgagctgaaagtggacaaaagaacgtacgggaacttaacataggtttcctcgagtatgacgggatcaggtgaatatcatgcgtcttgactgtttctcaaatttcggatttttacgatatcagccgacgatatctgaagtccatgttcttcatcagtctcgcatttttccgtctctccttacttctaccttcccttttcttttagctctgaccaagactgtttagttgtcgagaatttcactatggtcagaccttagtcagtatacaatggaaggttcagttggtcgtggctgtctttcttggtgcccgtcaggacacatgctccttctctttttctatcttggcttccacgtttcgtctcttatcttcgcacatacgttccatgttccgactctggcttcgttctgtctgctcttcactttcttttcattgtgtcgtcttcgtcgatgttctattcttcaccttgtctgagccttcatttctctcacgttagtcaccaaggttcgtccgacatcgctgccatctttccatcttttgactgctcgtcggtagcctacctgttccgccgcagctggatatgtctctttccgtcttgtaggcttgtgtatacaatggtggcttccactcgcatcgttctgaacgctcagatggaatgaacatttcctagccgacagaaacatcactaccaaggtctcaacagcatcctagtctacagacgttgcatccacgtttgcgcccaccaaaccgtagtcgacagcccacacacagagcccctcttcatcccgatgacgatgcaaagggatgcgaagagcctatacttgttcgcctacctcaccttttccaaaacacacgtcggtagcttagtttgtcccagctctttctgtcacctcacccacagcatcctccatcgagatcatagccaactcgagagcacatatagtacgccgtcttgatccagatgaagactctactcttgacgatcacatccaaacgtgttcactctgttgaaagaccggcagcttagcccaacactcagcgagctgaccaagatcgtccgaacaacagtctcgaagcatcgctgcatgatcgtagtcggacacaacctgcacacggaaagcacttgatcagtaatcggatacatcatccatcagcatcgtaaccgaagaaaagtgactcacgtgcccgcgtcagtctggcttggaacacaagaaggcgacaaggatagatgagactgaccaccacaagggccgtgaggcatggaatgcatgtgtcagccagctcggctcgatcctcgacacagatctatgtgcgatcaggccgatgctcagtgaccgccaaccacgttcggagtcgggccactcgatgcctctgatgacgtatactttctgaaagatcccccatgttttacttacatcgacgattcggttgttgtcatttcagacatcaggatcggaagacagtggctccggtctctctacaagtaggctatggtaggccaaggctgatgacgaacaacacatgagtacgggcaagcttggcatggactctgctagacttgacaaccgaagaacaaaaggacaaaccacaagatatacattgccaggatcatggagggattcgactgcaacatcgccttctgtgaaggtcactgtgattggcgatctcactg

SEQ ID NO: 774 - DNA, 528 bp, Xanthophyllomyces dendrorhous
cttttgcatgcttcgagcagatagtcatgctcgtatgcagagactccgttgcactccagcatacgggtatctccttcgaagtcgcctagcatatgttgtagaagacctacttgggcgtccaacgagacttgcttggtggagaaggtagatgtccggccgagcacgacgacgcgctcgatttggcgagcttcgatatggtgctggacggaactctggaactggtgcaacctggacgttgcggcaagttgaagtggactgttggaaggagggagtgggaccaaaggagccagtgggacgagaagagggactttatcatcgttctcatcttcatgttcgtactcgaaatcagctttatcgtcaactccaagatcaacttcaacttcaactccaagatcaactccaacttcaactccaaggtcagtgtcgtcgtcgtcatcatcctcgtggccctcaggtgagttgtcgttcacacttgagaacacgtttgatagcttcttgtatgacgctaccgtacggttgaaacagacc

SEQ ID NO: 775 - DNA, 423 bp, Xanthophyllomyces dendrorhous
  misc_feature (344)..(353): n is a, c, g, or t
catcaatgctgctaaacgcgctgccgtccaacaacacgctttcggattgcagaatcagatgcgtcgttcgtcgtcgtgatctctgtgctctccgttctctccgcctagaaagggggatactgtcagggatcagaccgagtagtatatgcttgtatgtatctgcataccatctcaacaatacgtatttgctaccttctatattttccacacttcgatacctgcatgcatcccttccgttttgcatcccttctggcttgcatacatgccgagcgacaaagagatacaagtacttcgtcgctttccctttccccatagttctttccctcttttctcttttctctcannnnnnnnnntatgactttggcatcttcctaaatcctcgagagcctgagctttccacatacatcctcatctgaaaactct

SEQ ID NO: 776 - DNA, 1776 bp, Xanthophyllomyces dendrorhous
ttgtttaagcccgctctcctcgcagccgtcgggcaagctgcaggtccttcggctggatcgtcacccgtttcgcatggatggcagccaggttggtgtcctcgaagagagagacaaggtaagcctcggaggcctcctgaagagccatgacggccgacgactggaatcggagatcagtcttgaaatcctgggcgatctctcggacgagccgctggaagggcagctttcggattaggagctcggtcgacttctggtatcgtcggatctctcgaagagcgaccgttccgggtctgtagaggagcaccgcagaggcatgtcagtctgaggttactctgagcagaagagcagaagagcaaaagaccaacctgtatctgtggggcttcttgacacctccggcagcgggagcagtctttcgggcagccttggtagcgagctgctttcggggagcctttcctccggtcgactttcgggcggtttgcttagttcgggccattgtgttctaaggttaataggtataggttggttggatagtagtgtgtggctgagtgcttggtgagtgcttggtgaaggtagctaaggtgatgacggtgagtagtaagaaggaacaaagtcagcatacacccccacacatgcccactctttatgtctcagctcggtcgaatccagttctcgtcccgatcggctgctcactcagacagacgcgtcgtgaggatggcgagcgagcaggaaggaggcgggaagcgagacggacacggacacggacacggacgcggaatataatgatccatacggaatataaaataatggtgtcgaatataattgacgcgtcctcgtgtttagcgtgagacgcgagtcgaccaggtgactacacgatcactacgcgacgactgtagtctggctctagcttgattaggaaagcgactaggaaagtgactaggaggctagctaggagagcagcaccagcccgtcgacgcgtccggccgacgcgtccagacactcagacgcacgtcgcgaccatagagaccacgtctccccgagtcgcgtcggcctgggtgcctgtctcatccgtcgcgctcgcctcacgcgtcagtcgaccacgcggccggctgggcgcgtcagccggacgaccgaccggatggtcttaaagccagccaattcttcgtcccttttcccattctcttctcttcccctcatccaagccttcatactcagccaagcaaccagccagccaacacccacccaccccactcaccaacaacaaacagccatgtccggacgaggaaaaggaggaaaggtacgtgtcttcacctgtgtctctgtcgatcggctgtctctgtctgtctgtattctctgatcctgacatgtatcctccattcgcccgttcttctgatctgccttctcgatctgctctaccctcacccacagggactcggaaagggaggagccaagcgacaccgaaagatccttcgagacaacatccagggtatcaccaagcctgccatccgacgacttgcgcgacgaggtggagtcaagcgaatctccggtctcatctacgaggagacccgaggtgtcctcaagctgttcctcgagagtgagtctccttgtcgatcctgcatcgatcttctgtctctgtcgcttgatccatctactgatcgctggcttatcgcacgtgttcttttctccccagatgtcatccgagactctgtcacctacaccgagcactcgaagcgaaagaccgtgacggctctcgatgtcgtgtatgctctcaagcgacagggt

SEQ ID NO: 777 - DNA, 1264 bp, Xanthophyllomyces dendrorhous
acaggtgatcgggcatctagaggatggcctatcgcggtctcgtacggttctacactcttagcaagcccgagaggcaagacaggtgatcgggcgcctgagacggcgaagggggcgtagtcgtcgacgccgcttacgggttctaacccccaaggggggagatagagagccctggcgggtccaaggaccactagccgcaggcagcaggcggcactaggtgacggccagaggggtaacctctggctacctccgcctccgttccttcaaccaccgggaggtgatgaagaaacagacgaggaggtctagtgcaactagccgacgagcagtagcgggctacgatgagcgaacgtagggagcgaagagaaggcagcatagaatcaataaagactagcccggagggcctaacagaaaagaagacgatcgacatcgttgatcgagacaacataaagcctagctttatgcctaaaagcttctgcttaaagctaatagagctttaaaagaagcttagagagctctctctagcaaatcgcctacagagagatcctctctgtagatttccttttctgtcctacgcaaactagcggagaaacatggctccatgtttcagcaaattgctcttctcaaattgtaacaggaatcgaacctgtaccgaaggtactttaaaccttcatgctccataacaccaacaattttcatacttataaatctccgagagtccaagggacaggaggagacaaaggaagtggaagagagcaacgctcgatgacacattaataagcgccgcaggcataacgaaatgccgtaggccctacgcgaagcagaggaaggcgtagcctgataatgcttctatatgcggggtaacaccccacagaggttctctagcgagagaagctctcgtggaataggatattcctcgagacttccagagcgcttagagcctccccttctactcccgctacagagcatagctctattagtgggagtacaagatgcagctctagctgcccaaccataacactcaccagctcttggagtccctactgccctcttgtctctatacgcctagtgcgtataaattagtgagacacagaggtcggtagtgacccaagttcttcccctcacgggtaaaatgttcaacgctagttggcgtaaataacccctcgtggtctccaccactgaggcctctacgtcttttaggagacatggggcccacgcagtctttggctcgctgcgtgtcgctgtcccatgctattctcctgcacacatt

SEQ ID NO: 778 - DNA, 447 bp, Xanthophyllomyces dendrorhous
  misc_feature (372)..(381): n is a, c, g, or t
aagtcgacgatgtggtcaagtgagatcaaagaccaaggtcggtctggaacaggcagtgactgcagaagaccatacggccgatgccggcgaggcttcgatcgctggcagatatcactgttgagaatacttgaatatggtgcattggtttctgcttgtcatctatgtacctcagccttagctagcgcactctgccagctggcattcttctttttttcaagagattcacagtttgttcttttaagagtctccacagcaatctgtatgaaatgataccaaaacacaacactcagtatcacagattgcgtatctggtgaagactgagggaaaaggaatgagagatggagaaaagagggtttatatagacgagagaannnnnnnnnnaatctagaaagagagggactgagttggcccgagctggactgagttggcccgagtcagatggaccat

SEQ ID NO: 779 - DNA, 1623 bp, Xanthophyllomyces dendrorhous
acagccccttgacatatatttcatcacaaatcagtacctattgtaactagatgattcaacatatcattgatctttccgtcttatcgatacaatcactaacacccgatatatttctacaagcatacgaaacgcgaacttgatggattgtagtccttgcaatattgagtcaacaagttatgcatcgattgaagagatgatgtaagagaagttaccaagcagcaacatagaactactacaacgcccttcttgaacatcataatggatacattttccgaaggaaaaaaaaagactaatcgtatacgatgttttgcgagacgatcatgcgcctcccagtctccatcaaccgagcttgtaaccacaatgatccagtattggaaagactaaacaaacacattgcttctgtaatgtttatattaatccaagatgcctagagcggttatgatctataagagggaaagcatttcagccatcagctgaatcgttcagttgtacagtcgataaccacagtagatcagtttgctctttccatgtacattctacttattctatcgcgttcgtgacatagtccgtattttcatttctgggtcttttgaaaatcaaagttggtccggcttcttttctattttttctactcttctatggttctttcaatcacatcaagcaattaaatgctgcatcgatgttgatatatctgatgtaatagatttagtcgaggtaaacgtcaaggggactctgatgttgcaatatctgtttcaagtatatgagacgaatcatcaaccaacagattctcagaaagacgtcaaactattctcgtcgttgtgtattgagagatgagcttgagtctattccactactatacatgcctcaacaagatgagttacgccgacatcatgaagaacaacgaatcatgacaacaaataaatcaaccacattgaacctgcgtatgggttcattgtgaatccatagctttaaatatcattctgaagccttcatttcattcagcaaacaaagaatctctgagagtgacatgaacaattaattttaaaaaaaagaaaaagaagggatgaaagcgttgagcacggatgtatatcaacaaacatagagcagaacagaaatacaatgatgagaagacatatgaaaacaaagatgaaagaagagaaggcaaaatgacgctaagaaaaacagccacgatagaagatgatgtctgccaggatgccggctggcagaatgagccgagggtgaaagagagcaagtctaagaaacaagtctgacagaattggatcgagacaaaaatctctacgataatcctaacactctccctcgttgttgctgttgaaacgaagatgtaaagaaagaatgttgagaagagagaggaaagaacaaatgaaatgagggtatatcgagggaggtcaatataaggtaaatcgaacttcagaaagaaaaagaagaatctcacaaaataagataagtcgaagcgaagttgaataaaacaagtcgaatcgatacgatttgaaacgaaattaatcgaagcgagatgaaaaaaccgagcagatcagttgatcgaagaggaaagaggaagaacaaaaatgaagggtagaaaggccgaaaggttggaaagacaaa

SEQ ID NO: 780 - DNA, 543 bp, Xanthophyllomyces dendrorhous
cttctggatttgggtgttctaagaccacaaaccaccgagatcccatcggtcagaggatgcgcgatcgatacagagacgagcgcagaagtagaacttcaggctctcagattggaactggggtgaacagaggcacaagggaacagagttgatagatctcgatgatggattacactggtgtatggcgagtacacgaactgggaacaagagcagcacggaggaatgacaagtggatgaacaaagggtccaggcttcggaggctatgctatgggtggcaaaggaagcgtgtttcatatctggttcccagactacggaggtactgcatggaggtagtatgacaggcagatacacagacaaacgtatcgcacgaaaggatagaacgacagggttgcacgcaagcagagatcataggatgtggccctggcacattcggtgtacgtctacatagttagcagttgatgcatcacccaaggagtaggagctctggcattggatctatggtactcaggctacagacggctataactcagctcacatccttgacga

SEQ ID NO: 781 - DNA, 1208 bp, Xanthophyllomyces dendrorhous
  misc_feature (1071)..(1080): n is a, c, g, or t
gacgtgttgtgctgacgtgttgtggtgtctgttgtgatgtctgttgtggtgaacaggctagaagtaggcgtcgcacatagccatctggaggcggtctatggaccgacgtttgtgtacaggggtatgctcggccagcctaggctgtactctgctgatccgaaggtgttcaaccagtgcgctctctctgtgactgctgaggcggtggtccgactgctagtggctggttgctgactgtcgacttctggttgctgactgctgtccactgtttactgtccactgcctgctgtccactgtctgacgacggacgatggctggatgtggtgaacggaatagtctgatgagccaggcgtacgactatccgaagccttggcacatccgaaaggtcttgggctccatcgtcggtgatggactgctgagctctgagggtcagtccgtgctctcttgtgagactggcagcgctctcggctctgcctggtcgagcgctcggtggggaggagagaagctgatgctatccgctcttgctttgcgtgctttgtccccacaggcgagacccatcgacggcagcgccggatcatccttcctgcgttctctgcccaggcgatccgggagctctttccgatctttcttgacaaggcgatggagctgacggagaagatgacggaggaggcggcgaagaaggacgggccgacggacggatccgaggcggaaggagaaaaggctgggccgtcgaggctggtatctgaaggggtggatgtgatgttctggatcgtacgtatcgatctttgtctgatgttgcttctctgtctcgactgatgaactgatgaacggactgatgaacggatgggcctgtctgtagggccgcgcgatgctggatgtcatcggtctggccggtgagtgcacgcttgatgttccgctccatatgttctgccgctagagacgacgccggacaggacactgaccccgacgatggctgtctcacgatgtgctgccgatcccatgatgcaccgtctgtctagggttcgactacgactttgactcgatcgagaaagagtcgaacgagctttctatcgnnnnnnnnnncttacaagacgatgtttgacggcctgtctggacagtcgacactaggcgtccttcaggatctgtttcctgtgctaaactacatcgtacgttttgtcccatctcagaggcatctctgccgggctctgtct

SEQ ID NO: 782 - DNA, 29385 bp, Xanthophyllomyces dendrorhous
  misc_feature (1031)..(1080): n is a, c, g, or t
  misc_feature (1451)..(1460): n is a, c, g, or t
  misc_feature (1677)..(1686): n is a, c, g, or t
  misc_feature (2470)..(2479): n is a, c, g, or t
catcggttaagtcgccagcggaaggaggccgccctccaaacccggcccgcagcaaacgctggtgaacgacgaccggccgattacaccggtgacgccggctccgaaggctatacttcaactctgtctccggtatattacaatccggggtcgctgacagcggccgcggataccgttgtctgtctagcgtgtcttcccgaccaatcgtttaccatctaccgtcttccatctggcgggacgaatggcaaaacgattgactgtcgtcatcaggctctcagacgtatgcttcactgcagcgcccgtcatgttcggtgaatctccttttagacctgtagcattcgttgtctgaacgagcgaagggcgacatatatagcaagtgagtctccttaggatacgcctgaaagcttcttgttcctcacaactcctctctctctctctctgtctattcccggttgtccattctctttcaatctacgctttcctttcctgttcccaaaagatgcgacgtgcattgagtccccttctcttgggctctgtcggccttgctgcctctctctccgagatctgcacgacgtcgaacgtccaggctgcccttccagccgatggcttcatcgagggtgtcaccttcaatgcgtcctctgttactgcagctctcgtctacaacgagacctacaccggcgagaacaactttccggatgccacgatctcctactgcaacgttacctttgcctacagccatgccggtctgggtgacaacgtccaggttcagtactggctgccgtccaacttctcgaaccgatttttgaccaccggtggaggcggatatgccatcaactctgtcagcaccagtctcccggaggccgtgttctacggcgctgtcggcggtgcgaccgacggtggctttggcgggttcgacagcgagtttgacgctgtcttccctctccggaacggaacggccaacttccctgcgctctattcgtttgtgagtggagagcgctcagagcagtgtcggatcgtgtcagacagaagagctnnnnnnnnnnnnnnnnnnnnnnnnnnnnnnnnnnnnnnnnnnnnnnnnnnctttggcgggttcgacagcgagtttgacgctgtcttccctctccggaacggaacggccaacttccctgcgctctattcgtttgtgagtggagagcgctcagagcagtgtcggatcgtgtcagacagaagagctgatggccattgctttgacctttttctttttcctttttttcttttttttctttttttacgatcttgtttgacctcttcttttaccctttcactggcctttccttcgatcttacctgccacaggcctatgagtccatccacgagatgagtgtgtttggcctcgagttcaccaagcagatctatgagatcgggaacgacaccaaggtctacacttactatcacgcctgctccgagggcggnnnnnnnnnntttctttttcctttttttcttttttttctttttttacgatcttgtttgacctcttcttttaccctttcactggcctttccttcgatcttacctgccacaggcctatgagtccatccacgagatgagtgtgtttggcctcgagttcaccaagcagatctatgagatcgggaacgacaccaaggtctacacttactatcacgcctgctccgagggcggnnnnnnnnnnccagcggtacggcggccagtttgatggtgccgtcgttggcgctcccgccttccggttctccttccagcagttgaaccactttggagcgaactttgttcagcagacgcttgactactaccctccttcgtgcgagcttgacaagatcatcagcgagaccatcgctgcttgtgaccctctggacgggttcaccgacggtgtcgtcagccgatcggacctctgcaagctggacttcaacatgacatccctcatcggcaccgcttactcgtgcgaggagagcagcgcatcgtctgtccctctgagaaagaggcagatggtcacctcatcggccacgcctgcccagaacggatcgatcaccgcccagggtgtcgccgtcgtgcagaccatcatcgacggccttcatgacaccgatgggaacgccttctacttttcctatcagcccggcgcggacatctcgtttgatgctgcgaccgcctataactcgaccagcggcgagtgggggatctctgtttccggcgtcggtgccgagttctaccagcggttcctcaagctcgttgactctagcagtctggactcgatcgagggctacacgtacgacaccctgaaagcatggatgatcgagggttggtacaggtaccaggactcggttcacaccacgaaccctgacttgacagagttccaacaggccggcggcaagatcatccactaccatggcgaacaggacaactcgatcccgaccgcatcctccatccgatactgggactctgtccgacaggtcatgtatccnnnnnnnnnncggtatgtcgttcaacgagtcgaccgctgccctcgccgagtggtaccagctgtaccttgtcccgggcgctgctcactgcgccccaaacacggccgagccgaacggtccgtggtgccagactgccctgggagtgatgatcgactgggtcgagagcgggatcgagccggtcactctgaacgcgacctacctggcgggcgactacatcggtcagaacgctcagatctgccaatggccgttgcgaccgatgtggtcgaacaacggaacgagcatggagtgcgagtatgaccagaggagcttggacacctggttctacgactttaccgacagcttgaagcttcctttgtactagacaatgacgtttgctagcttttgtattgaaaaagaaagaaggatcatgatataatataataacttcaatctgtccactcgcttgccaggatctggaccatatccaactaattgctctatgtgcatgtttgtgtgtctagtcagaaaggaacgacacgaccatagagtcatctgacagagaagctgtcccaagtcttaaaacgaagattaaaattcagacagcgtagtgtatgaaggactacagaaaatgattcatattagctgctaaccctaacgctcagcttcggaccaacattggtgcgagcggtacaattcgtttgaatcgttccaacgtccaatccatcattacagaacgataagctcttcaagtcaatcgcagtgaaccgaacatagcaaaagtctttctctcatgccaaaggtatctaggtctcctagtcctgtcgcttccattcggccggtggacgcaactagaaggcaaatgacggcgtcgtacgtgccaagctacatatttagttagattatacgatcattctcgacattagttacaattaccaaatcttttatccgagtagatgtggatcatgcagagaacgaaagatcaagtgtatgttgttaccataattgaccattcctcaagctagtccatgaatagtttatcgaggttgtgcttctccgtcgttatttcgttcaggtgatggacaaaaacctgtaaagatctcaatcctttttgatcccaagcatacggctttcacctgactcacagctgcatcaatcccttgttctctagacgtgtgacggatgtttaaagaacggtacgctctcatgtcatttccaaactgaccttatctaaagtttaacgattcgtttataatttgagagcaaatcttagaaagactgtgtgtatgtatataacttgtgtttgtgttgacttgctttgaataaaccctgaacatacatcaatcttgtgttgcatttatctccgtataggaatatcgccccaaaatgaaacctgggttaaaagttggaaccgggtgggtttatgctgtggtctttcacctcgatccgaataaaaaatagtaattgaacgattgttgttcctgtgttctagacaagttgaaaagcgattacgttcgtcctacatcttctagtctctgtggctctcagttccaatgctaactttcagaagaatcaatcagtggatatcgaaagcttgttgactgaacattctcagacaatcaaattgttacaagaacgctacgaccagcaacgtatcacctcaagtttcaatcaactcaatggcccgcccgatgtcagacattctatcctttcttctcaaacaatcacgacaatgccggttcctgtctcgtactcaaattcccggataacgtacaacgctgaacatctgtctcacaaccctccaatgcctcagtcgatctcacaccttgatagcccaggaccatcagatcagtatgcgcgaaatcccttgtgggacttagcaaacgcagtgacacccgtatgtacgaacgacgaacaagttcagtatcatggccatgagatagatctcagccacgagaaagtggtgaaaaggaggagaagtcgagggatagagccggtatctgagcgaaggtcagtattttcattgctttataacaaaagatactacgacgatatctttcaaaccctgacaggatcatctcttcctttttctgttatgttctgccatgtctcactgtttgaatctgaaggcagtatacccttgactctgattctcatcagagtgcgccttataagtgaagtcttctggcatagctttccttctgtcaacacatgcatcgactaactgtagatatttgtcatgatacagaagccttttctcatcacttgagggagaatcgattcctgagagcgatcatgtaaaaacccctagtatagtctcgtccagttccatgtgagccaagtttcctagataggctatatactttgagttcatcgtatatcaactaacaagtcccgaattttgactttgtatagacccatgaacagcttcaaatatggagaggccccagatcttccgcccggtgatgttgttgaagaactgtaaggggcttttcgttcgtctataattgcctttgagctcaactcaatgtacacttcttgccttcattcagtgttgtcctttttttcaagcacatccatccatgggcacccatcattctcgattccgatttgacaccaaccatccagaaaacatacacgtcatcatatgcacattctaatcttcaaacaccacaacctccttcaacgcttcactcttcacaaagccgaccatctattctgacgtatgccattatctgtataactctgcgattttccaatcatcgacattttgccgcctctggtgtttgttccaggaatcattatcacgaaaaagctcaacaaaaagttgttatggcagcgatggatcgcctaaatctgatcacgttacaagcattggccatagtcggactagactggtgtgagcttggaggagggccaaaaagatggggaggaattctcagccttgttactggcggattaaaacaagcaggcttaggagatgaagacgggcttgtcaaagagctagagaagggattcggtgtcgagggaggcaaaaccagaaggatatatcatcctacagataaaccatctcttctccagtatgtgatctacacaaatattggctggtgccaatcgttcggtaagatttcctatttgctcattcttttcatgatctttctctcttgatacctgctaccagatccacagatagttggagagagatagaagagcgccggcgcctcttctggttagtcttctgtttagaccgatatgcgtcggtttcgacaggttgggatttcgctttcccagaagaagacattaaacgtagacttcctggcaaggatgacgcctggatctctggacctgtaagcctctttaacttatgcgatcacatctagaccaccctttgaaagagagatctttatatttcgtttcttgtgacttcgtgctattcagaaccaagagctcccacccctaatttctcaaccgctgccgccaccatctttggcatcacctatatgtacatatgcctacttggtatcgattacttatcaattagggaaaatacactccttcattcgaactcctctggacctgttcgaacccgtggagacgtctttgtggtacgaccgattccgtcaatttgaggacgatctcaaaaattggtggaaatgtctaccggacgatgtgaagattgtgggatccggacgatggcagggtgaagatcatgacgctgcattgaaagctttgatactgactgtgtatcacgcgtgagtttctactaatataccattggtatcgagtgaaagtccgataaaaaaatttgagattgagagctcagtagttcatcactgtcctcttttcagcaccgttataaggctgcaatctgcttcggcgtatcccccggtatcatcacccacctttttgccctccgaagcggccgcatccaaatgcattctggcagcaaagtcttcagctcaagtagcagtgcttgttggtaggcatgccgctgtcggaggatcgacatttgtaggagaaatcgatgtaaagaacatacatcctctatttggctggaccctttgggtcgcagctagagcactagttggtaagacagatcctgatcattggcgctcatgtatatagatcttacggctcaaattcctgtatattaccataactggcttgatagcacattcttacatcaaacgtgttgggcttcttcctgagacggctatctttgttgagaccctccaaggcttgagtgtgtactggagtactgctagtatgtatactgactgctcttccatatatcctatgagtttgaatattgttaatctgtgtttgttgtcttttatattgtccaaacacagaacgatacgcaaagattctgtccgctgctgtattcgaagccaaccaacttcagccgtcgtctatattcagcgcggtcatcggttcgccactgtctagctgtggtcttggtgggggaacctatggagatagctcctcgacaggtcgagcaggtaatagtgagatgacaatgaatattctggctgatatgcgaaggacggcctggaatgctgctgctgcccttcgagatgaggagagggaagggaacttgaaaggggcaggtcttggtctggatgatggtggagaagatgagggcaacagtactagtgaatggagggagaatatcgaagatggaatcaaccagagcatgaggtcgggagtctcagctagacttgtaggtgtagctagccctggaaccacgttccgctcttcgaaccttcggggatcattggcatctggggaaggcatgaatgtgttgccccatctttggacagaaaccagttcaaataagctacctccgcttgagaacttaacgggctccggaagatcgcctatgatgtcctccattcgtagtggagccgcttctgatgggctctctcattcgggcttcgatttttctggcgattggatcggagacagtgagcacttatttattgagcttgatattgttgaataagcaaggtaaccacgatccttatttaaactgtgtgaagtgttctcattcttcgatgttcctgctatgagcctgcctccgagtcctgctcctttcacctaactcaaataatggtggctgtcagagtcagacaaactatacagacagtacaacgacttcataggtcataggttcagtttgccttcatcgatggcacagcgtatcaggccgggagctgggctggcatcggaagggttacgaccgatacaaccacacaagggggcctagatgttcatgtaagatgtccacgctcttgaacggaaggacgaggttgatagggacgccaggtaacaaggataggataacaaggagggacgggagaataaggaaggacaggaaggacagaagcagaaagcaacaaagaacccaaacttgaggtctctatctacaagggaccaacaacgcctgtcttatgaatggttctcaaactctaagaagattgtgtagaatgcactggagtatggcgcgccggaagcagaccagaaggaggagtaatgaaggcggagagtataccagccgaaggttacgaactcgtgtagctcaagccacatccctgacaccgaggtacagatgggcaccgttgaggtcagctgcacgcgctcgatcaagcgtgtaatctctatctcttcgtctctttgtctgatccaaggggtttgcttgtaaagaaggaagcaacgacctcgacagcttataagacacaaacaagtcgcgctgatgaggatgatttccggcgttcaacacacatcagttgcctcgtagattttcgttcccctgtgtttgaattgaaatgcaagagtacggctcaaattctggcaagatctttcgccgcctttgcaactaaagctcccagatttccagcctgccatcaggctggccattcattgaaatcaaaccacctgtgcccattttataagcctaacggcgacgcttgcctggtcgtttggcaaagatgccatcggagtgtctgctggagcgccgagaccgacgtcggctctcactgatattatcgactatgattggagatggcagggcgaaggtgatggtcgacaccgagttgggtatgttccgtgggatgtgcggccaaataacaaggtcgtgggtctgacccgggttgtcgagtgccgctgttcacgactgcaagagggctggccatgtctctgaacaatggcagtctggctgatcatggcacgcagtggtcgctctctctcaagtcgtagaggcgccttgcggggatggatcgagaccctcggagacagcggctgtggatgaaaaaccatccggaaatgtcaacagctctccgtggtgggtacttctcaaactcacgctgactgtacagactgccttgctcacctcggtttctttggatctctatccatccaaaactgccagtctcatcggtctcagcgctactctcgccttgtatcctcggccctactcatggctcgtgacgtcgttcgctgcccgacgccggaaacatcatagcttgggtgcgcatatcagccgcgagcaagcggaccacaagctggcacttcgtctgtcgtaagaacatccccgtaccattgtggacttcgggaacggcgccttctcgtcgacttcccacgagcatactcctggccctgcggagatgctgttcgccacgctgggggtcttcccgctgctcaaggtttgtcaagtccgggagctccagacgtcgagggtgtgctccgagtgccatggccggtttttggggaggagcaaaacgcgggtgtcaaaagagtgtcgaagcgtctgtcgagtaagtcagatatgttggatgtctgttaaatgtttcaggatagtgtcgcgagtattcatcgctttctatgtcttctctgctctctatgcttgctctcagactgggtggaaccgagatgctaatgcgtcgcgcaacatattcctcttgaccctacatcaggaagagagcgagaaagctaacatgttggagtttgatatggctgccgtcgctagggctgaggttgccccgttgacgggggcagactagacccaagacctatgggatctttgtggtttgtggtttgtggtctgagggcaccccagcccaaaagggccatgtatcgaccaccatcggttgaggaaacactcactatgcctaagggtatggtttttcaaaatatatatacacatgtatataacagtgatttgtaaagatagaagatcttgaatgcaccctcgcaaagctgtcgcagacgagccacgtacccccctccgactcagacagacacatttgttcagcggaattgattaatacttgttttcacgacctctgaagagtcccagaatgatgtgaatcgataatttagctaagcagttctcttttcttgtacactaaccccccaaggaacgacaatccctcctccgctgttggctgcgccttctccaaccgaaatcccatcaaaaataaggaaattcaagataggagtccctgatcgagagatggctcgaaggatgtcttgcgccaaaatacctcccagtacggcagatgtaggattgaactcgtgagtggcgtgcgtagcaagatggctaagtggaggcaatggccaaacatgacgtcaagagaaatcagtctgagagtataacacgaagggaaaataaaagaacggacttgataagagtttgattgattgtggggaacgcagccacattgatgaaggatttctgtcgaaatttttctgcaaaggcttgaagttcgatcttgacaccttctagatcgctggacggaagaggtaaagcgccatgttgttgttcgtaatcccacagagctaaggacgatccgtcgagagcatatatcgcagaaagcgaacatgtaaacttgtggtcgatcaaaatgctgtagagatgatcaaagaagagctaaaagacgaaccgaatagtgcacaaaagaatccagggttcaaagccagagtcggcctcttgtttttccctttaaacggactatgatccgggatccataattctcgaaaagcgacacagctcgcttgtttcggaaccatcttggaagactcattggctttgacgacttcagtggacctaaggatttgcaacaggattcataaaaggatattttcaatacccataccagctgatcggcagaatgtgggacaacagagacgggttaaatgatacgaactgagctgcaaattcatactgagcccccaaatctgaaaagatatatccggtaagcccgtacgttgcggcactgtagaacaaagtcttcgtttgtctgcatgcatcgttgatgtttgtctataggaataaggatatcttatgtcagtgaaacagacatatctgaacgattgtgtacttcgagtaagaaaatgaagagtatatccatgacgtacaacatcctgagttgatgcttctacgatgcatacaatgtcaacgttctcctcctttatatatgcctgtatcttctgatattgatcttctggcgctgagtcgtgatagatgaaaggcgtggttgctgtcaaggcagtcacggtcaccaatgggttgagcgactgaatttgaggaagagcagctgtgactctctacataggaaaaaagagaaaggatacagacgtcgatcaactatgagactttgtgaggctgctcgtgttgaatattggtgcggatgatgagagagccattaccttctgaccaacaaccccgtctctttctcgaaataagaagcctgctcccaaatcccgttcagtgacttcttgagagtccataatctgtactcattccgaagaaatcgccagattaagcatcgtcggtgagccaattgcgatgtgttttcagattctctgaatattggtatcatgtaaggctcacaatcagtcttccgatacctgctaggacaatatttttgatggtttctgctgccaaagattggaggccgatgatcaaaactgtagagtttctcattctaagaaaagtattgatcaaaagagaggaaagagacaccagttagaaggtcgaatcatgggggacgacagctctagtaagacttgcatacctttgctgagcctccagtccccatagccggatctgacgatcatacacggcagcctcggctgcagaagtgagaagatgatgccggatgttaaacagaatgatactttatagtattcaaagaactagacgcatatgaatacagtatgcagagagttgtgaacaatgacacatacattcggtaatatcggtctggcttctctctacagcggaagatgtcatcgttttctcggaacgaagcagaataagatagtgtgtagcgagatgggtctacgagaacaggaggacagaatcgtatatgaccggagcgaaagcttagccgacaaaacggtataagaactcaccgctgttcacaaattaagtttttataccggaaaacacgccgggattttgacgcgttagactctcagccctgctccttccgaccccctccactgtgtttctcaaattgttttgtccatcctttttcggctttctccttacctgcttgttcctcttcgttcttctctatcttactctttgggatagatttgagaacggactataccgatgctacctccccctgtccctccttcactatttttaccccatatagggcgtgacctatcggcatattcaccagtggtcctcctcggtcatactgagcatctgaggagcatcttccttcctcgtgagttactctgagtcggaatacatatcggtccttttcctcatcatgtttttatagatatttgtgttgaatcgtacatttgttcaaatttctacagctgttctcggctctggcaaggaagagccagctgtaccacctgactctggatactcttcagactccgaagttccttcgagcgcatacgaggaagacttggatgacgccctgttgaacgacgagttcgagcagaattacgctagaggttggcttacaagaattgtcaagggtggagaggtctggatcgaagaatctgaggatgatgctcaggctgaaagagaggcaaaagagagggtggtcgatgccgctgcttgtaagtctggctgtctctgcttgtgtcttcttttaaagacgacgacgattgatcttgactcggtttatccttcgttcatctttctcgtgtcaactatagctttgctagcaatatggtcaggcacaactggttcgctctctttcccttgtctttcaataggtttttctacgaggatttttctaatttgccacgacgaataatatcagccgccggagctatattgcgaactgtcgatcttcccaggaatctagcattgactatcaacgatgccccttacagctctcaggctcgtaagtttgatttataatattttgctttaacaacaatacttttgggcgcaaagactgatacaaactgaccttatacaaacgttttgctgctttcacagctgattctgtagggtaagtggatatgaattctgacgtccacaaagtgtatgaacgatagttgaataccatttaaaaagctaacactagtcccttcctgtggttatagcgttcagacttggggttcctccattctttttgcccgccgtctggccaaatcaccttccactttcgacattcttccttcttcatcctcttctccacagcgaattttagaacttggcgcagggacgggtgttctttctctcacccttggctccttgcctggagaatccattcacagagatagcctgattgttgctactgactttcatcccctcgtcttagaaaatctcaaaaagaatatggatctcaactttgaccaaatgtcagacaaggatggtagcgaattgaaccaagatacatggataggaaatgctggagcgcaggttctagttaggccgttggattggttgttctttcatcaagacgttgagacttccatcactgtggggagggacggaactagaaacaaagaggacgtaggcgacttgtcctcgcttatcggaagcggtcttgacgccccattccaccaaaggtttgatgttatatttggaggtaagttagcaagacagatcattgtggctcgtattccttccgctctctaagccactttgcttgaccaacgcgcttcctctttccatcaaagccgacatcatctacgaatcgcatcatagtccatggatcaaatccacggtccttcactttcttgcgtttcctaagaacttgagtggtgccgcagcgtccgatccgtctttccacatgttcatgccacttcgccccactcactctgtagagcttcgttcagtggaatcgacgtttccgttggcatcttccttgccgtcgaggaacggtcgatcgagtgaagagttggcttggagattagcagttactgagttggaggatgtacttacgcgagaaagaggagtcggtagagcggacgagagaggttatcgaagatacaggatcggatgggtttgattttaagcaaggcattagagaggtgctgatcaatcggctggttgattcatagtaacatcatatgcttaattcacgaacggaattgttgcgtatcttttagaatactagaatatatatgtgttttaactatttttctcattaccatgcactcagtcgtgcgtcatactgtcataaagccaatagtatgtatgaccgcgcttctgtattcaattcttaaactccttttgaagtgtggtgctgcgtcttaaagatgatcaacatttgccattcggaaagtatggtagcaacacacgaacatacaagtgcaaatcagagcatgacagggcagagtcaagcgattcttttgctatccaccgtggtttacggtcaaagcctccttcaaatctttctgagccagatccttcgcctcttgcttaacgtcgtcaggaactcctttcagtgtcgacccaagatctagttcttcatcttcactctctccatacccttcctcgccatcctctcttgtggctttggcgcccttcttagcgccgctcttctgagatttatttgacacactcgacagatttacaagagggcaagggccaagagaaggtcgagtggtatgacccgcagcgcatctcgagcaggatttaccgtgcctaatcacaaattgtaaatttggttaggacctagacatgcagcttcgagcctttgctgattgcagctttgatttcgtggaggatgacttacgcaattaaaaggacatggagtgcatacttcagctcaccagggattcgaacatccaaatgttcgtatgtagtttccctgttggctttagcgggaacccagccaagctgtttggacagtcgaaagacgtgtgtctaagatggcaagtcatatgtaagtacgggatggcaaatttgataagaactgaatttacacgcacatcaactgcaaagctatcacgattgaggcagaatagaagtacgcatgacgcggctgtagtagaacacagaatcaaggtaaatcaatcagaaaatgtattcattggtaagagccgcaaagaattagactgtatgtacttttaggaccaacacctttgaagctctccagttccttcatcgcgtgttcgtcatccatctggtggacataatccaaagagaggagctttgccgcgtcttcttgagagttctcttcgccctcgagttttatatcatctcgaggtaaattagctttgttatcctcagtatcctccgggagaggagtgagcggcgggctagcaagttcttccttggtaggcttcgtttcttccttcggagagtccggactactggatgtatattctggcttgacgttaactgtggcatttgtctctgtaaggatcgaagaggatatatgctccgaagaggacgatagcggagaatgtttgagatttcgatcccatacctgctgcaaaacctgcttgatgactttgcttttgacattggccaagcctccactcctaggtttagaaatatgcttgtgtgagaagatagcggggtggaaatgtaaatgatctgaatgaacataggactaacttgatgctctccatgacttcctgctgagaggcttggtggaccttgaccagatcgacagcttttttttgcgaagctgaaggtccaaaggtggcaagaagagacgcgtatgcacgggaggagttggaattacttgtattttgagaaagaattgtccgaatcctagaatgtatgagagacgacgataacgtataagtagatcatcggtttgataagagtttgtccagaatcagaagaaagtatacttgagacctacaaggcatccattaccgaaggaaccgctccacagttcacacctgctccgctgatgtctttattcacacttccgggcctaattggaatgccatggatgcttcccagtttctcaaccactagtttacagtcctcgggagtaggtcttgcgtaatcaggatatggggtttgaagataagcggcaaactttggcttaggcggtgtgtttcccttttcgatagtattcttgtcggaagttgcgggtgaaggtttcttcgtactcgataaagttgggcccgatcgtgacttcttgataactggcgtggtttttgcctgcggtttctctggagtctttctctttagtggtgatggttgcaaaggaatttctgactcaacctgatcctcctctttctttacactcttattcagggaagggttgggcgaagtagttgcggaggcagcggaagcggcggatgacctagtggaccgtcgagatggagcgggagtggacatcttgttcctaaaaatgagatcagattgagcaatgggataatatctgatagactggaggattgagcaaggtaaggaaagcttcatggatgtacaaagtaagaagaggggtacccggacgagctcaagggatcgagattttaagcctagatttgcgtcattgttcattttcccgatcgccgtgatagagataagataagatgtagcaaactcttgaattcattgataggtttggttaggcttgaccatctgagatattccttcttgatctatgttcagaagagtttcttatcgcgagttttgaatagggtttcgacactttcagttctatctgactcttgatgatgacgagagaaggagaggatttattgggctaactatcaaagaaattaacatgaacaacactcatgttaaaaatacagttcgctcacaagatctttgatgtcgaccatattagatacgtggaggagaacgacaccagatcaacgagaatcgttccagatatcaagcaacgtatattaacagccagaaattctctcataatatacatcgaggcacaacagggagtacgatcatagatgaaatcaagaagactagttctcggggtagtacatatagctagccacaggtaatgacagagaacaatagaacatttatttgctctcagaaagacttttctcaacaaaattagctttcttgattccctcgttagcttcgattgcatcaagtttatctttagggcaaggcaagagaggtaatctagtattccctccatatccccgtcggagttgaagagtggccttggtagcagctgcaaggatggaaacaaacattcaattgctgctcgacaaattggatatcacaagaagagaagcacagaccaatcccggcgggcccatagatagcatctgcagtcgataccaccgtctgcaactccagagcttgttcgagaatcgacagccacttctcatccgacttcgaaagcgatagtagagattcggagagtttgaatagtttgacaatggcgcggggataaagatttccaagtcccatgatggcaccttgtgcttgtgctccaagaacggttggcagaatgaaatctgcgaaccctccaagagtcaaaaacctgcaacaacagtagaattgaagacgatcgatcagacttggaactatgtggttacgaagtataccatgaaaatgcttactctccgttcttggtcttaaaggccatgttactaacaccaccggtgatcctagatgtgagccaaaccatatgtatgagtatcttcaagttataacatagttgttattcgtcaaccattgtcgttccaacataccgtgtgagctttccaacggctccacaagtcagcttgacgccacagatgttcgaagatctgttggcgatctctaagatagtatctgaatctaaatcgattcctccagaggcaccaggatagttatagatcataactgggatgggtgatgcatcagcgacatcaacgaagaattttatcaaggcttctttattgagagctccagcatagtatcctgtaagatggttcatagctcataaaatgatcagtcacgagacaaacttgatataggaagcgcgctcatattcataccggaggcgataactatagcgcaatcctggaagagctcaaaggtattggctatcagtaaacaagttaaacgtaaacctcaagaagcgtcgtcagagactttctactgacagcaccagcttctgcacattctctcgagagctcgatcgtgcctcttgtagatccaactccggtacccgcgatgatgggtacgtcaactagttcagcatcatccaatgccttcctggccgcaataatgagggtctttctctcggagggggtcaggtggtgagcctctcccatggacctgttgttaacatcatagcttaatgattaacgccttggttttcacgatcacgtttcttcaacgatagaaggagaaaatcgtacccagcgacgacaggatacattcctagcttggcgagatatactatgtgtcttgaaaatgtatcgacatctaattcaacacgattgcacaaatccagttttttctgcaatgagagatcatgttcgagaccgaatacctgattcaacatggttgcgcttaccgagctcctcgttagcatcaaagaaagtagggattggggcatagcaaccggagctgagagttctgaccatcttgattgcgtaaatgtattatagagtaaaggtatacctaattttgggccaaaaacgaatatgttgaagaatctggtgagtaaggttcaagatgtttacgattggtgctgaaggatagatgaggataattttgactgtatggcataccagactgtgtggagatcagacgaaagagatgatcgatgaagaaaagtgcctaaaggaagaaacatgttgaatcctgcttgtccttttataagctctgaacgtctggttagcaatgttcaatccatccggcgatgcctcgtgaatgtatattcaaaccggaggttaaccggaggttaaccggaccggtggaacgagactagccgtagagccgggtattgaggaaaactgttaaagctgtgcaggcttttttactctcacatccgacttgatctttttcgatgagtctgaaattatatgtttgttcatattcgttatactttagaccagtaggctgatctatagacgaatcgagcagacgatctgaactttagtcatgtccaacagttggacatgacccggagttgatctgcttggtcaatacagacaaacgcgcctctcaagactaatgcgccatagaatggcaacaaatatatgtggtctcatcagaagaaaatatattagtgtaacaacatcaagtaacaaatgtgcttagacaaacaaacggaatcggatatgattgaatgtcatggttatatctcttgtataagagtctttatgatgggcaagatgtaaaatgagcctggatagtcgagagtataataaaacaccaaacacgtatttatttttctattttgggctctctttctagttattaagtctcgttttatcaccgcacttcatgcacgtgtagaatctgacgtcgaacaatttgtgcgctgtcttttagcaagagaaacaatcaaacaagtcaagaccagaaatgtagaacttgcactaacgttgtggaaccttcatccgcactacggagctgtaggtcttgataagacaaaccgatatgtccgcactttagacacttttcttcgacctggtattcacgtgtacaaataataagagttttccggtgtcagaagatcatttcattctagattaggccaggagacaccagtgattgtatgatctgataaacttggaaatgaagatgatgataatgataaatgaagagaaattgcataccactggtaaagatgtctcttgctctgcatcctcagctttcaccactaacgccctctttgctttcaaagcggaagggaaagcggctggattcgagtgggtcttgacattcaagttctcgtatgctgtgcatacaatgaaagtgacgacgatgcagttcagtcaaccaatagccaaaagaaagatcgataccaaccggacatatcccgtttccctcgtatatcttttgggtcctgaatatgaaaactttccaacattaaaagattcaaccgactcacattctgcgggctcttgatgtccacactgctcgcatgtaatggtatccaaatccccaggaaggtcgagcagagtcgagcatatcgggcaaaagagcagggaaccgattaacttggcctttggcttgatagcaggagccatggtctgaagatgttgtatgaatgctgacagcgatttctttcggtacgagtatgtatgtatatgatataatgagctcgtccgggtcttcctatagagccaagggaagaggacgatagacgaaatgaagaatcaagttgaatccgaaggaagagagcaagtcatggctggcgaaccgataatttctgaggcgatagaactggaatgattacctaatatgaacctctaacaatgcatatatagcttttgccgaatctggccgatgacatacgctactatcaacattctccttccctccgtgatatctctgctcactccgttgatctgttgagctccttgttaaccatcatcatctgcatcttctttatcaacatcttcatcatagactgaatggcatctgttaaaataggtaatgatttccttgactcttttcttttttataacggcaacatcaatactgaggacacctcctcgtgtcacttttagccagtctgtttataaagactgtgtctaaaccaatagctaataaactcaagcagcaggcagccgagcatgagaggtttaggcaggtttgtatctctctagcccaggtatgtgtctcttgtgttttccccttcatcttcaatcggatgacaggaagttcactccgacttgtcttgctttctcaacagttcatgcactcgaccgaggttaaattgcgcaccaatgtcatggggtttgtgctgtttcttcttcttcaaataagtctctggtatctggggtttgaccataattcctctttttgaaccttccagtgaatctcgggcttctattcgacccctcaacgatgctaagggtatgtcagaaactgatgtgaaatcgctcaaaacgtatgacttacctgatgttcgctcttgtacaccgtagctgtggccaacggcgcgaattcattagcagaaggtttcctttttctcgtcggtatctcactaatcgtaggagaggcatatcggtcatctcgaaatgcggggaaacgaagggatgatgtcgatgatcaactggaatccttgttggcaggattggaggaggtcaaggcaagaataagcaaagaggaagaggaagagggactcgcccggagagaggctgaagaaaagtacgtttgaattcatcgtttccctgggtgtggtatgatcttagacatgtatcgttttaatgtttgtcttgcccttcgtctttcgtcttcttcttactctttccctctgcgttctttacactgcgcagaattgaacatttgtccagcatcctctctcaggtgatatctatcggactcaagggaggttggctagaccagtcgactctacctccgacgaatgcatatccttcgctctcttccccctcttccccctctgcaccctcttccccctctgctccttcgaaccagtctactcttcaatcatcatcattatcatcctcccctttatcctctgacgttactctcagctcggacaaagagaacacgacgtccgctattctccctttcattcagctccagtccgtttttcaaaaaggtccgacacgccagccacgtgtgagctcgaagaggatagacgaggaagagttgaaggatgatctgtttgaagatacattcaccgaggatctcttcgagggaaaagctagcgggctcaaggaaacagagtagatctaccccgactcattcatctacatttttactcgcacattgactcgatgacgagatgtgtacttatcaatgcgtttaaaacagtcaatgaccgataagcatcagatattcacaattatatacaggttcccaagactgaaatgatctaagggagtaagcaggcgaaaagcgataaggaggggcagataagaaaggcaaaggggagggaggctgatgaatggtgaacatccgaagatggattaggttgtctctatatgtggggaagatttcgacagagtagcaaatatgaatcagaacgggcgcggttttattatgctgcagagagagaatcatacacgaacaagtccaaataagggagcgggatagggacaagagcaagcgatagagcggaaatgatacaggcaaggggtgtgtgtgtatgtgtgtgtgtgtatgtgtgtgtgtgtatgtgtatgggtatagatatggagtgagagtaggagaaaagataaagggagaagggccggagggaaatccctcacggtgatgatggtcacttgtttcccgtcagagtaacgaatgacaaagaaaggcgccctgatgcatggacaacccacggacgggaagaggcaaacgcgggaagggaattaaaataggaaaaaacacatggattttagatactgaaccctaacatgctcagcatcctcttcgactcttgatctagacctggcttccaccctttctcggccagcctgtttccttgaagttggttagggtgtccgtctgaatctcctgtggaggtcgagggtaacgatttagacgcggacggtagaggtaatgttcttccgtctgaaccggcaaaaagagaggaatccgtgctgcacctagagttgaagctgtcggtctcgtaggatgaaattgaaggcatcgacgaaggcatcgatgccggccgatgggccgattgaaggaaacctggttgccgaggcggaaggagattgggggaatgtgtggggtattgagcgtacgattgcggggtgtaatagggagacatgacggaagtggaagaggaagacatctgggattgaagaggaataggtaagaaaccgctggtcggctgaacgggcggccaatccaccggtaaaggtagagaagatggtcgagaatgtacaaaacgcgctggatcggaagacatggcttccaatggatacgatctactggacgaactgggactcgatcgttctgatgcggtccaacttcgacttctatcgcgtcgatgttttgaaccagactttggtggttggtgggtgaatgtggtcgaacgtggttgtcgaggaggatatggtcgagtaagaagctcatccgaagggaatgttggcccggtccgtggcggtagattcgtccactttgatacaccgtctgattcagggcggggttgtggaaaactgccatgggtgccattcggggaaggcgaacccgaagtgaggaaaggagattgtttagaggaggaagggatattcatgcttgttgggatagatgtcgtggatggctcagagggcacaacgggcatagcggacgaatgtgaagaagcgcttggatgtttccaacaggatagattcagcccgacataggccggatcaaatgagggtaccgtgagcttggcgatcgattttggacaatgataagagatcacgtctatcaaagaaagaccggtgcggttgcgacaagatgagtggaggattgaggagaaggtaaacgtagatttgagcagagaaaaatagatggattggcattcggaacttacgaaattttttgggagactgatctggcaattgaagattgacactaaactgatgtgacaggattgttcgcaacggttagaaatagactctagtaggattcgatatataaacaatggacatactgtttgtttgatcaggccattgtctgagtaagtacagggagtggttagaaattaaccgagaacacgttggttcagtattcttcctggttctgaccaaggcattctttcttcgcttaccgattttacgactgctgacaacaaaagaactcaacaggatgattagcacaaaagagggagaggagaagggacgtgacagaatatatcagtaccacatttctcctaggctttgcttctgaccggtgaccaggagatacttacggggcttgagagctcgatccttctgtgaacgtatagagctcttcatacaccaagaagtcaccggcaactttggaacatgaccatttttttccatccgtccagcgctgcatctgtgtttcctctatcgcgcgttaaggaccggattggacgaaacgaggaaagttgaagatgagaaggagaaggagaagaagaaggagaagaaaaagagatcaggcgaaaacctcaagaagaggcgagaccctcgagctgattcaaaacctactctcttcccatatgaaaacagccccatcccggatatatctttcacgatctgctttactgagccgtcggacagttcggggaaggagcccttgacggacagactcgagaagaatcagtctaagaagggggtcaaaaggctcgtcaatctcatttgcttgctataaggatatgggcctgactgaagagagtgctcaagggggaagacccccaagggcaaggttgaaaagagtctcacgcgtcgtcagatgtctcgagcaggaccgaggtggctgtaggtagagagaccggttggtcggccattgatggtgaaagattgtgtgttgagtgttttactgggatggtctaatcagaaggatatgtggatgcgaccggggtaaggacgatgagcgaggaaatatgggtggatgagttggacctgtcgggttaggaagcccgatggtgtggttgtcgaaaagactaaccacactggcaagaaaacgacagaaaggtggggcaaggggtaatgaattggcaagtattgaatggttatcgtgattaccaacccgatggaactgcgaccgaaccctcggagcaaacgacaagagcagaatagcgggaaagagatggaaagctggtaaagaccgggtccggaagaaagcaacgaaggaacaaagtgacgctagaaggatataggttgacaacgactgaagagtaagacggatgaggagaagaaggagaagaaagagaagagaatgtgaggtgtgtcggtatagggatgtgtgtgtgtgtgtgtgcgctcgaaggccgatgggttcgataaaccgtgctggccctctattctggctctccatccgcgcccatcgattgtagccgacgggccggatgactcaggaggggcaagcaagcgaagagacccgatgggaaaggcggggagaaggcagggacaaaacgcgcagaagaagaaattttgcttgtggagacgctcaaaaggaaaggcaaattgacgatcgactgaaaaggaagacggcaaagcttgcaaaaaggcagaagatcagaagataaataaacgcggcaatgatttctctctctcctttagagcggcttgtttggattgttttatctcattttgtattttcgttcagtagaaatgtctttattcttttgaagcttttctcttcttctctttttctcttctttttacaattcatcctcttgttcttcttcctgtgctcttgataagatgtttacattgcggtatacaatcgttctatttgatatataaagaagcattaagccacttcgaacgatgaccagaagaaagtgtccaagacatcaaagcgtaagtcggaaggaagaagaaggccaaaacaacaccatcggctacggatcaaccagaaatgagcgcgtgtttgagtaaaataggaaggaaattacaagatccgacttagcagagggtacggattaggtcgtacatagggctgttcactatacgacaagggaaagggaaaggaaaaggaaaaggctgacagggccaagggtacacatgtgaatgtggctggaattaatgaaacacttttcaggctgttcccctccctttccaatggaatttcggcttgtgttgttaattaatcggtgaccatttggccgatcgagcggatcggccgtaacgagcccgctcgggaaaaccatcaaaggggctcggcacggaaactcaaagggaaaaaaaacgtgcgcggcctggatcggatccctccagatcggccgagaggagtaagttaagtttccgaatccggttctttctgacatttgtcatttgcatccgaaatcttttgtcttcttaaccacactcaacatcattctatcactcgcccatgatctcctttgttcacggattttgactggtccaatcaacaaatcgggagtgaactctgccttccgaacattgaatcatgacatatcccctcgtcagtcccgctttgtcttcgaccagccgagctcggtctctagctttcttcgcgcaaagttcccatccgtgcagctcagccagattctttcgtttacaaaggtccgccagagaaaccataatcagtcgagtcattcatcggttcacaagatatctcataagcgtaccttttaagataagtatccaatggccaaaacatacccacccgtcgttgataggctctcttgtatgcagggtactttggcgaagtgatgtactcggtgaaaagtctacgggaaccaagaaagataaagagaagaacagccaaagttagggaattagtacaaccctcggctcacacatcaagctagtcaatttacttacgtcgacgcgataaatagagacatcaacccaagcgcaccggcaaaaggccaccacggcacactagtcgcagagccggcgatcaattcccatccgggacgatcactcgaggcgatttggttccggagctggcggaaacccgaaggcacggaagacgacagatgaactaatggaaacaagccttgcagcaaccagaacgactgttccagagcaaacgccgggctaaatgaatcatcatcagatgcggatagtcagtatcaaggccatacacccgcactcacaaacacagaatacagaaaattagaacaaactgtcgagagtaactccagagaccttcgctcacaaaccctcgtctcagatcagtctctccccatgtgatggataacgatttgggacccaggccgaacggaagtaccgtccaggtttttgtcttcgctcgcttctcatctggagtgtgcttccaagattggtagcttgagaaattccaggatttgaattaaaaagaaacgtataaacagaatcaaggttagtgggaaaccatctaatatcgatgttctgtcttgacgtaaagaagatccgtataagaggaaagtagtggggttatcacatacgcctgttggattccatctgagagatactccccgatcacacaagcgacacatgcaccggccagcacccaatcggctctcgtcggacccgaattcgtcttgagagcttgagcatcttttttagagagcgcggaagaatataaagtagggtttgattgaactagtaggtagtaagacggaagagctatgcctagtagtagaacgttttgagcgatagcttcgaaagtgcagagcatagaggtttgaaattcatataagcaccaaactctaaatggcatcgattcacggaaaaaacataccgataaacaagatgttaaagatcttcagaaggaacttgggaaccttgtctctcaaaacctcccatcgataatcctcgctgtttgggtggaagaaccctcgtctatatgcgttaaagcttagccgagccgaccagaagagctgggtggcgagcatgagaagctgcctgtgatcggtatgagcgagaatatacgagacgatctcttcgtagtttttcagcgtgataggaggccggttgtctgaagccagtgatagataatgggcgatcagaggctgaaacgtgaaatggatggtgtacctgtagaaattgcgaactttatgtcagtgtgtttacgttcggatcgagtgtgaccattagatgaaacaagataaaacgacaggtgttgaaaccgaagaagaaagattcttctagacttacataacaggcaaaaatgtccacaccctatcgacctgactcagattaccggtgatctcacttgcaagccactataggggaacgtgaatagggtgatataaatcttgtcggcacattccattggtttccattgcttgcgacaggatcacacaagatagcaaacactcgacttactgtccacgcagaattccatacgaccagcaggaaagctgagtagagcggatgagagtgggtgtagatgtattgaagatcagcgagcgatctcggcgggctcttcaaaagtgtctctggaaaactctgaatatcggagaaaggaagttttgggattgatgagaacttggaataagttgagagtgtgcttgtagtagatctaaacaagcccatgatgtctggcctctttcaagatggttagattctggatacagaagaaggctaacaaaaatacagaagcagtgggcaagcccagattccctggtcttccgatctttcctagtcggaccgatcggacggacagctcatcggtgagttacgtcatcgcctggttacaagcctgccaccaggtcatcagactggaatgagactgacatacaatataaccctaacaatgagctaatacaccgccatgataatctgaacgctctcttacaatcataactcccatctctctagtttctttcatcttgttccttctcatctctcttctttctgatcagtcccagactttctaataggtaactcatccaatcccttccgtttctactgacacagcatcatgtccgattttccgtgggtgggcaagtccatgtaggttctccatctcgtcccatttgctttcggattgagtgattggatgagatgaacggagtctgattcctctgcctccgtggttggttcttctcagcatgaggtacaactctcctcactcgacggacctctcctttgatgcagaccaggcaatccgcgtacttggaccagcacctgaaaccgatgactggagccttggcgagattttagagactggaaagaaaggtatctttccaaaggttcgttcggtcaaccagctttgagttacacatgtggaggcgcggcctccctcgtgaccgcattttcaccatgttggctgtctgttgactctcggttgtctgtttctcaccgtttctcttcctctttgttctctttaggaatttgtcatcaaagtcgatcccagcgaatcatcctctaccgcagccccaacagactctgaacaggaagacggttcatccactaagccaaccgaatcgctaccttctccggtcgcagaggcaccaaaggcaactcccatgactattcctcccaaaccagatgacatcatcaatcggacaccttcccctcctcctcagaactctcctcccataaagagtgagaatagccaggatcctctccacatctcatcgaagaagatcgtcgacgacaacacggtccctatccacaccaatgatccggttgtccaacctgctcgatctttatctcctcctcctcctccttcggatatctcaacgcctaccccagccgctccggtcactgtatcgccttcactggagccctctcatcctcctgtcaatatg

SEQ ID NO: 783 - DNA, 1924 bp, Xanthophyllomyces dendrorhous
cacgcctgctccgagggcgggcgagaggggtggagtcaagtccagcggtacggcggccagtttgatggtgccgtcgttggcgctcccgccttccggttctccttccagcagttgaaccactttggagcgaactttgttcagcagacgcttgactactaccctccttcgtgcgagcttgacaagatcatcagcgagaccatcgctgcttgtgaccctctggacgggttcaccgacggtgtcgtcagccgatcggacctctgcaagctggacttcaacatgacatccctcatcggcaccgcttactcgtgcgaggagagcagcgcatcgtctgtccctctgagaaagaggcagatggtcacctcatcggccacgcctgcccagaacggatcgatcaccgcccagggtgtcgccgtcgtgcagaccatcatcgacggccttcatgacaccgatgggaacgccttctacttttcctatcagcccggcgcggacatctcgtttgatgctgcgaccgcctataactcgaccagcggcgagtgggggatctctgtttccggcgtcggtgccgagttctaccagcggttcctcaagctcgttgactctagcagtctggactcgatcgagggctacacgtacgacaccctgaaagcatggatgatcgagggttggtacaggtaccaggactcggttcacaccacgaaccctgacttgacagagttccaacaggccggcggcaagatcatccactaccatggcgaacaggacaactcgatcccgaccgcatcctccatccgatactgggactctgtccgacaggtcatgtatcccggtatgtcgttcaacgagtcgaccgctgccctcgccgagtggtaccagctgtaccttgtcccgggcgctgctcactgcgccccaaacacggccgagccgaacggtccgtggtgccagactgccctgggagtgatgatcgactgggtcgagagcgggatcgagccggtcactctgaacgcgacctacctggcgggcgactacatcggtcagaacgctcagatctgccaatggccgttgcgaccgatgtggtcgaacaacggaacgagcatggagtgcgagtatgaccagaggagcttggacgcctggttctacgactttaccgacagcttgaagcttcctttgtactagacaatgacgtttgctagcttttgtattgaaaaagagagaaggatcatgatataatgtggcacttttgttttgtacactcgtttgctggaatctagagtattcagtcaaacattctgtgtgaacatgcgtgtattttgtcggacaagtaatgaatcgaacagaagaaactgaagagattgtcatcaaaaagagacacatctctacaaacgtagagacggctgactgctggtctggacggcatcattattcagcccacgactgtaaccctaactcgccccgaggattcctcagttatctctccgtactacgatcgcgcattcatccctaacctcatctcgacacttaatggtggcaccactgaacgccttcaccgaccatgcttgacgaacctcttccgatgtcgcttccggcgatccttgtcaatcccaaacctgcagctgtctcttatcctcgtctggattccagagcgtctggatcccggtcgatcaaaccgcttacatccaccaagcgagctcaaggtcggagggctcggctgagaaaggagaacggtaagtgttgtgcttcaggtgctcagtgttgttcttttctagtctggcaggtactgatcgtgttgcctgttctgtttgtctgtggaaacatatcgatgttcagactctctggctggcaatccccatgccgtcgctcctagccggcacgatcttccacttgctcctcagaggcttccgccaccgatattcccttcgcctctgcc

SEQ ID NO: 784 - DNA, 10273 bp, Xanthophyllomyces dendrorhous
  misc_feature (2632)..(2641): n is a, c, g, or t
  misc_feature (7538)..(7547): n is a, c, g, or t
ttcgcccacaagaacaaggtgaaaaccgacaggaggaacgatccagcgactgtccgtcatacaaccggtcgttggtgtggtcagtgtcgttgatcaagataccaagagatcaagtcccgatgaataatgcttacaagtcaagatagtgtatgccagaccgagctgtgggtagaaaccatggatgaagaggtcgatatgaggactttgatctgagaggaaacaataagctgaaagaaagatagaacgcgaaccccagcatacaaccccatatctgagaggaggatcaggcgcagagagaaggattaagaagaggcatttcctgatcagtatgatgtcttcacatgtacaatcccgacacagcttgacgtacaatcactctgagaccatccaacgatagagctatcagaccactttccgaggaaaatggtgttcccaacgatggaagcctgagtggtcgcgacgagagatcgtcgagagaacagtcagacgagaaaaagagaggaagccgacacaaaacacctcaagagaacaggactctacagacctgagctaatatgaagcatgacatgacttcatcaatcagccatcgaagatagccatcatcagtaacagattcggatggtcaagaacacgccagctacgtgctacacagaatctcacagactcacaagcgagcgcccaccagacagatcccatactgtttatgtacctcgtataaactttcgaagataccgctccgaccgcacgctcttccttcatcgtcacaagcgcaccaggagcctgtgatttcgccaactcatcagccgtaccctcgttcgttcgaccttcaccggtttgtttctcgagctcgtcctctatcgcaaccttcttgagctcgatatcctcttgcgtctcgatgagccctgcagaatctatgtctaaatccggatcagtcacggtctcagaactaccatcatgcgcaaccgacatgtgctctgccatgagttttgcaagcgccccgcttgttgcgagtagctcttgatacgtccctttctcagcgattttaccatcgaccatcttccagagcagcattcgagccaaacggacgccgataagagagggagtaagcaaaaacgcgagaccgaaagacatcgtcatcgtcagaaacgctcattccgtaactcggcctcactcctggtcatacatagagacaggcaatatactcaccgtgatgataagatcagctttcgaaagcacctccaggtgatgggtgatcaagatccgagttttagtccgcaacggtccgttgacgaggccgtcaactagcgacttgcttacatgagcatcaactgtgacacacggaaacgtatgataaaacgtatgcaaaggcagcgagtttcagccagagaaggacggtctgcaatcgcttggacggagtataggccatcagcattggactcaccggcagatagctgcaggcgggaaggttgtttgtatcagagcaaagccggatatatggcgagcacgttcgaacatcaccgaaaaaatgagataaggcaaagaccccccatgatacgtctcagtcaacatctctcgcctacattgagcaaacagatgacttgagaaggaagcacgtaccggatcatcgaagaaattgatctcgttgccacagtacacagctcgggctagacacactcgggcctgagcggatgagtcgatgcgatttaggaagaagataagatagagagtgcattggtcttgtaagcaaatcaacccaccaactgtatcgaaataactaggaatctgtcgatgagatatcatcctctgcgcctatcgctcagactcaccttctgtccaccggatatgttgattcctttttctacaagattcaatcgtgatgtccaccagcaacatacatgacacaaccgatccaaacaagatggacgtcagcacactgccggtctagtacactagcgtgcccccaagagcatgagttacctccgatctcggtgtagatcccatggttgagcatcgcaatatctctctccacttttgaccgtgcgcagatggaacacatggtgagaatgatgaccacgtaacagaaacgtacagaaccaacgatcagagctgttaaatctgccatcgagccgacatcgttcctgatgaactgtactcacaggcacaggccttgacagcagcgtcgaaacgcttatcgtccatctctgagccaaaaaggatgttctctttgagagtcgcatttctgatcagacgttgatacagaccagaaacaggtggaaaacggccatggcaatatccaacgagaaagtgcaagaaaaaagaggtggtgagtctgcatggacagtttctacagcgaccagacgtatccgtttcactcagtctgaccactgggtagacacatcactcacaatatccaaggcgattgaggaactagttgcgcccgttcagatagtatgacagtatccgaagatacaacagaatgaaacagaacataccccggaagaagcgtctcttgtcagtggctgtctcaagcactcgccaggggtaagacagaccaggaatgtcatctcgacacgttgaacgataacagtgcagacgtacagtaagcggaagtgcctccgagatactacgtgcnnnnnnnnnngaaaaccgacaggaggaacgttccagcgactgtccgtcatacaaccggtcgttggtgtggccagtgtcgttgatcaagataccaagagatcaagtcccgatgaataatgcttacaagtcaagatagtgtatgccagaccgagctgtgggtagaaaccatggatgaagaggtcgatatgaggactttgatctgagaggaaacaatatgctgaaagaaagatagaacgcgaaccccagcatacaaccccatatctgagaggaggatcaggcgcagagagaaggattaagaagaggcatttcctgatcagtatgatgtcttcacatgtacaatcccgacacagcttgacgtacaatcactctgagaccatccaacgatagagctatcagaccactttccgaggaaaatggtgttcccaacgatggaagcctgagtggtcgcgacgagagatcgtcgagagaacagtcagacgagaaaaagagaggaagccgacacaaaacacctcaagagaacaggactctacagacctgagctaatatgaagcatgacatgacttcatcaatcagccatcgaagatagccatcatcagtaacagattcggatggtcaagaacacgccagctacgtgctacacagaatctcacagactcacaagcgagcgcccaccagacagatcccatactgtttatgtacctcgtataaactttcgaagataccgctccgaccgcacgctcttccttcatcgtcacaagcgcaccaggagcctgtgatttcgccaactcatcagccgtaccctcgttcgttcgaccttcaccggtttgtttctcgagctcgtcctctatcgcaaccttcttgagctcgatatcctcttgcgtctcgatgagccctgcagaatctatgtctaaatccggatcagtcacggtctcagaactaccatcatgcgcaaccgacatgtgctctgccatgagttttgcaagcgccccgcttgttgcgagtagctcttgatacgtccctttctcagcgattttaccatcgaccatcttccagagcagcattcgagccaaacggacgccgataagagagggagtaagcaaaaacgcgagaccgaaagacatcgtcatcgtcagaaacgctcattccgtaactcggcctcactcctggtcatacatagagacaggcaatatactcaccgtgatgataagatcagctttcgaaagcacctccaggtgatgggtgatcaagatccgagttttagtccgcaacggtccgttgacgaggccgtcaactagcgacttgcttacatgagcatcaactgtgacacacggaaacgtatgataaaacgtatgcaaaggcagcgagtttcagccagagaaggacggtctgcaatcgcttggacggagtataggccatcagcattggactcaccggcagatagctgcaggcgggaaggttgtttgtatcagagcaaagccggatatatggcgagcacgttcgaacatcaccgaaaaaatgagataaggcaaagaccccccatgatacgtctcagtcaacatctctcgcctacattgagcaaacagatgacttgagaaggaagcacgtaccggatcatcgaagaaattgatctcgttgccacagtacacagctcgggctagacacactcgggcctgagcggatgagtcgatgcgatttaggaagaagataagatagagagtgcattggtcttgtaagcaaatcaacccaccaactgtatcgaaataactaggaatctgtcgatgagatatcatcctctgcgcctatcgctcagactcaccttctgtccaccggatatgttgattcctttttctacaagattcaatcgtgatgtccaccagcaacatacatgacacaaccgatccaaacaagatggacgtcagcacactgccggtctagtacactagcgtgcccccaagagcatgagttacctccgatctcggtgtagatcccatggttgagcatcgcaatatctctctccacttttgaccgtgcgcagatggaacacatggtgagaatgatgaccacgtaacagaaacgtacagaaccaacgatcagagctgttaaatctgccatcgagccgacatcgttcctgatgaactgtactcacaggcacaggccttgacagcagcgtcgaaacgcttatcgtccatctctgagccaaaaaggatgttctctttgagagtcgcatttctgatcagacgttgatgcagaccagaaacaggtggaaaacggccatggcaatatccaacgagaaagtgcaagaaaaaagaggtggtgagtctgcatggacagtttctacagcgaccagacgtatccgtttcactcagtctgaccactgggtagacacatcactcacaatatccaaggcgattgaggaactagttgcgcccgttcagatagtatgacagtatccgaagatacaacagaatgaaacagaacataccccggaagaagcgtctcttgtcagtggctgtctcaagcactcgccaggggtaagacagaccaggaatgtcatctcgacacgttgaacgataacagtgcagacgtacagtaagcggaagtgcctccgagatactacgtgcagtagacaggcagacccatgtgtatccccactaagtcagtcacacagtcacaaaaaagggacataaagaatcggtctacttacagcttcacccgacacaagcttcatctctccgagcagcgcctgcatcaaactagacttgccagacccgacccgaccgcagaccacgacaaagctgcctcgagggatatcaagatcgatgtccttcaatgcgaatggaacgacagggggtgcattcaatcgctccagcctctttctctttcgctcctccttctctgccgccttttctttctttgacttctttggtggcttgccctttcccatcggcccgccctttcctggagtcaccctaacaggctcatcgcttggcttctcggcactctcccaagagtagcttccatgagcagagacagcctagatgaacacaaatagtacacgttgcaacgattcagtcggtgcacaggcaaggctttgtcacatgcaacacacccggcctatcagaaagccactcacatattccgcatcaggatatacaggtactgggttatcgatctcgtctcccaaaaggcataaggacactctaccgagtccgacatatgcatctgagaccgcctgaatagcaagcggaatgagttgcagcggttgccggatgttgttgaacaactggagggcggtgaagatgattgccgcgttcagatcatggccagagagcgaatatgtgatctgtattgaaagatgacatatgcgtttgtcgtatcagcagcagatctcagtagctcatctcattcagtcgacgactcacgaatgacaacaccgcggcaaagacaggaatgaacgccatgacagcactcattatagctagccggtccgaatataagtggtcagatctactggtcagcatgacacaatcgcttctctgaggtcttcttccgtcactttcgaatcctagtcgacaggagcacaccaagcgcaacatacctcgcatcaaacagttcttctttagttcttccatctcgtcttgtcgatagtccgagatccgactgccaaagtattcttcgtaggccatgaacttgatgactcggatgcccgagaggatctcctgcagcaacctaactcgagagtcgacgatcttcatttgccgttgtcgagttccaatcatccgcgagaagagccacgcttggaagggtatcccgatgacaagcaccgcaaagcctacaagggccgagtacccgatagtgtgcagcaggatgataagtctgtgacgtgtttgacaaagagaagcatgtcggtcaggctgataaactacaatggaacggtatgggtatcggatgaaacgcaagacacacatacccgacaatgacctgcgcaggttggagatagagctcatgggtgagaagggcagcataatccatgaatgaggcatcggacgagatgtgcgtgacgagctttccattggtatgcaccattctggcttctccggacagccgaacggactttcttgagacgaccgagatgaccgctgctcggagcatgaacctgaaagcgaatggagatgtaagccggtgtgtgagtctatcagaaggcttggtctttgttctgagaactgtgtcagatgctgaaggttcacctacccagtgatcaaccctctctgaagaaacatattcatgaacagactagaaacctgctgcatgaggtagagcgcaaagcttatcccgatcccatagcccacagacttcggtacggacaccgtttctccagtttctcgatgcgagtattcgtacgactcggtgatgtagttcaagatcatccgtgataccaaaggagaagtcgacgttaaggcgatccaacacactccaagcattcccccggtccagaacctgtacatgtgttcatagaaacaaatcacaccaagatcaacacagccataataaggagctcaacaactccgaaagtctgacacgtacctccacatcactgttctgtgtattgccagcagcaaattttgatcatagatctttccatcctcctcgattttctccggatgcgtccgctctttctcgtcatcgtcatctgtcttcttcctcttgctagtctttccagtcttacccaacttgacttgttttcctgtaagctcgtcttccacatccacgccttctccagactccacatcctttaactccattcctgtaggcttcttgtcagtcacgtcccgtttagtggcagggccagttgacgagggtcgtagatgttggggtcgtcgactcggaggaacacgtccatagaagtnnnnnnnnnngtcgagttgctttgaactcgtcggtgagctccctgttgggaaacaaatgaagaaaagagtggccagtgagcatcactcgatcgagttctcaagacatacatcgtcatgtcagcagacgacttcgaacgactgaaacacgctgcctcaccagaaatcatcaatctcgaactataccccaggtcatagagcaatcagtcagacagagcagtcttccatggttatgcaactcaacaagggactcacaggtctcgaaacaccgacctattgagagaagcaagatcacgtcatccagtcagtataccccacgtatatgacaagccataacaagcgatgacaagccatgagaacctgacggagacctactcgtagtaaaggagtcaaccatgagaacagaacccaagaaaagaagttgacatggttctgagggatctctttcccttctgcgaaccctgccggtcgaggtttgatcttgaaaccaagaaagctctgttgggcgacttcggaaatttcgcctctctcggctttgtccgaagttccctgggtcgcactcttgccaggcgacatgatcgatagaaaattgagcagacagagaagcaagcagacgtctatggatctgtttcagtgaagtcgggtctaactgacaaagctgaatcgaaagaccaccgggaatgatgagtgttggttgccacaacgaagaacaagaccgatcagatacgtagagtcgagtttggactgacatctgcggcccggtcgtaatctgatttgatcttgctgtcgtgaccgcgtggacacttcagtatgagcactagtttatcttgacctcatctaacgttgtaccgcagctatcagtctcgtgttcaacatctccatatgcgcaagctgattcatcatataatattctatgtcctcttcagtccaagctcgccagaatctctccctctatcgtccatccgccctcgggcacggtgaccacgccagctttggtcagtgtcctatcagtaccggtgggataaaagaacagcatgaagtgtatcagtcctcgaacgagctatgtgagacgttgaatgagaatcaaacatagataactgactcgagagtggtgaggatcatgcttttgtccatgccttcgagcttcgagaagtaggagaccgtctgaagccaagcctcgacatcggttctgagttgttcaagatgtatacaagcgaaacggtcgtcagtcgttgcatcatccgtctcgcacccatcgcctgcagcgctgcccggcctctcgatcgagtggtaggaaacgacagacctgggatacccaaactccttctcgaccaagtcgccactcttcttcttccggctcgtctcagagtcaaactcgttcaccttggcctccagcctgtgcaagatctctcggacttgactcttggacaccgcagaggcaagcgtcggggcagatgcagcgatggcccacgagggccatggtgttggcaccgagccgatgaagcggacctcggacaggtatggcttggtagtaaaatgctcccacatctgaccatgccggacacacacaaatatatgcaagaaagacaaaatccaaggagtggagcaagtcgagatcagtggccactactactgagcagtaagacacataagacaagtcctgcgcgaacatacaaagtaagcggtcgacccgtcgttgacggactggcggagtctctcgaaggacccgttcactggaaggggtgtttccggccagcacagtgcatcagccttaaatatgaacggaggatgtgcaaacacgcacaaacaagcagagacacttatcacatacccacaaagtccattgcttcaggtcgaccttcgtcgtccacccagccctgctggtcggccatgacttgcgccatgacctagagagacaacagttacacaccgcacatcagcacgtgtgtcgctggcgtgaagaccaagtgatagctacggtacttacttgagaaccacttccaatccgagacactccacacttctgtcccctcaggtcggctatcgagttgaactgggtgtccagtccagtgatcacagccctggaacatacggcagaaaagtacgggtaagagcatgttcaccgacaggcgtctagtccggaagcagagaagcatctaactgaccagttgagaggagagctgacgtagctgccgatcatcttgtaggccttggatccgttgacgatgcctgcgatcagactctccgtcaacgcgctacacacattcaaaccgagaggcagcatgtcacatgtcagagctgaggagatacaggcggatggttccatacagatagactgacattgaaatatcgatctcgttggctgtgagtcgagagatcatttctccagttccggctggacacttgaccagggtgaacgtctgaccgccatcttccttagctagctcaagcagaggggtactgcaatggacatggcagggcgatgaaggggagaaaagaaggacaaatcagatgctgacggaggagacgttcgaacagtttgaataagacgagcaaagatcgcttttacctaaaatgctctgggacatatccgattcggagagaagtcatgttggttatgtgatgaagatgagagaagaaatgatgaacagacgacaaaacagaataagctgattgagcattaaccctaacctttgtgatgatcagatatgtcaaacaaaaaaagtggagattgtaag

SEQ ID NO: 785 - DNA, 33056 bp, Xanthophyllomyces dendrorhous
  misc_feature (2285)..(2294): n is a, c, g, or t
gtagacaggcagacccatgtgtatccccactaagtcagtcacacagtcacaaaaaagggacataaagaatcggtctacttacagcttcacccgacacaagcttcatctctccgagcagcgcctgcatcaaactagacttgccagacccgacccgaccgcagaccacgacaaagctgcctcgagggatatcaagatcgatgtccttcaatgcgaatggaacgacagggggtgcattcaatcgctccagcctctttctctttcgctcctccttctctgccgccttttctttctttgacttctttggtggcttgccctttcccatcggcccgccctttcctggagtcaccctaacaggctcatcgcttggcttctcggcactctcccaagagtagcttccatgagcagagacagcctagatgaacacaaatagtacacgttgcaacgattcagtcggtgcacaggcaaggctttgtcacatgcaacacacccggcctatcagaaagccactcacatattccgcatcaggatatacaggtactgggttatcgatctcgtctcccaaaaggcatagggacactctaccgagtccgacatatgcatctgagaccgcctgaatagcaagcggaatgagttgcagcggttgccggatgttgttgaacgactggagggcggtgaagatgattgccgcgttcagatcatggccagagagcgaatatgtgatctgtattgaaagatgacatatgcgtttgtcgtatcagcagcagatctcagtagctcatctcattcagtcgacgactcacgaatgacaacaccgcggcaaagacaggaatgaacgccatgacagcactcattatagctagccggtccgaatataagtggtcagatctactggtcagcatgacacaatcgcttctctgaggtcttcttccgtcactttcgaatcctagtcgacaggagcacaccaagcgcaacatacctcgcatcaaacagttcttctttagttcttccatctcgtcttgtcgatagtccgagatccgactgccaaagtattcttcgtaggccatgaacttgatgactcggatgcccgagaggatctcctgcagcaacctaactcgagagtcgacgatcttcatttgccgttgtcgagttccaatcatccgcgagaagagccacgcttggaagggtatcccgatgacaagcaccgcaaagcctacaagggccgagtacccgatagtgtgcagcaggatgataagtctgtgacgtgtttgacaaagagaagcatgtcggtcaggctgataaactacaatggaacggtatgggtatcggatgaaacgcaagacacacatacccgacaatgacctgcgcaggttggagatagagctcatgggtgagaagggcagcataatccatgaatgaggcatcggacgagatgtgcgtgacgagctttccattggtatgcaccattctggcttctccggacagccgaacggactttcttgagacgaccgagatgaccgctgctcggagcatgaacctgaaagcgaatggagatgtaagccggtgtgtgagtctatcagaaggcttggtctttgttctgagaactgtgtcagatgctgaaggttcacctacccagtgatcaaccctctctgaagaaacatattcatgaacagactagaaacctgctgcatgaggtagagcgcaaagcttatcccgatcccatagcccacagacttcggtacggacaccgtttctccagtttctcgatgcgagtattcgtacgactcggtgatgtagttcaagatcatccgtgataccaaaggagaagtcgacgttaaggcgatccaacacactccaagcattcccccggtccagaacctgtacatgtgttcatagaaacaaatcacaccaagatcaacacagccataataaggagctcaacaactccgaaagtctgacacgtacctccacatcactgttctgtgtattgccagcagcaaattttgatcatagatctttccatcctcctcgattttctccggatgcgtccgctctttctcgtcatcgtcatctgtcttcttcctcttgctagtctttccagtcttacccaacttgacttgttttcctgtaagctcgtcttccacatccacgccttctccagactccacatcctttaactccattcctgtaggcttcttgtcagtcacgtcccgtttagtggcagggccagttgacgagggtcgtagatgttggggtcgtcgactcggaggaacacgtccatagaagtnnnnnnnnnngtcgagttgctttgaactcgtcggtgagctccctgttgggaaacaaatgaagaaaagagtggccagtgagcatcactcgatcgagttctcaagacatacatcgtcatgtcagcagacgacttcgaacgactgaaacacgctgcctcaccagaaatcatcaatctcgaactataccccaggtcatagagcaatcagtcagacagagcagtcttccatggttatgcaactcaacaagggactcacaggtctcgaaacaccgacctattgagagaagcaagatcacgtcatccagtcagtataccccacgtatatgacaagccataacaagcgatgacaagccatgagaacctgacggagacctactcgtagtaaaggagtcaaccatgagaacagaacccaagaaaagaagttgacatggttctgagggatctctttcccttctgcgaaccctgccggtcgaggtttgatcttgaaaccaagaaagctctgttgggcgacttcggaaatttcgcctctctcggctttgtccgaagttccctgggtcgcactcttgccaggcgacatgatcgatagaaaattgagcagacagagaagcaagcagacgtctatggatctgtttcagtgaagtcgggtctaactgacaaagctgaatcgaaagaccaccgggaatgatgagtgttggttgccacaacgaagaacaagaccgatcagatacgtagagtcgagtttggactgatatctgcggcccggtcgtaatctgattggatcttgctatcatgaccgcgtggacacttcattaaatcataccctcgcggacacttcatcaggagcgctaatttatcttgacctcgtctgatcttgtaccgcagctattagtctcgtgttcaacatctccatacgcgccagctagttcatcatatggtattctatgttcccttcagtccaagctcgccaaaatctctccttctatcgtccatcccccctcgggcacggtgaccacgccagctttggtcagtgtcctatcagtaccggtgggataaaagaacagtatgaagcgtatcagtctttgaacaagcaatgtgagatgtcgaacgagagtcaaacataggaaactgactcgagagtggtgaggatcatgtttttgtccatcccttcgagcttcgagaagtaagagaccgtctgaagccaagcctcgacatcggttctgagtcgttcaagatgtatacaagcgaaacggtcgtcagtcgttgcatcatccatctcgcacccgtcgcctgcagtgctgtccggtctctcgatcgagtagttggaaatgacaaacctgggatacccaaactccttctcgaccaagtcgccactgttcttcttccggctcgtctcagagtcaaactcgttcaccttagcctccagcctgtgcaagatctctcggacttgactcttggacgccgtagaggcaagcgtcggggcagatgcagcgatggcccatgagggccatggtgttggcaccgagccgatgaagcggacctcggacaggtatggcttggtggtaaaatgctcccacatctgaccatgccggacacacacaaatatatgcaagaaagacaaaagccaaggagtggagtatgtcgagatcagttgcagctactgctgagcagtaaaacacataagacaagtcctgcgcaaacatacaaagtaagcggtcgacccgtcgttgacggactggcggagtctctcgaaggacccgttcactgaaaggggtgttcccagccagcacagtgcatcagtcttaggtatgaacgaaagatgtacaaacatgcacaaacatgcagagacaagtagagacacttatcacatacccacaaagtccattgcttcaggtcgaccttcgttgtccgtccaaccctgctggtcggccatgacttgcgccatgacctagagagataacagtcacataccgcacattagcacgtgtgtcgctggcgtgaagatcaagtgatagctacgttacttacttgagaaccacttccaatccgagacactccacacttctgtcccctcaggtcggctatcgagtggaactgtgtgtccagcccggtgatcacagccctagaacattcggcagaaaagcacgggtaagagcatgatcaccgacaggcgtctagtccggaagcagagaagcatctaactgaccagttgagaggagagctgacgtagctgccgatcatcttgtaggccttggatccgttgacgatgcctgcgatcagactctccgtcaacgcgctacacacattcaaaccgagaggcagcatgtcacatgtcagagctgaggagatacaggcggatggttccatacagacagactgacattgaaatatcgatctcgttggctgtgagtcgagagatcatttctccagttccggctgggcacttgaccagggtgaacgtctgaccgccatcttccttagctagctcaagcagaggggtactgcaatggacatggcagggcgatgaaggggagaaaagaaggacaaatcagatgctgacggaggagacgttcgaacagtttgaataagacgagcaaagatcgcttttacctaaaatgctctgggacatatccgattcgaagaggattcatgatgcgagatgatagttcaggataatccgtgagcgttttcgttctcaagtatttgtcattggcaacgtcatctttcttacttctactctcgttctgcctcacactctatctcgcaatggaactcagccgaaatcgtcctcattctgttcaggagttggtcgagcatgcatcttcctcaatccatttctctccccgttattcactcaaagcctgggtcaggtcttgcgaggctctgaccaaccaggcgaaagcgtattaccatcaacagggtcagcttcaccttgagcgagggaaggaacgagagaggatagaagcaatggaacgagagtttgtctgcatagtcagatgttgcaggtaaaaccttggatgtctacgctggcatgtcatctggctgttggtttaatcgagacattgttgcttcggttttctgtatatctgcatacaaatctctaggatcttgatggaccttcttccatgccatccacagtacaaggatctgtcagccgaagacaaggctggatttttgaaagtgagcacaccctgtcgggcataatcgttttccagtgtctggccagatgcgctctgtattgatagtctcatctctcatcagcgaggccacacagcccttcagtccctctcgcagctgaagcctctggtcgcaaagcaatatgactcctggcggtcccgaaatttggaacatgactttgttcgtgagagagcacagataaaggagaagaggagaagagagctagagagcgatcatcggaggcatatgcaactgaacggagctgaagatggaagaaggtcgctagagggtgaagctagtcggccggcctcgagaactgtaggtaatgattctacaaacaaatcctgggccgcccattctcctccatcggcagcagcctacccatcatactctactccttcgtcctcaacatcgttatcaacattcacgaatccatctccagctatcaaccgctcacaacatgcaatcacctacccgagtttgcctagcgcatatcgtcgaaagtttctttcacaatcccgcccatcatcttcgccttctccgagtcctcaatctacatctgatgtcgatctcgttggcggattgcggacgattaatcttccgcctagtataatatacaggttcttaacggtcgccgaaaggaataccaggcgagaaaaggagacttgtggcttccttttagggtcgcttgataatggaacgtttagtaagtatgcatttgatggctgctacctgtgagatttgcggactaatctgctataaacgattaaagcggttcgagtactccttatccctgttcaaaaaggcacgagtaacacctgcgagtatgttgttcactttgtttgtctaattctttcgaagacctttattcatctgcgcatcatcatggtccatcatacacaatgacaggactctggaagaagagaaagtctttgaatttcaagatgccagaggcttacttaccctgggatgggtaaatagaacgtctcttcatcacaaaaagaaacattcacaatattgacacctttaccttgtcgatatttatctttctgtcgcgttgcagatacatactcatccgacgcagacatgcttcatgtcatctctagatgtgagtaattctggactctttttcttcctgacggaaaaaagttgtaactgacgacgatcatccttcattatagcttcacacgcatgcatcgtatcagatgatgtttccagaatctatagcgatcgtatgcgctccgaggagcaacccagagtgagcacttaagtttcgacgctatacctcccaatatctgatttctgactttgagatggcttggtgttctgcttgtgattagtgttgggattttcagacttacagaccctccaggacttcaagtgattggtaattgtacgcgaaaggagacttttcatcctcacccagatcctgaaggaggtatttacactgtaagccgattgatacttcatattccgttgacttgaggatgtgtctaacgagccttttcttgatttcttcctctttcaccgccatagggcggtttcggaattcgagataaaggttttggacatgtgcgcatgagggagggtcaagggatagaactggtcgatcttcgatgaactacatagatgattcatgtcgaatatataagattgtgtttcagtcagagcttgaaaagtttgatacgatcgagcggtcgaagcaatttgaaaagtctctgagagttggcgggccatacacgcgtaacttgtgcgacccgagcgtttcgtttcgaacatccttcccaacatacaaccacctcagctctcacttcacccgccaccttcatttagtacacctggtccttcaacttttactgcaatcgaaattatgtctgcgccagctctttcaaagcaagagtccactcttattttgtacggccgtttgactttctcatccgtcttttcttgtgattatcccacatctccttatattcatctgtttctgttgtttttttttcctttctttacacctgtagcaatcatctgcgaagtcagaaagccaacaaggttcgttgctatctttatctttcctttcggtcgagcagacaacatgctgagcatgcggaccgtcaaacatgatcatcaattcgtaatccattcaacgacatgtaggtatgcttcgattgcaaagccaaaaacccaacgtggtctagtgtcaccttcggggtctacctttgcttggattgctctagcgtccaccgaaacatgggagttcatatcacatttgtcaggtgtgtcgcttcaattttcctcgattcgaacctttgagcacagaatatcgtttcgctctacgggaagatgtgagccattatcgattgacctgaacgtcaatcggctagacagatctcactctacgctttttaagcttaattgagaagaaagagtatcgctagctccttccgaccttagactaagcacaccttgacgttttgttatttgtttcaatacagatcgacgaatcttgattcatggaacgtcaaccagctgcgtggtatgaaagtagggggaaacggtgcggctaccgagttcttcacaaagaacgggggttcaaacattttatccttacaagacggcaagcaaaagtacaccagccgggttgctcaggcgtataaagatgaacttgatcgcaagaaggccgaggatgctaggaggtgagtctcatctctgtcgcaatcttgtacgaagcgaaactctttcgatgtactgaactttttatacttggatgaattatgtctttagatatcccaattctatccacatcgatggtctggtcgatacctctgtcgccacttcgtcttcagccgccaatgctgacgactttttctccagcttcgattctgctcccgtcaaaccccccgtcacttcggctcggccagctggtcccactcctatcgctgcacctgtagtcgtccggtctacatctactcccactgctccacgaacgacttcttctgcttctctaagaaccagttctgctgtccccggccggactgcatcagcctcctcgactactggctcggctccgcgagctatgaaattggggggttcgaagctaggtgccaagaaggcagccgcgcccatcaacttcgaagaggctgagcgaaaggctaaagaggaagaggccaggattgctcagcttggatatgatcgaaagaaggaggaagaagaggagaagaagcgaaaggaggccgaagctagaaaagagatgggttcaacttcgttgggaggagcgcgatcggtcggcagcgggcgagggacatccggacctagttcggctcctcctgtacccaagcttgggtttgggcaaacttttgcagctcctgtggctaaagctccggctcgaagtgtagaatctcaggcggatgagcgaacgtacgctcgagataaattctcttctcaaaagggtgtgtaattgaatttgtagtcgttctcattcaaaatttgagctgatcatatcaattttctggatatcgtcatatctctgaatgctcagctatctcttccgatcaatactttggtagaggatcatatgatgcagctgcgacttcccaagcacagactcggttacagcaattctctggagccagcgctatctcgtccaaccaatactttggacgagatgaggaggaagagcacatgcctggtagcctggacgacggagaagggttggagtctgttgagagagccgcgagggagattgttggtaaggtgatggcgaatgagaatgttcagaactttgcagaatccattagatccggagcactcaaagtaagttcaactattttcgaatgagaaaatgacatccagtttcatctctctctcagtgagctctatatctcatgtgtatgatctttttttaacggttttcctgctcaaacagttgtcggattatttggcggacatgtccgttgagcgatagatagacactcaaggccttatggtttttcagccatcaacagtatctttcttccttcatatcgtttctcttctatctcttctgtgtggagatcgcccgtgttgtcgagattgtattccctggtctagaccaatcggcaaggtacttcatgtcttgtcgaaaacaccatcgttttggatctcacagtgtcataatcatcctttatctgaaaatatatgcgcgttcttctctacaattttgtgttcaagcatcttcgattccttctggtgtttatgctcctcgctccgcattgccgtcaaacaatgtgatctcaaagatggtctgtctcctctgccaactcttctagcgatcttctcagagcaccgtcttcccaccttgcccaaacaaatccagtcaccaaagccacgcagccaccaaacccggcgatgccggcaaaaaaggcaaaaataggcgagtaatatgagtgattgggaaggaaagcggtcgatattgtgaaagctaccagtaggacgagtgctctgtaaatacgttggagcgtatcggtaagatagccaatttggaatatgaatcaatattacgacttttctgacaggcgagaataatacacgagtaaagataacagagaaacgacgaacacaggtactccgatcaacaagtgcctaccatgaggaacgtggacctctctgtgatgctcgaccacgcgtctcaattcattgagcatctgtctctttttttccccggagaacatggagagtggagtattcgaggaggtcgaacggtctgataaggtgggggatgatatttcaccattgtatcgattgttgtttgtcaattcggtcgttgtagctgatgttgcaggcatagaagaagacaaggaaaatgaagctcgaacggcgaaatggtctgaatatgaataatcttttcctggcacatggctggtcacaactacttctgatgatgtgcactgaagcgaaggattgattcggtccgtcaaaggccaacgtggaggaggtgaaggatctcgaaagaaaatgtagtcgagacgtttgccaaaagtcctttgaacttcaatcggtatatttttcgtcaaggtccaactattcagaggagctttaaaacaaaagaaagaagaaccaagacggacagaacgaaccacagaagaacacaaagacatgtcagcgtaggcaggggttaaagaactcagactttacgtgctcacaatcaacggtgatgcctgcctcgcttagagcctccatcgcactcgagcacggtctatcgactctgtccgcagtctcaacatctcgattgttgcgagctcgagaacatatccaagcgtctttcactaaaccatggtctctcagtacggcatatggaagctcattggattgaaagttgaaatctccacactggtcatcaggcagggagtatttggtaaggatacactgtacttctgtcaggtgaaggaagcaacaataccgaggcagaatgaactaaccgcaatgacgtatcttccctgagatgatgctcttctaatctcgttcgaaagctgccaggcctgcagggatcgataagagttacctatatgataaccctcgggtcctccagcgtgcatctgaatcgtagattagaaaccggaaccgatgacttgttagcaccgatatgtttggaacgtcaatgaattgcataaatagatcagtcaggtactgacatgggttgtgaaaacttcaacctgcccgagctctggatgctcgatgaccacgcttccagcggctttgttgacgaagaaatcggaaaagccaagaggtcggccggataggtgatagggtatagtttttgtcgagagtatcggatgtttggagaagatacagagacccgatcctagtgctccgcttgattcagtacattcatgagtatgtgcatttggtggcagaagacgacatgcagtcagaccaaataaaacagtgaagtacatccgtccagaaagacaagaagtactgaaacaacaggacatacgttataaagaatttactatggggatagttttgcttgatgcgggtatatatacgaagaaaatcctctctaacccacacctcttgaagacaaatcagatcatactggcgggaagcgagcagttcaattgctatggcctgaatgacacaggacatcaggatcaacttgatcaagagaacacaaagagcgacagcaagagcatgataacgacatacattgacccgttctatccgatactttgaaattggtcgaagtcccctgtagggccagatacaagcaatggttagttgaggaaggacttgtttcaatgagtccaacggaagatgtttcctgaccagcagttcaacgtcagaatctctagcatactttggttttagttgccggtcctactttggctataaggcgacaacgggatattaagatctatcgttggtgttgactgatgttgcgatgcacttacgtcagtcccggttagggttacacattagggttattttcaattcagactccgtccgcccctgctccctccgtgcctgtttcctctgccttcttcaccgttcctgttccttcgtgtgtttcctagtcttttttttttccttcttctttccctcatcaatagatctccatcttcttctttcgtttcttttcgctcttccccttcaaccattgcttcaaagaaacacaaacacatatccgctatgactactgttaaccgtacgctagtttcttcatatctatcccttatcgtttctaacctgaaattctttcctcttctcttgcttttgatatcacgttcgttgcccgcgcacggttacgtttgacctggcttttcgaccattcttttttgtttatccttctgtccttttcgtctggttcaatcctcatggtgacttgtttgttctaccagacaaagtttgcttgatgttagtacagcatatgtgatgtgttgattattcgagcaaaaaaactgatttcgtgttttcgccccaataactcgcagcgttcacgacggttggggtatcgctcctgcgaagggtgacaagggaaacgctatcgagcacgccgatactaccgccatggactccatcgctcaggagcacaactacaccaccatcaaggcccatggtcttgccgtcggacttagtgacggactcatgggtaactccgaagttgggtgagtgtctacaaatcgcgccaattatttctatctctatactttattcttctttccttacgtgtactgtcgtttcgctgactctaatgttcttatctacctgttgactgcgttcaactcgtacagtcatcttaactgtggagctggtcgagtcgtctggcaggatatcgtccgaatcgatcagtgtatgtacatattcttctgatatcaatcacgtcctcttcgactcattcctatctcggtctatgcccggtttgtatcgaacgataaatcagctatcaagaccaaggagttccaccaaacctccaacatccttgaatccttcaaccacgctaagaagaccaatggccgacttcatcttctcggacttgtgcgttgacatgccatcatccagttctctgtgcatgagctctagctgaagagatttgttttgtccgactttccaccgcttcttgcaggtttccgacggaggagttcactcccatattcaccacctcaaggctctccttgagactgccaagcaggtcggagttcccaaggtctacattcacttcttcggtgacggacgagataccgctcccagatctgctgctggttacatgaaggatctccaggccttcatcgccgagaacggagttggagaggttgccactgttgtgggcaggtactacgctatggaccgagacaagcgatgggagcgggtcaagatcgctgttgacggattggttggaggtgagggagaggctagtgaggatgctgtcaagacgattgaagagaagtatactcaggatgagactgacgagttcctgaagcccattattttgggtggccaggagtccaggatcaagggttagtttttgaaatccgttctgtaacctctgaggcgatcagaatcagcttacgaacaacttcttcgcacctctatgggattctctagataacgataccctattcttcttcaactaccgatccgaccgagtgcgagagatcacttctgtctttggtatcgaccctaagcctatggaggtcaccgttcctactaacttggtgagcgacttttctgaagagctctttatagatctttctaagctcaattgtggttctttacttctagcacatcaccaccatgtctcgatacaactctgagttccctttcaacgttgctttccctccttcgtcgatggagaacgttttggccgagtggcttgccaaaaaaggtctcaagcagtgccacattgctggtacgtttcagtttctacaagtcctcgattcaacttctgcgctcaaatagtgtattgatcaaatatttttcacgacaacctatccagagactgagaagtaagtcttctttttggtatcgtttagtttaggaacactgaactggctgaaccaacttttctttctttgacgtccttttcagatacgctcacatcaccttcttcttcaagtgcgtgtttcaacaaacctctctggtatcgacaccacgttttgttctgctgaggatttaatttttatattgatttgtcttccttcctcagcggtggagtcgagaagcagttcgagaatgaggttaggcatatgatcccctcccccaaggtccccacttacgacaagcagcccgagatgagtgtccaggctgtcgccgacaaggttgctgaggttgttaagtccgatgagtttgagttcatcatgtgcagtaagtgtttagagttcattcaaaactcgcaccgagctcctagttgttgatcacaacatctcctcagactttgctcctcctgatatggttggacacaccggcaacttggaggccgccattcaggctatttccgccactgataaggccgtcaagaccgtttatgaggcctgtcaggctgccggttacgtgctcttggtcactgtacgtaatcttgtatgaaaccacacgcccgagtacaacaggagcgcttactcgaacgttctgtatcacctggccatcacagtccgaccacggaaacgccgagcagatgatcaaccccgagaccggaaacccccacaccgcgttcgttctatcatcatgttggctatgtcaagcacatccacgtacaatcgagccatttgctaaccgtttgacgtttatttccatacctattctgtagtcatactactgttcgtcaacttttaattttcaaccttcgattttacctcacatttgttgatcacttgcctattcgtagaaccctgttcctttcatcatgaccggcaaagattccaagggtcttggcttcatcaaggacgagaagaacgagggatgcttggctgatgttgctcccacgattctcgacatcatggtatgctccatccaaagctcatgatcgagactcatgaacagcacatgatgttaattgaaatgtttttttgttgtctgcccttttcttcaatagggtctcgaccagccggccggtatgtttgattccaacagcctgtcaccttatttgaagcattatctgacatgttttcgaaactctctccctcttctatctattttcattgaccaacatagagatgagcggaaagtcccttttagataagtctgctaacaagaagcagcgaaccgaataagcgtctattgctccagttctctcagaaccctggtttcctcaacaaataggaagccggtcaaacagccgtcggattcaatcttatctagttttacgtatcgtccagtcttagtcctcttctcaatagatttcagcagctctttttgcccatatcaccaacattaagggatactatatacaacaaaaatgatcaatgaggtgttttggtgtataagctcgttgagagttgaccgttttacagagtcacattcgttgagaattgttaaacctcgcaatctgagtgtgagattcggtatactgagtccatccgcccttgcgtgtttacagtaggtatgctgccacaagatcatagactttatactcagatgatatatattctatacacaagcaagtgaaatacagcctggaggagtgatatgatgccgccaagagctcaagaggttcgtagaagatagtgtccatatgcgatctgaaggtcaatccttggtcttcaggtttgtgatatccgtatcaaccatggcttcgagcgtcatcgatctagcgcgattttgtgcagaacgtccaccatcgtctccctcgtcaaggttgtctctggtcaggagtaccttcgagatatgatctttcctgttggctttgcagattcagagtgttatgctaaggagctagccgcattcgtcaactctcctatcttccaactcctcacagtgagcttcaatcaactgatatatgatcaaaacatgcaggtcgttgaccgagctgtccaggtggagatccatcatctagattcatttcttacgggtactccgaatgacccctggcaaaagctaccaagcgaatggcgggcttggtttgaagatgattgtgaggatatagagaggctggaaatgaggctgcgagacgttcgaatgaagggtacttcaaactgtaagctgagtaaatcgttgttctgtgtagaaagccaaatttgactatctatatatctttattgaaatgagcaagtgctcaacagaccaaagacactcgatgatttcttggccagactccgcggtctggcccttcctaggctgcgaagagagtcacgatccacgttctctcaaccccatatcgctgaactttctccggatctgttgagaggaatgtcaatcaagaagcaagttgaggttattgagtttgcagggattgtacagagtctcgcaaaccgagtcggtgcagaaaatgctatcgtgagtatcacccgtccattcgcacaaccagacattcctttctagagctgatcaggtcgaggtgtattctacaggatattggggcaggctttggtgtgagtctttcaagcccgttgaaaatcagcattcgatcatctagtgatatccaatactcgtcatcttgtgaggaagtatcttagccgaacacttgctcatcccgacacgtcaaagcctcttcaagtcctcgccgtcgatgggtcacgatctcagatcgaaggatctatcgcgctatctggttcatcggcatcaacgactctagagccctcaataacatacctactgcaacacgtctcctctgcttcttctgggcgagttgaagttgagtgctggctgaagaagaaaggtccagcagtgatagtcggactgcactgttgcggcagtctgacagatgaccttttgggtatgttcttgcagacagaaacgattagaggagttgctgtggctggttgtacgttcaagtcttctcgagtgcaatctttggtctattcttgtactcaatattcgggcttgacgcactaggctgtttcaatcatcttcggacctccgctacacccgccgagtcatgtatcgggcaggacagtgtcgatgttgaaccgagcgcgtcgacttttccctcaagtagtctactgaagtcgtacagcttacgtttgagctcgacagcaaaaatggctgcttgtcagaatgtggggggttggacagatagtaccggaagagaactgagtgaaaaagagagaaagaaggaagagcagaatcaacttctcagcaggaaaaggtctgtctcctggtcaagtttcaattagtttatgcaaccttcgagctttgtagcaacgtctttcgtgctgattcaaattcatatctcacttggacggctggcttagaaaacattaccgacgcttgtttacacgattactcctttcctcgcaccttttacaagagtctcgccctcaactggaaacacttcgactaggctccattcctagaaacaaactgtcatccttcacgccgtatgcatcttatgttctctctaagctcgacttgttgacggaagagaacaatggttcattgatggaggaggcaaaattgatcgaagagacatactctgggtggaggtgggacgcgagaggcaggactatagaggcccttggcaaggctatcggagaggttgtcgaatcgttcgttgcatcttccatttttcttttcatatgatcaacgattcgaagatattgatttagactgttacatgcgtattctatatccagtactatagcgattgataggtatctcactttaaagacgcaccatgcagtagatccagaaactgtggacattttccagacctgggcttatgaggattctcctcgaaacttgatcctggttgcgcaaaagaggcctttatgaacctcaatatatcatgtagatttaagaaacaatatatcggcttaaaacgatatctgaaaaagaaagtctggttcagagaggctaggtatcaaaaagaaaatagcaagctggcgctactcagtaatgtgggcagattatacccatgacccgtgagattttggatgtttgtggtttgaggtctcagatcacccaggcccaagaggaccacgtatggagcatcattgattaggattgctctcaggcatccaaagccacaatgagtgttcacgtattttaaagcgtttacccagaatagcctgttcccttcttctctaccacagtcaatgaaaatcgataaacaaccaatgtattagttgctaagttacgattaactctctttctaagtcaaacaaatgttaggagaaagtctctcttcaagcccaggctcatcttcgtcgcagtatcctgccggcccagtatctcagaaaaagagagtattgatcggctcagcttgtgacgcgtatgttttggtctaatcttctcctttctgcacaaagcttattctaatcagattactttcggactcctctcatccctcaaggtgtcgaagatgtaagacccgttgtgacaaaacaaagccaacctgcataagatgcgttgagattggcagggtgtgtaagtacagtgtcgatggccggaggtgcgctttgattgttctttcctggatcgtatagtcttgaccggttaagcttgggacgtctgagactcacttcgattacctttataatcttctcccgaatacatccttcaagtcttcgtggcgcagagaacgcccctactgtactccaggccaggattgtggatctagaggctcggcttgatgctgcgttgagtgtgcggacaaatcgattagatactctttccgctcattcaagcaatgccccatcccagacaagatgggttccgggaggatcactttctctttcatcttacggagctcttcgttaccatgacccaacctcatccttcttccggacgcaccaccccaatagaagcaaaaaatgtcgaatgctcccatcatcaccttctggcaatttgactcctccctcgatcgaagtcaattatctccccattcagttagatcatcagcttcatcgtcatatcatcgacctggccttcagtcgcattctaggctatggatcctttgctcgggaagtcgattttaaaacggatcttggcgcgtctccactcttaaggacgagtaattataccccttttgtacatcttgccgtcctagctattggatgtcggtacttgtcacccgacaaacatcatcttgtctgtccgccaggagtcgactatgaacagagaggacaaatttttgcggaggctgctcaagagatgctacgacgtgacggcgcggaacctgatctggcgtttatcagaggcgtcacagttcttttgaaatacatggtaggaatgggccaagagtaagctacccgcatgcgatcttgagaagagatcatttttcggtatgagaactcactcagttttttccctccactgtcaagtaatttggctgtgatgtatcagggaattgcaacaactgtcgctctagattgtgagtcattctcttgcatcttgtcatcaccgagagttacataaactgagttaaccaatttccactcaaaagtccgactacatcttgcctttgaccctagccataaagatccaaatttgccaaataattggcgaacaatttgcgatgaccgcatcaagttgtttgccaccctcagttgtgtagacgtgatgtggagcgcctacctcggcagagaatctgatttccctcgaatgcatgtcactcaagcgaacttgccaatccctttagacccgcagtctttacctcttgttgatctcgcgctggcctatcattctcgtctggctgttatctcttctctcgcgattgaggagatctacaccgacccaatcttggacatagattcacacattaaggcgtgtttacgctatctggaggagctggactactggttagttaattacaatatacttctgagtttctccacatgctgattagttcaagatctttgatgaggtaggtttcagtctctaccatcatcgttacgccttgactctgatatcagcgttaccatgactgaatctcagtgagtgcattgattattcagggtatcgattagcgagactaaagttcgtcctttttcggctagtgtttgtactctgatcatgtttcattacgcagttcgcattcttctttgtcaacccttcattggtactcttcaagagcatcgatatctagaaactctttgcaaggcgtgtgaggacgccacctggcaaatcgtccgcatcgtgagtatctccccttttttggatttttcttttagttcttttgaggtgcaaaactcacgagcgagttctcattctacgatcacagattcgcctcatcctagcttcgtcaggtccctcgagtggtccgttgaacaaccaagatattgctttcatagccggtggtgtcttagttctgttagcttccggtcactttccgcatacctcctccaattcaactacaacgcaaccaaaatcatctgacgagtccgtcccacagatgacagagatatgtcgacggaacttagcagtagaagctctcaaggacatctgttcatttctacgtaattttggactccaggtgtggccgaatcccttacaatctactcaaacattggaaacgctactagctgagtttgcactgtaattcttgtaaaacgaccttgtaaaacactcatgactcaaaaacctaagccatatagctagcctgtatagtatgctgtaaaccatcccatactctttcgagagcttgagctcttggacatatcccaatagccagccaactaaacaaacaaaagctgattttgtatcaatcactactcctgtacttatatccacctctatctacaacatccggatgaataaagctagcgaatccgactcaaggaaaaaaaaaattagcaagccaaacatctgggtatgtgctgaacttagcatatacatatcagagattgagaacagccgcaagaccatcgatcgattcgactcgactactttgatgtttacattacatgcctggcatggagcgcttagatgaatactgctgagatcagctgcaattggcccggttgaacacttcttctccatctcttcgtttgtctgttgttttgtctgatgatcaccttggctgctcatgactgtcgctatgtctctttgtctctttgtctctttatatgttcatgtctttgtctgtggacggtagagcgttcaccaggtcgttcatcatgaccgacagccagtcgaactgatcaaagggaaaaccggtcaaaggggatttcctgcaaacaagcagacatcaatcccaacagcttataagacacaacggactcgagatgatcagagcgctctttcgtatcagaacatctcttcatatcagaacacttctccataccagaacactcactagctgctttgaggagtgccgctcctcttgtgttcgacatgaagcgcaagaggacggctcaggcctcggcaaagtcttctctcgcagctaacactactactaccactactactgccacgtgctcagcctgcggtcaggttgggcactcaaggcgatctaaccacctctgcccgttttacatccctcgtcagggagtagagatccgcgccaagtcagcggtccctatggtgtcacggacagtgaagataggctttggtcctttacccgcctttgggccactggctggcccgatcgagtcggccgttgcccggctaggaaagataacattcgacgcatcgcgactactgaatatccacatgtcgaaagtctgcgcggatggaggggagataccgaatcttccctccatgatgcggctctactttcaggctgttggtttcaacacgcgtggaggaaatctgcaccaaggagcgccaacactgaacgaagggatcaacgacctccgcgacgcctctttccctgctgagcaccagttcacagactccaagtgagtgatctctttggcgatgacagtaatgcagctggctgtgaacagggactgactgatttgctgttgtcatagatacatgggcaaaatgatcagcgccaaagctcagtcgtggaccacggcctgccagaaccatgtcgtcctgaacatgccgcgccgggcttctcggctcatctcttggtggctggagacacacgtcggagaagcgatccagagccggatcagtatcagccaggtaaggaagacgggtcatctgaggaggtatctgaagaaaggctgcagcaacgactgacctatctgacatatctgatccatctgttcgtcctcagcgcactgccctctcccatcagctctgggagcaactgtcccctccctctcctcgaggaggagaagagggagaagaaagacaagagggtgaagaggatagagaggaggagccaccacaagctgccacatccctggtggccccgccctggctactcaaactcctccttcctgaccagcgcacggtgatggaggctcatctccgaggcttgttcgacttcctcacagatcacatcttcggaggtctgcctctgacgggtgaggccatcaagaactcgtggaggtcctatctgcgccctctgtaccggatactgaccatcttcgaggaacatggcccccaagatgcggctgcaagacggaccactcgtcgccgggggcatggtctgcgcctgttctcgcttctaccgctctcgtcccaccggtcatcctacgtctttgtagacaccatggctctctacgacctttggtcccagctcaagttggaggacgcggatatgggatatatgcgcggggtgactgaggagtccttccgggctgactctgacacttggtggaaacggtcgttccatatatccaaagtcaagaccagaacgcgacagttcgccatgtcgctcagtacagacggcatcggcgtgtctgccggaaggctgagacccatatcgtcttcatctggcatcgacgactacgggtggagatgggagggcgaaggcaaggaccgtcaccgagcagagtatgttccgtggggtgtgcggccagaggacgaggtcgtggggctcgacccaggccgtcggacgctgctctcgacgaccgccggagggctcgacatgtctctggacaacggcggtctggctgagcggggcacgcagtggtcgctctctctcaagtcatggaggcaccttgcagggatggaccgagacgctcggaaacagcagctgtggatgaagaaccatgcggaagtgccaaacactctccgtggtgagtgtctctcacgcttatactcacactcacactcacactcacactcacgttcaagctaactgtgcaaacagcattactgaccttgcaaactgccttgcccacctcggtgtcttgctttggcttctttcctcggtgtcttgctttggcttctttcctcggtgtctttctccagatcttccttcgttcagatctgccagtcttgacggcctccgcgctgctctcgtctcgcactctcagtcctactcctggctcgcgaccttcttcgctgctcgacgctggagacgtcttcgctggggcgcacacatcagccgcgatcaagcgtaccacaaggtggcgctccgtctgtcggcaggacgtccacgcacctttctggccttcggcgatggtgccttctcgtcatcttctcgtgggcatgcttctggtcctgtgaagacgatgtatgccaagctgagggcctctccgttgctctatgttcgcaaagtgcgggagtatcggacgtcgagggtgtgctcgaagtgccatggcgagttctcaggaaggaataaagtgtgggcgatcaaagagtgtcgaagcgtctgtcgagtaagtgctgtgtgtctattacatatcttatgatgatgtctcgatgactgatcgttctctgtgcttgctcattgttttctctgctttctcttctctctctcagacctggtggaacagagatgtcaatgcgtcgcgcaacatgctgcacctagcccttcatcaggaagagaacgaaggggcaagaatgctggtgtttgatactgctgctgctagtggggctgaggctgaggctgaggctgaggctggcagagactaaacccatgacccatggggacttgatggtatgtgatctgagggcacaccccagtccaaaagggccatgtattgaccaccattgatcgagatcaacctcaccaagcgtaaggcttataacatatacatgttgtagggtctgccatgtcttcatgatatttgttcagaatatataagccgagtggctgtaagtgttcggtcgaggctgctgctcacaccaaacataacacttttcggataatacgcccgatgatttgcaaattctgaaattccatcttttcgacttggatttttcccaatctttcatacttcttccttccatcaacacaccatcatccacccatccatcaatcactgtccaataatgtttgcttcttcatccagacgagctctcctttctgcttctagaatctctactcccgccgctaggtctgccgttcaccaatttcgcccacaagttctctcccgaatggatcttagccgcggtaagagtggttatctgcacccatgcttatgatatttactgtattgaaccttactcatgataattctcatcaattctggtcgccttagcttatgccactgctctaaagaaaattcaggttgccaatcccgtccgtagaaatcttcatctgacaagttgtcttctgcgacctaagcctgatcatgcttgtcttcgctcgactaaacgtaggttgtcgagctggacggagatgagatgactcgaattatttggaagaagatccgagaggaggtaaacagctctttcctctcatcagacacccaaacaggcaagcgaggtcaaggtctaactttggaccttcccatcgctagctcatccttccttacttggagctcgacattaagtactatgacttggggtaagcctaattacagggtttcaagttgaagttgattttattcaaacttatgcgtaaattgttttaatgcgcccgctctagaatggagaaccgagatgctactgatgaccaagtgaccattgactcggctgaggctatcaagaaggtaagcatcccgttttgtctggtccggccatcaatcaagcacatccatctgataatcatactctttacatttgcgtccagtacaacgttggaatcaaggtcagcgacgaaatcgattcagtagagccagagtgcaagtcaatgatactcaacattaccgatttgttattttattagtgcgctaccatcactcccgacgaagcccgtgtcgaaggtaaatcaaattatcttgaacatctgaatcatcatttcgcggctgacttgattcttgcgaaatacttgggtcggtttagaattcaagctgaagcagatgtggcgatctcccaacggaactgtgcgtatccttttttgaaaccagaacctttctacaacctgcttctcgtcagttcagtcgttcatctctatctatggctgtataaatatgttctgttagattcgaaacatccttgacggaactgttttccgagagccgatcatcattccctctattcctaagcctgtgcccggttggacgaagcctattgtcatcggtcgacacgcctttggagatcagtacagatcgactgactatgtggccaagggtcccgggaagctagagatggtttacacgcctgaggcaggaggagagaaggtcgtcatggaagtctacaacttcaaggggccaggagttgctcgtacgtttagttcttatcaacttgactgcgtttgttcataatacagaatacggtagtctgacaccaatatgcgtgctgtgtcacctccgcacagtggccatgtacaacactgatgaatcaatcatcggatttgcccactcatctttcaagatggccttgtccaagaaaatgcctctggtgagtgtccttgttacttgtaatgctgtctttatttcatgtactgtttttgcgctaaacacctgtctatcatgctgctcaatatatagtacttgagcacgaagaagtaaggaccctatctctcaagattcaacacactgaaataacggctaaacgacgtttcatttcattcagcacaattctcaagaagtacgacggaaggtttaaggacatcttccagggtatctacgagaagtatgtgctccacattctgaatactaactttgaggttatagctgaatctcaatcaaacttcgtcattctcagaacttatcagaaggactttgaggctgctggtctctggtatgagcatcgattgattggtgagtgtcttgcatgtatcactctaaaataaaaatgatttctgaccatttgtctgcttcgtgttggccaaacttccagacgatatggttgctcaggccatcaagggagacggaggtttcgtttgggcctgcaaaaattacgagtcagtcccggacgacgctgtgtctcaaaggtgataatggactcaatttgtctgtatttgtcttttcagcggagatgtgcaaagcgatatcttgggtcaaggtttcggatccttgggaatgatgacttcagagttggtcactcctgatggtttggtcatggaggctgaggctgcacacggtttgtttagaagttaaccttcccgcggttgacacagtctcaactaaaaatttcgatgtctgtcgggttttctggaaaaaatcataacaacataaaaacaggaacggtcacccggcactaccgagagcatcagaagggaaaggagacctcaaccaacccggtcgcctccatctttgcttggacccgaggtctcgctttccgagcaaagcttgacaagaatgagaaccttgcagcgttctgcaagagtttggaggaggcctgtgtagagagtatccagcaagacggaatcatgaccaaggacttggccttggccattcatggaaagaagtatgcacactcgctcgttcatggcttagctactcaatattcactgttcttcggaaccttgtttgtcttgttctaggatgactcgagagaactgggttaccaccactgtttacctcgaccatgtgaacgtgagtgtgttttcttgtgacaggctgtgcctggacgcgttgtgttctgactctacggccctttcctctacacctcctcatttgctgtgtccttatcaggatctcctccagaagaaactttcgactcgactcaattagatagctcaaaaaatttgagacacctgtcccccagtcttgggcggttcaggagtcatcatcctagccatgactgatgtaactaatagacttatccgattgtaaatggcattttcttcgtggtgatggtcccttcctagagctatgggtttgccgcggcagccaggcacgtcgcgttcaagaccaacaaacaagaaacgcaacgtggcccaaatatacatttccccctcattttaaaaggaaaaaaaataatcgcgtcttctggatacggtcacatcagtttgtttcttccaagtttcaatacatctaacgcgtcgctgaccagctcagaaatggatcgacactagttgcgcaggagcgcggtcaaatgaaagagcttactgtcatttgctcatgtattccttgtctacaccatagcgcaacctacatcatcaacttcgactcgactgtctatcacaacccgttcgcactaacttgacttccagttaccgttcctctccccttttacccctcactcttctcctatccccatgaaccaaaagggtcctacccgcgagtctcttcagatgctgaagagagtctctcttcaaaaattgtgcaaagttcgtgttctctttcaacctccatgttattagttcgtatgttcatcagatagaattctcgtcccgattcattttcagagtttgttcattaaaggagccaacaagaagtctgttgaaattattgaggtcattcttgctcactacgctcagaaggacattgaggtcgaagaggcaaaacaaatcgcaccagtcataccatcagagcgagcagaaagagttataccagccagtcgtattgaggctaccaaacgagctgcaacgatcgaagcgacaagagaaccaagaacgatcgtaaggggtgaaggagctggacaagccatagagacagatgttagagaaacgaatatcacaaggtcaatgctgctcttcgaatccgatcttgagttctttaactgatgttttccttgcttcaataaattttctatctcaggcatgaatcgagtgggatggagaatcctcgctatgaggatctacctatgttgtctgtagttgatgaagacaaggagaggttggatctgttgcagacccatttcgacgttagattagcggctcatcgaagagatctcgaggagagagacgctactcagtggggccagattgagaagaggacggcccctcgaaagtcaatcgtttgtcctcagaagaagcctatttttgaaatctatagggatccttcaactcctgaacaaaattttctcgctggaccttcgatgcttggagcggctccgatacagttgctgaccgaacaattgtctgtaaacaagaacgttctgaccgtgatggaatctatcagtttgtcttgtcctcacatcatatcccctctgtctctacgacttaacttttttctctgtacaatcctttctctgtacaatcctttctctgacagtgcctcttcgaggcaataaggtcaagattcgatctcacccatttgtcgcagcctccatggcttccatgtccaagaggaccaggtgttctcgagttaagagctctaaacagtcagggctgaatgatacagccttcgacactggcatcgatctggctttctatgagcaggtctcggaagtcaacttctggctggtcgaatccggaaggagatgaacgatcgagatcaacgattgcaccctcgagcttccctcagtgttcttggtaaacgacaaaggctcaacgatgcaaaatcccttgttttcagagtctccaagcgcctctcttcattgaccgccgtcgaactttccagccacataccaaagaccctatctgttcttggtaaacgagctcgggaaccgacattctctattcctgaatacgaattcgctgatgagttcagctttcctcttcctcctgttcttcgacttgccacccctccgatcatggatccccataaagatccctggccctcagtcggtcctcttttatcagaacctccgaaaaaatccccctctttctccaagaagcccaagcggcttctcgtttttgaaggttgtgccctcacttatataggaatgatgaagcctgggttcgttccttctctcgaacaagttgagagcagaaaaagcttgaagtgctgggtagcggtcgcctctggtcaacgaggtgcgccttgttcctggatccagaaacaccgacctcctttcgtccagtccgagagggaggcgaaggatgatgagcgtcggaggcaggaggctatatgctggcggccgaagtcggtcttttcggatggccacgtcgagttcgccgaatcctattatgaaggctgtagttttaataactatctcgagatggttggttattatcctggtttccctaaatcaatcttgtcttcgtctggatcgtcaaagaagacccgactcaatgattttttatgagacgcaagcaaacttgcaaccccgttcatctctctttcatgctgctcttagtatgagggcgctgtctctgtcgtcttcctcgtcgtcttcagcttggttgtcttttctaccggcttccaaccacaacacttctctatttactcccaattcgcatgatccgaagaattttcccaaatcgatcactcattacttaggggatatcatcgtcaccaaggttccttgtaaaaagtctggatggttcaaaagagttccaagagaccccggagctgatggaccaatccggggtcgagttgcttgggatgcctaaacatcttccttcctctctcttgtctctcactcttggtttggggtttttctgcttcggttctgtattgcctcgactcgcgcttctgcctgttttgggtctgttttcgatcggtcccacatctgtacttccttcctgcctgtatttgtctcttctgtctgttcttatgtactgttcttgtataaaggtttgaactgtgtgatgctttatacttgccttctcaaataccaaatacttctctctttctcattctctttgtctcatgttgtccttttctaacactctatctggtcagaattgatgtattctcatcgatcagcgtcatttcaaaggatcattgatttattcgagtcctgcgcccgcaaaagagaacataggtagttcggcgagccaggcgtattgaacttgagaaacagatcgggcatatgtattcgatgtatggacctttgagaatcaagagaacaagatcaagcattgagtccattagacaagagcgaacagagctacagaggtagagatggacatacgatctcgccgtatagaatagcgtttgcacgtcttccgaacatcgtggaggacggatggattttgacgatctagattatgtgaacgagtgcgatacacaatttggtcagttctagtcggatagaccatcatcaaatggaagggaagggtaaactgaccgagttgccgaccatttgcttatactctccatcccgctcaatggcggtgttcatgaacaacccgtccaatagactacgtaagattggctctgaatcatcccctgccgtcgtcttccaatcgacgttttctctcacacaaatttctctcatttggtccctcgcctgaattgccctcttcaagtttctctcgttgacaaaccgatctcgacaccaaagctttctacctgctgagtccgattttggaagtgcctcgtaagatcggagaacattgagcatggtgagatggtcgccatctcgatgtctgaacgaagccctcgcttctgccgattcggctctcttgtcgatggggtctgtgaagataggtgtttcattggcgagagctagaatatcgagaatatcgagggtgcatgaacgatcgatagaagcgaggacgatccgggcttgggcggggtcgagaggaaacttcagcatgcgggaaccagtgggtgtcaagtgaagtgttttatcaagcgcgccaagcccgtagagggtcatgagagactcggtaactggcaaaagaataagcatataagctcgagattttaattgtcaaatactcgaaagactaggaagagaactcactgaaatcaggatgaggcatatcaaggaacccaaacgactgaacatcgtccacaccaatctccttcaactgaagaacaacacttgacagattcgttctgagaatctctggtagaggggcggcagacattttcttgtatgtttggctggtgtacagcctgtagcagaaaccaggaccctgtattggtgaaaacggaaagagtcagttgagaacaagcaagcatagacagcaatctccatgaagggcgaacctctcgaccggctcgacccgttctctgttgggcagcagactggctaaccagcttgagagaaagtgtttcaatacctgagtgggaggtgaaagacgctccagatacagaattagccaagtgtaaccagcatgcagtcatctaatggaaagagacgaaccggtccctcgtctgctgagatagtttttttctttacaaactccagtgtcgatgacatacttgattcctgggatcgtgatcgatgtctccgccacatttgtcgccagaatgaccttccgggtccgggcaggggcaggctggaaaactcgagcttgatccaggggggaagtagaagccatgaaaggcaagaccagcacctagtggatgtcaaagagggggaaacgaagtgtcagagttggaaagcgcaacagagttatcccgcgaaagatgcagcccacgttttgatagtggcgttccaattggttggatagaaatttgatttgctgagccaggttatcgatatcctcttgacctgtgagttccagtgaacacggagaagaaaacgagtttgcagacgtaagctaagcgcgtcggatgtggaattacataagaatgaggagaagaaacgtacccgaaaggaagataaggacatctccatcaggcctagcggtatgtatctggaagaaagtccggacggcgaggtcctcgtattgatctgaatcttcttcggtatgatatatcttgactggatgctgtcgaccccgaacataaaggatagggcaactgattgtcatcaaaaaagagattctatgagcatgatgtctgcgaaaagatactttgtacatatttcagaaaaaagcgatgagaagaatacgaaactgattgaaaaatgtagaaaacctctcggcgtccaacgtggcactcatcacgatgaccttgaggggcacttgaggatttccagagtcatccgtcgcgccaggcgcatttcgtattttttgaatctcgcgaagggagccgagaaggatgtctgtcgatatgttgcgctcgtgtgcttcatcgataatgatggctgagtattgtctttattatatgaaattgattaattaagcagtgctaagaatgatcagcgagctggctcagtctaaagttagtgaactgtggtacccttacgatagcatagggtccccgagaagttctctaacaagcataccatcggtacagtagaccaaccgggttgccggtccgactactgtgtcgaatctgacgctgtgtccaactcgttgtccgaccttggtaccctgttcagcggcaactcgggtagcaagggatagagcggcgactcgtctaggctgggtcactgctatccgaggtgggcgaggggtggaaggtgtgttgggaaagagggtaagtagaaactgaggaacctgagtggtctttccactaccggtttctcccaggatgaccacagtgtcgttttcttttacagccttctgaatagcctcctgacctgtttcgttgacgttatcagaattgagcacacacacacacacaca

SEQ ID NO: 786 - DNA, 17729 bp, Xanthophyllomyces dendrorhous
cacacacacacacacacacacagatatctacgataatcagagcacagtaattgggaacgaaccagaccaaatagggagctctgctctctcctttgccagtctctccctctcctctcgaagtcgcttgccctctccatgatcccgtttgctgagagtcttgcccttcttgccaacggtctcgaaaccggatgcatcgatgtccaagtgtgcagactcttgtcgcttccttttgttggacgacgtgctggttgagtttcctcctcccagagggaacggaagatcgatttcctcgtcagatgcctgaaaatcgactaccttgaaggccttctgtttctctgtctctgctaaaacggccgtcggtataggggcagtcttgggagtggtctgtttaatagaatcctgtgctggtggttgcggatcgtcgtcgaatgtaaactttgtgtatgccatctctgatcagattgcaggtagggtatatatgagtgtatattggtgtgcgtgcgtgcgtatatgagtgtgtatgtgcgatgcttgctccgttgctcctccaatacaaataactgaccgagctggatggacgatgtaggtatcaattctaccggcagcatgggcaaatgaaaatcctaggcagacccggttagtcacccgaaacatcgtctgagaagccttgctcaggagaacctgaggcaagcagcattcattcatccattcatccatcaagcatccatccatcgtcgtgaatcctggtggtatagtccgtctgggtctttcgtttaaaggacaggtcaaaagaggagagccgtttctttctcaccctccattctttccggatctcgccctcggtctttcttcaaacatctttccaagttcagttcagatgagtgacggtcaggtaagtaaacaagaagcatgccttctcttgcccacctgtttcttcattggtgtcccttcgagctgggtggactgtttttgagcaagccatcgaactacctagagcatgcggcgtttcacgcaagagctctctgtccaagacggtttgccgagtcctatggacccaaactcagacgccccgatattctcacttgcgccgccgagctgagccaacgaaatctgagacattcggacttgcatccttctgttgtgcgcaatgctcgaccatgtatgctgatcatactgtgtactcttttcgtcatctgctgttctccaactatacatctgtgtccatcatgacatatcctcctccccccagccggatggactggtgccgttgccacgtctaccccctcggtcgaaagcccgtctcgcgcttgggaattcaccgtccggatcgtcaacaccggtgtttcattcgacccactcgtcccgagacgatgtcgtccacatccatatcgatgaccacgacagcgttgtcgatgaaggaaagattgtggatatccataacaatgacggtcgtttggtagaatccgcgaatctgtcccctccgttgtcgtcaccttcatctgcctcctctgtctcttctttacaggttcggtcttcaccagagattccctcgcctgcagaatggaagtttccaacatctgttccggtgcactcttcttcgcctgacctggctagcaaacgatcgtctatccagtccactttcgtccctctctcgcccgagatcgatccgtccggtccggtcccaaagcgaccagcttcttccggtgtttacacccctgccagctttccaggtccctccggatcagcccgccggctgtccactccgtctaccaacaaggttgagcctaacgacgccgtacgcccgccgctgtccacttcaggctcatcttcattcttcgccagaagtcgatcatacttggcgtacatcaacccctcatcctacctgggcccttcatcggtcgatacttcccaagcgccttccgcgcttgcctctgatttgccctcagcacagccagccgccctcggcaaaggctcaatctcaccttctggtgtctatacgccagtcagctaccacgaacagcaaattcggatcgcttctcgaaatcttacagatccggcggtgggcagtgcatttggaggaccagctggtttcccattactctcgcctagaatcatcagcccctcccgaggttccatctcgacttccccttctgatcccatcggctctggcttcttcagtcagactgaccaaggtccgctagattaccgagctcgcgccagttcagttgaatcgtctctatctgttgaagaatccccattgcgggttaagaaaaagacttccaacatcgccagaaagcctcttcctgctacccttcatgccgacaaggaaggagaacccgccgtggattccggcccggaaatttcatccgttcagaatgaactggcctccagctcggtcccttctccgccctcgtctgatagtagcaagccggttcacctcggcgggagtcagatcacagaatctaagcccgttgtcgagctcacggccacttccgagataccacccgttgttcttccctctcaccctgatcctttggaaggagtggggatgagtttgttacctaacaaggagatgaggccgatggaggttgatcgaccgacagaagagatggtagtcggcagggtatggtagagtttggggggttgtctttctttacttttcttttctctattttccttcggctagatttacgtttgtatttcattctagatattggcgaacaaggaggaggcatgctttctgttcttttctttcattttcatctctgcttgtactatggaatatgctctcacaaggccgtctttacactccttcttgctttccctttccctttaaattaatttctcataatttgacctttttttttttttggtgtcctcacatccttgtttgtaaacctattcaaactcaatcagtaggctagtcagtcggcggaagacttctttctttgtttcttaccttttcggatccctctcttcttcaccccccaagtgtttcttgctttgcgggtgcacctctccttctccgtttcttctcaacctacatcatcttcttttcgactcttctttctcttatcgttattattattattattgccatcatcaccaagtttctttaccttgtctctttctcttgatctttctccttttgcctatacatcaaccaagatccttcgtgtacctgcgtccctgactccatctgtgtagcttttattcgacgttctgatactatctcttatctcaagccctcgtactcgtgtctcgtttcttgtgaacctgctctggattgcaaacccttgcgtgatcaaaacgtttcgtcctgaaagataccaagctttcgtcgtccatcgagatgcagtgacgtgacgtgaggtgacgggatgatttccgaacggaagttgaatcgttcatcaggatcaaaagaaatcttgtaaagaaagaaaacacttgccgaagggaaggccagagagagccaaagacaacaaaggacgtagagatcggaacagagaatcgagagggacatttatcgatttggagtcagcaccagtcatgtaacctagagccgtcctagtagtatggatagagggatgtacttcgtatgttcacgacaaggcttgatggaaacgaatgagatcaaatgagattagttgaagatgaagtgtatgaatgcatgaccaaactgtagagttgtagaaacgaagaactgtagatatgtaaaacaaatagatgtggtcgatagaaactagatacttgattaaaaagaagagagaagaggagaggcgaaaataaagatggacggctgagatacaacgtatattcgatcatgagaaatgataaaatctagtcatcagatgaatttccgtattgttcgtagatcacgaaacgaagcgcaattatgccatagctggagattaggcttgtacaagagggtggacggaaagaacagaatggagtttctggtgtgatgcagtaaaagaccagagggagagaggagttagggagggccaaaaggtgaagacgctgccgatcgccttctccagggcacgaacacaaactcagctgatcgtttgagcagactgcgttggtcgttcaagaccttgtttcccctcccggtgctcatcctccccttcggtgtcgtcctccccactgccgaaactgcgtatactgcccaacttgggcctcatgccttctatcccgtgacgagattgatatggagggatcgcatcgttcgcgctggatcgacgacccggtctgtcatccgccgacagctttcctattcctgtccctgacgagacggatctcaaccgaggctctctcgacgaattgttggacaccattgtctgatcggattgacgtctcagcccagaagacggggaggtccttctatcatgggagccggacgctgccgagagagaaggttgaaagttgagagtgttggcaggaagggacccccgtctcactgctagatccgagggcgggggatgcctgcgaagggctgatgatgtcgaggcgaacatgcctgcttggggggtgataggtgaatgagaggcagcagtagatgagtcacgagtcgagacagatgcagagctgaccgagtgggaagctagtgccgggtgattcagtaacgacggagggatcggaccggacgtgatcgacggttggaaacgttgactgatgagaggaggatggaaatgagtctgggaacctcgtctattagaccgaaggacgaacgaggttgaagggggaactggggattgagactctgggatggctgtcgatgttcgttgatggttattgaaagacgatgccctagagagatacggcggaggggacgaagctgggagactctgtctgcggcttttgttgaaagtgggcacagccgaggttgaaatagcggtcgcgaaaggggaagtggtcggatggagatattccaaaggagccatgggagacaccgggtgagacgctgcggaataggacgaatcttcttcgttcccggtcgacgatagagaggagaaggaagaagaagaggaggtcgacggaagaagaacagcactggatgtggtcattacgttcggtaacgagatcgaacctcttctgtctgtcggtgctggaactggttgcggcctgattgggatttgcaagctgcgactggtgctggctccttgttggtcccgtccggaatgacttgagtaataggagttttcccttgtgaattctgggtattcaaacttttcccgttcggcaatcggcgtgccaggacactggttgattgggtctccgttcgcgtccaatggagcatagactggagatggattgaccatgtccccgtccaagtcgtttgagtctgacgcatcccagcttggagtgaatgatgtggacgtctgtgcggacgtcctctgaggaagacaatacgacgggaaggacgatggaggaaagacaggggtagctctttgagtagaaagagacgaagaagacgacgaggacgaggaagggccagggatggacccaaaggcgctaccacctccgaaggagaacgaggtgagggagttgatgatggcctcggtatctgagtcgacaaacatcggcaacgttggagtcgaaagtggagagtcagcgagtgtctcccggtcgtccgaggaggatgacatgatgtttgagtatctgttgtagtgctttttgtttttcttccgaccaagtatctgcgagcaagaaaaaagccaccgagaagagaagaaagaaagacgaggaaaaaagagtccagagatgaacaacaggaacacgatattcctttcaagatctgatgactgaccagtaggacgactcgaactctacacagaccgtttgagcaagttccaactcccgatagtgatggtgtagctttcggtctctgctttcttgtcgccactgacgatgacggacggtgaagaggatcgggaatatcaatgttgacccaaaagcgatggggagagaagtaaggcggagaaaaaaaaattgattagggaaatcgcctgatggattaacaatttgtgtaatcagaaagtgtaacgggagcaatataggaaaatatagtcagagcaagccgcagcagtgtgccctgaaattctgggcctgcggtctagaatcacacgtgtccgggcagttaggcagttcggcagtcaggtagtcaggctgcccggaaggccggcaacccggccgatagatcgatcaagcggacgggtttccacagaccacgtaaacgtgtagatctctcttgtgaatgatatcatcactttgccttctcgtacgagatagaatcaacattatgatacttgaaacactagtacaacctattaacacagacggacaaagatctcgttttgggtgcgttcttgttgaggacaattcagagccgtcgtctagaagaagtgggcagagatgcaagaaggaaagaaaagaaaagaaaagagaggcaaggtagagagaccgaagaagagagatagagaaaagaaatggatataagtatgaatgatattgaaaacctcaatcgtttttgaccttgtcgaactgagtaaccctcgtgccgtccgatagtgtgtccaccctagagaccaacttataattgcccaatctcggtaacaacactcgccacacgaaccaccacacaatgcccatcgcaaacacggcaataccaatgatagggtagagccagtaaggaagaggaggggtgtctccgattccgcctggcggtcgcaggaacggtgcgacgagtaagaaacaagcggccgccatgaagaacacggccaccggcaaccaaaccttgaacggtcggttgatattggggtatttccatcggaggtagaataggccaacaacgacgagcaaattgatgatctgaccaggatatccttcgatatccaaaataaagttgtatgcgattcctggcggaggggcaaggatgacgatgacagaaggaatcaaatgaacgatcaatcctgcgaacggagagccgaacggccagttgctagccagtgctttcgaccaggggagaattccttccttggcgagttcctggttgactctgctctgtgcgaacgtcacggtgatgacatttcctaaggccgatagcgcgacgaacacagagaccgctttctttgcttgggcgttgaacacaactccgaagaattgagaggcgacagtgagggatgtagtcttgagagtcgctacaggtgtcgcagcaaagtaggcaatgttggcaaacaggtagaaaaagaagcacaacgtcaacccggctggaccggcgatcttcaacgttcggaccggattcttgacttcgttcaacaccaaagccgagttcgaccagccagagtaactgttaaggaccttgaagatcgcggaggcgaacctgaatgtaagagaaagagagcgttcgatagtttcgttagagcctcaaaactaaccaagcaggagaaagaggaaaggaatgagaactaacgcataagaactcgaactggtgccctcaaaggagtttcggaagctagaatggggatccgcgacttttgtctttgagattccgccgcccaagacaacccagccagtgacgacgacgaaggacaaaagggcgatcttgactatcgtcaggaagttcatcaccttgattccgaagccgggtcgaatggtgtgaagcgcagtgacaaagactggaggggggacgaccgtaaaaggaagacaaaatatatcagcatgatgccattgggaaaagtaccggaaggatcaaggatgaacgaagaggaaggacaaacaaatgacaccgacggcaattcctcgagcattccattgactggcggtaacgccagcagcggtcagaatattgtttgcaaacacaatacatcccgactggttgatgcattcatcacacaaatcgcatcagaacgcctatatcgaacttgttgtgatcaattccaagagagagagaaaactaacagcagtgaaaccaagaaagatggcattgacggcaaagaggatggtcatcaagtattttgggtttttgtacgctgcctccaggtaaaccttttctcctccactccgaggaaacatgcagccgagctctgtgaacgagggggggggggaaagtaagtatggatcgtgtgtagaggcgcgcgcgcacgtgacattcgtagatgtcaaaagatatgatacacatacctatccagacaagaagaccagacattgagaggagatacccgaagacccctagaatggacgaaattagagcagacgacagagtttcctcgcctcatcagcaagagcgccggcgcatgaaacaaggggcgtaggctaagactcacataagcagagggctgctccgggtgagccgacacctttgaggatggtggctggagtagaaaagataccggtaccaatgatcctaccgacgacaaggagctaaaagcaaggatgcagatggaagggaaggtgagtatcaaggactatacagaggcttatcggtcgaaaggcgggcagagtcgaacaatagaaaagagaaaatagacggaaaagataagagacagtttgcgcaccgtggtagagaccaagccgagatgacggcccaagccgccctggatagaatcatcgaaaccgagttgaccgttatgaatggcattccctgcactatcgagttcggatacatgaatgtctgtaagaactttctcgtcgacgatcccatccttttcatcggtgtaagacgcctgggagcctgtgggactcgccgacgccggggctgaatttgctcgtccgaagagagtcatcggcaaaagtgtgaaagaggaaagaggaagtggatggtggtatgaggaaaggacacgaaaagaaccccttccaagtgatcaaaggcaatgatatgtgttcagacgatgaagagagaagaggatgggaaaagcaacgggaacgagaacgggtcgtcagactttataagactgctaactaaaagggattgcatctctcatggcttcgaagatcaacattcttgctcatattcctacttcggttcctgctcctgttgcgacaaataaaaaaagaaaggtttgtcccaactgaatcggagaacccagctcagcagcagcagaggtgaggtctgacagactgagaagcctacagaagagcgaaggcataaggcatagataagagtttgagatcacaactagcacagaagcttgcacgccataagatctcatcaaacaggtggtgggtatttatagattgtagtcgacatgtagtctgacgtgctttctctattaactctcgactgatcaacatattattcctctgtatccgttgattaatgacatgtccaacatggtacaccagacgacggtcgaccgggcacagcacatagggtgcttgatggataggcgaccgacttaactcaggcgtacatatgactgggcgggcaagtgatcaaccaactggacgaaagtagagaggatacgcaggcttgggtttcccggctatgaattttagtcaccttctggtaacggtctaacctgccgatgtatgtgtttgtatgtgtgagagtgtggcactcgaggcttttccgttggataacatatatcattcagttctctcatcaaagccatgcctccgttgccttcacctcagaccaaacatcagagcttgatcgtgagctcttccaaagggttgcttagctattctggctttctattcttttctttctttttttctttcgttttcttgttttttctccatcttgtttcttctttgctcttccattgtgatgtatcttttgtgttgataccaatgccattctcccatacaaatacaatcaggattacccgctgagcacgtcgatcaaccttcgactgagtcaatctcagcaaaattcattccccacaacgggaacaaccctatggctatccgcacaggtactctccgcgtatttgatggacacctacaacacgggcaaacaaggaaaacctaaacggtgtattgagctcggggcaggcgttggcctcgttgggttcgttctctcaccgtttgaaagctcgccaaattttcttgtggaggagatttattttgttttatttcccttttttatttttatttttattcacctcatttgaattcttatcctatctaatcgcattttttcatatctctcctattcacactccccttgcagcctaaccctcgccagtctgtcgttcgatgtcgtcatgacggatatcccattcgtccttcagtcggttttactacccaacatccgacggagcaaaccgcttttcgcaccgtgcccggcttctgacgatccctcctcagctcccacgccatcttccgatcgtccgacgcaaggaggttctgtcgtaggcagagaattggattggacagtcgatccggccgattggaattgggtcgagaacccatcaagtgtcaccagtcaatgggtcgatccttcgagcgtcacctctgtcggaacatgttctaccagatttagtcccgccccggctggaccgccgttcgatctgattctcacaacggatacgatctatctaccgtcactcctacctcatttgttgaaaacactcaaaacgctctcctctctgtctggccatccaccgatcttgttggcactcgaacgaagggatccagctttggtcgaccggtctctggatgagtttctcaatgcgggcttcgaggcaaagatggtcaacaaagggaggttgaaaaagtcggtcgacagacatcttggctgggccaaaagtgattgggatggcgtcgaggtttggaagtttcgctataaaaaattagaatgaacgttgtatctgtaatttttgccttcctttctccgtcttcctcgttcgaccggttttttttttccttgtcttttcggacaagtcacgtccgtctttagaggttcatttctatagaacaatcttccttttcttttcccacaatcagatgacacacattgccaatctactgtccacacttccagaactgttcaagaacagacggcacaataaagtggatagttgtcagcgcgcgagtccaaacgctttcacttttacaatcaaggagagacagaaaactgacgcaaatatctccatcgacaatctcgtagagctttccctgctgtcgctgcttaccagcagccttcaccgcggtctcggttccgtactcctggagatcagcatatgaaaagatctctccacacacgaacttctgctcgaaatcagagtggatcactccggcggcagcgggcgccttgataccctgctgaactgtccatgctcgaacctcctgaggaccacacgtgaagtatcggattaagctagaatgaggagagaccgggtcaagcgttagttgatcaacctttgtgtgaaacaattgatcgctcatttgcaaaatgagagatttctcttatcagactcacttcaacgaggcgtaaccggcggtggtgctataagaatgggaagaaatcagaatatatcagtctccgttcaacgagactagacaacctctcccaagcacaaaacactcacatctttcccaaaccaggggtagcacccttggccttggccttctcaagaccgagagactcgagctcggctccctgctcctcgaagctcatggtggccaatcgctcctcgagcgcaaccgagaacggaattaacaaatctcccgggttgttctcgtcaatccatcccttgatcttggggagccacttgttcttctttcggatgtaatccctctccgacaagttgaccaagtagataaccggcttggcggtcaacaactggagctcgttaatagtgtcaatctccttcggcgtccacgttccctttcggacgtctcgcttgtcggcagcgagcaaatcaagaaccttctggcaggtgaccaattcctccttcttggccttgtcggcaagagaggtactgcctgctccacgagcgaccttctgcttggccgcgattgccttctccatccagtcgatatccttcaatcgaagctcgttctggatgatcgccatgtctctcaacgggtcgacatctccctcgacgtgaatgacctcggcgtcgtcgaacgctcggacaacctggaagataccatcgcaagctcgaacgtgggacaagaaagcgtttccgagaccggctccggtagaggcacctagtcgagttgaatcgacgggtatctcacgattagattcacagtgctcggtcaaaatttttcgaggcacatgatagacacttaccagcagtaagaccagcgatatccacgcaggtcaagaaaggaggaaccactgacttgggcttgaacacatccgtcagccaatcgaatcgagcgtcggggacagggattcgggctatcaggaaggaaggaggaatggaaatgtagataagaacatgctcgatcattaaatattttctcgccaaattgacacctactctcttcaggatcactatggaaataaacgaagaattaatggttcaaagaaagaggtgagcatgcgaagatgaatgagcgaacgatcaaacgaggcgcaaagacgtacatggtagcgtaggggaagttggcggcctttccaagatctatgttgtgcgatcaaattgaaatcagcatgggaaagctacttggaggtttgggcgtccagattttcacgcgatctttatgaacgaaccagactgggaaagcacgttgctacaaacgattgaaagacaaacagcatacagtcagtagcaggcaaatgaagtcttgatgatatgtgctgacgcccgactcacaagaaagaggattttccaacgttggggagacctaaagttgtggaggatggacagacagagcgagtgtatcagtcaagatgtctcgacaagatactcgtcgatggtgaaacgctaggtaaggtgaaccatagactcaccaacgatacccatcttcaagctgaaagacgaagaatgaatttggcaaaagacagtagtgaggcaggtacattcgtcagctttaattctgcacaatcaggccattatctccagtcaaactgaaccagaaggtgcagaacgacgactagaaaagcagaagaaaacgagcaaaagacatagatacaaggagaagaagaaaaaagatgagacgcaacttgtttccgggtcgaccgaggatcgactttttctcaggggcggcggctttcttgggaggcatctttcctttctttttaaagcaggcgagagaggtagagaacgttcggattgaactgggagtgacgtagggctgatagaatgtgaagactagtcttgtagacgagtggttcattcaaacctgaaagttgatgagcgttgagaacgaggaagaatgaccggaaggaaggctgaaggctgaaggagggaaaaaaacgagcgagtggttacaacgtgagagctgtgcgtcgtagatccgcacatgactgtggcgctcagcctcggtggctcataacagtactctgttcgaatcaatcccagaagaatccttggcttgaaagaaaggaaaaatccagcgcatacgagtgaaggagagattgagtgcacgatcaatgcatgcaccgttctcccttgatgtcacccatgacgcaaagaggaacaagcgaacatataggagcaaggatcgatagaaggctggctgcagaccaagctacctccaaatcacgtgaccccgatgctgtagcccagtctgtccagcctcccctcccttgcggcacggaatggttacgctcgccctcgcctgctcttactccgcctcgctttcgcccccagctcgtcttgtttctctcaactccctccgtttcgtttagagccgtctttctttggttctatatctccttcctttcctttcgtttccttcctttttcatcctggtacatacacacacagatacactcaatcacagctccttccagccatgcgtcttgtccttcttcttacctttttcactctcctcgcttggaacgttcaggccggtgttgtcaccatgacccttccttgtttgtgttctcctttcgtttttgattcttatcacaattggacatactcaaccaacaatgctaacgtactcatgtgggggatccgttttactctgtgacttcgcttctcgttccttcttcttcttccatcatcgccaggggatcagggagatactgtacgaactcgtcagctttctcacaacaatgaacttacagccctgctaacgacgtgtttactctgctctcaatagatcatcgtgtcgatgactacgaatgcgaacggcgtcgcacaaactgctacgtaggtatcctcgaacaggaattgacataccatactcagtgtgccgagaagcttatcatctcgttcattgctttattttcagcgtgtcaaccttgacctctggtgctgcggcagatgcgacaaccagcaagtatgtgttcttctatcatgtgttttttatttatttatgtgtttcctcaagcgatcagcacaaagagacgatgctgacgtttccatatttcaaaactctcacgaactttttctcaaaagatcaaccactgctaaaactactaccgctgccgccgctacaaaaacctcttcgaccaaggccacgacaacgggcacctcgactcagactaccacctctgcaaccatcgccaccactgttctcactgcctctggtgtcacagtaacgatcgagtccggaacaaccatggattacgcagcattctccagtattgtcgctcctagtttagaggccgcatacagcgctaccgcatccagctctggtacggttctgttctctggctgtgtctgaaagggtcgatgaacagagcccttttcttgttgatagcaaattactgacatatcttgtcctggcgtgcacatcccttgctttagctctgcgccagtctggattgtcttcgttcccagttgtcctctctgtctgtttggccgtcgtgggaggagcctttggtggtatcggactgttcatttagatatcatctctagctcttctctgttcctttcgctctttttcatctctcatcataatccgccggcggactcttctcttctttcgtatcaactcttgtcttccttttctctcgccggacgctttcaattctcctatccctttctccactgatttgcctttcataatctttctcagcaaaatgcattgcccagagtcatcaggcttgtcgaatcatagagactgttttccataagtgatctccagttctgtttcgaccactgtctcgcctactcccctcatcaaactcctcattttctattaactcacctctatgatacccattcgttctggcgcatcataactctcttgtgtttttccttctcattcgctctcccatacttcatccgatctgatacatagtatttgtcctgtgcgagccaactgtgaattcatgatgttgctatgttcttcggtttcacattagacaatcgcatctagtcagcttttgcttgaacagaactcaaataaagaatcatagaagagaagaaggaagcaagcctggatgcttggccgttggtcgttgttacgtcccccccttggcgttttgtcgcggcgacggttcatttccttatagacgccatcccatccggttgaatccttgcctccaaccgcactcgtccaccttcgaccatacaccctgctcgtttctcatccatcccttgaatatctatcttctcctctcaggtgctcttgctcagataaccaaaaagaatattaaagagtgaaagcatagccatgcgtctttctaccggtttactcacactgcttgtctcggcagcgaccatgttgcaggtcagcggacaggtcttgatcactagtacacttccgtccgtccatccttttcctcattttttccctcttctcaaacgaggttcatcgttctgaggatggatctggttgtcagatcgaaggactgatcttctgactctttgctgtgtctttctatattcttgttgggaatcatgtgtttctctcgctctctttctctctcggatcaacgttttcatccgtccgggtctgctatgcttgcttgggtcctgcccatcagctatgcgtgagtcgtttcgcttgcttaggcttacactgctccccgtgtcgatctagaatggagaaggcaaacccaggtgtgatggttgggtgggtatgttggaaaatatgttgaaaggttgactgacctaatagtgttttcgttctacccgacgtctgcttctcatggcgaatagcgatggggataccgtaagttcttgaataatttgtgcatcgtcatgtcttgctttcattcctaattgaagagaactaattcaaagcactctgatggtcggcatgcatttttaggtcgcgtactccgccactacgaacgcacttggagccacgacttgttcgttcttcaagtttctcaaacaatacctgcttcaactctatacctaatctctcacatttcctttcaaatggattcaaaccacagatgtttctatcagtaccatcaccgccacagggaccgcaacctccactactaggagctcttcctcctcggcttcgagaacgacggccgcgaccaccactgcgaccaccacggccaccactactcctgttagtacacgttcattctgggattgaatagaagaaacatcatgctcactttacttgtggattggttttggatttaatgttgtaaagagggtggttggtcaagactcgacggtggccgtcgtgtcgactacgtgcgtatagcttttccgttcgtgaaaaagatgatctcttgagaagcatcctttctgatctgtcggccttacagcttccaatatacaactaccaacgctgctggagaaaggacggtccgcacttccgtgtttgtccctgtgagtggtttcatctgagcagtgtcactataggatgtatgctccttttccttggtactgaaccgccgtttctcgctacacgatcagacctttccgcccacattggttcccgctgagccttcgtctggaactcaatatgactactcggagtacatctcccttgtaggaccctcaatctcggctgcagtcgaggcggcgagcaccggtacatctggtgctggaaaaacacagatgtctgccttgtttggagttgctggcgttgtgctcggtgggctttggacgttcatggcatgaggagccagccacggccgttgcgtgtttttgattgtgttgtgtctatatccctctttccctcctgttcccctttttgttgttttcctcttctgagtcttatttctttctatctaccctcgagcaactacatcctctcttaactttttcaatcctaccattatcgtttatatatatatacacataacctagttcgcctttccatcagtttgtttcacttgtgtcgctcattcttcttttactctcttctcactctcttcttattctttccttattcttttgagtgttgcttccaattctgttgtcgtccggagtcgtgtgcgcagactccacggataatattccccatggaccatccttgttctctcataatgttgtgcgttccattgaatacatgcttgttgtcttcggaaatgatcctggtatcatccagtgaattaaatacatgagcaaagagcaaaagaaacgacatgtccagacaaaaagataagcgaatagaatgtcggtcgacttgaaatgacaaaaagctcggcggagctctcctcgccatcgccatcatcagtt

SEQ ID NO: 787 - DNA, 31220 bp, Xanthophyllomyces dendrorhous
tcctctcttcttctttctctcatcatggcaaacaacccaccgatgccttccactcgatcggctcttccgttgtcttctctgacatccacttcttactcaacccatccgtcggtgtcgtcatccctgtcaaattcatcatcggcacagcgcccatcatcctcacctcctcattcgactcatggtgcatcatcctcgccccctctcgaggcagaaaaatcccaagtgccgataggagctactacgctcagatacctcaatccgtccatggtggctggtgcaggagcaggcttgatctctagcgtggtcacttgcccgttggacgtcgtcaaaacaagattgcaggctcaacatctcgggaaaggacaggtgggctacgagggagtctacagttcgttatccttcctcttttctcttcctgcattcgtctctgtcatctagtctatctctcgtcttctttttcgcctcgtgtcgtcaccttgagcgtatctgtctgctggagtatctttcgtgttcggcagagtcgttcgtgatctgtggaagggaaatggggaggagaacattcggtctaggccgttggggcttatgagaggagcaggtataaggactgggaatgaataggctcaccctccttttgatagactgtgggcctcctatcagcatgccttttagaaaggacgttaaaaccaccatgctctcgcagccattcctttagaaagacctcgacgtcctcttcaaactttcccaaactgcctcctttcggatgagtcaactaatatcatttcgttctctgtctctcggtttctttatccactctcggacttcaggtacatttcgaacgatcgctcgacagtctggtctcaaaggcttttaccgaggtctgggaccgacggttctcggatatctgcccacttgggccatttactttagcgtttatgatgaagtaaaaagccggctgaggcatgctaacccggatggtctgaatggagagagagtcaaaggttagtcattctggctcattctccatcgcaaacttcctcgtttatctttcttcatggttgcaagactcgattttattgagctgatcagtttttttttccttcaaaccgatgcttgattatccttgatgacgcgacgcgttgacttgcagaatcaatctggatacatatagtagcagccatgatggcaggagggaccggcacattagctaccaatccgctttgggtgatcaaaactcggttcatggttcgttctcctcactgcttcccgaatgatgtccccttatccatcacgttcgatcccttttctgatctttttcggttgatgttcaaccacatatccatcaaaggcacaatctgtcaaagacccaaatcagaaacgatacaaacacacgctggacgcaattctcaccatatataaacaagagggcatgcgtggattctatagaggattgacgcctagtctgatgggtgtgagtcatgtagcggttcatttcccgttgtacgaacaactcaaatattgggccagtgagtctttcatgttcctttgatccttctgcgagctttgagcgcaatccgaccagagtcagccgactcctggtaagcgctcgcgaataaaacaaaagaaatagcaaatatctgatttgtgcatcgattttcatcgccgtcgcttgttttctctcaaacacaggtgaacatcaaccgaacgatctagactcgacgctatctccttcagtcattctcatctgttctgcgctctcaaagattgtggctagcgtgaccacttacccgcacgaagttcttcgcacaagacttcaaatacagagaacacactccccgcccccgtcatcaacaagcgcatcagcttcaacctcacgatctcctgctgaaaacacttcgtcatccaggtcttcatttaatcaaccatatcacgtccgttctggtggtgctcttggggtcagacaaggtgatccaggcgccggatcggcttataaaggattgtggaggacaataagtcagataagaaaggagagtggttggtccggcttctatagaggattgagtatcaatctggtcaggaccgtgccggccagcgcagtgacaatgttgacgtgagtttgtttcaatcttggttgcttgtgttgatatagaaagaaagaaagaaagtaaaacattagcttaccccttgtctccttttttttaccctctcggtggtcagatatgaactcatcatgcgatacctgacgcacctgcccgacccataggactcaagtcgctccctaacatccaacttttcatctcgtttcgattgacatcctacgcctctcagatcttatcatcatctacgtctcttgcctaatctcgtgcatcattccaatactcctcttcaaacctcactagaaaaagaaccaagaaagtcgaagcgctgtctgttcttgttctcctcgccctctggcattcgttgttccataaatcttccgcttcttcctcttctgcttttgggacccctcgcatgttggcttccacggattattcaaacaatgaatgagaagatcaaggatgggaacgagagcgcctcttaaagaccaaacgtcgcctttgctcttgcgttcaattttgatttttcgcttcgctgctcgtttatattcgatattttactttcagatagattttctttttttttcttccttccttcttcagcaaaggctttcgcataccccctcgctatccttctttcgcttttctttctcgacatttcgtctcgacatccatctttccgaaactactcccgtttttctcttttaaagactacctcttacctacccatagatagataaaaggggggagaccatccgtcttcctcgataaattccttttctcttgttttcttcggcttcttgtttcttgctttgggccatgtttcttgcttctctatcatctctccctcatcttttctttttcctttcctttcatgttttgttatggatgtactgatattctgcataccatttctaagccctcagtacttcgatctgattagtctttggccatgtccgttacgtcacaagcgcgcaacagtttaagcggggaagacattaatacacactaggagaagatcgaagagccagagggatgcatacagtgtagtcaaacacatcgatagaggagaatagatcgaactgaggggagatcatcagactgactcaagatctatcaagcagagagcttgctttcccagccagtcctcgttgaatagtctcaagaacagctgatcgctattcaaaaagagaacatgtaaacgaggccggaagaacttgaagatcagctttttctctcgctgatgagcgaatgtacagagaaacgatagaaggattcgtacgttcgataaactcaggtcgtaagcttccagcttctctgtagcagcccgatggatctcgatacgttccttggtatgttgaaccatctattcaagtaaaggggttgctttcatcaatcatgacctctagattgacgtcgatcaaacagagaggaaatatgagaggagctactttctgcgcgagtgaatcgaaccgagtacttaggtctgcatcatcgatcaaaagcccatgaccggaagaagaacgacaagacagagatatgaacaaatttggccgaattttaaatccaatcgaagggtcttgagagcataccttttcctcgggtttcccattgctccgccgttagagtctcttgcgcgtacttatccttcatcttttcgtacgcctcaccgatcttgcctcccttgagcatgaccagctggaccagtaatggaagggatggatcaatttcaactccactgtggtgcctgtgtgcatgttgagcggtttcatgggtgtgtgttaggtcgaaggaacggcttgacatgcgtacagaattggttgatcgatggtcgtccgagctaaatatgggatgacctcggtatgtgttctgtgtatgtgtgtgtgcaagttcgccgaatatttgtcaagtcctgttacagtactacctcaggttaagagagaaacaaaggacgatttcaaacctcgatgtcgtcttcaaatcgaccttcagcaatgtcctcttctgtatgatcgaacttggcttttcctctaaatccgtgttgtctttcgtccagttcgacatcttcgtcgaccgatcgccctctatacgcttcttcatccgcttggtccttcttgtcttggaacatcaatagttgctcggctccaagttgcataaacatgtcgtcctcgtcatcctcatcgaatattccagccggaaggccctcgtggtctcggcgcacagcgtaaggagttttaccgaattgaacaccccctgtttcctggtgcatatatccgtcttcggaaagcgagtagtcatcctcgatgtcaggagacaattgattattaagacggcggctatcttgcgtcttgatcgcatatgaatgaggactagaccgagggtttgagataggtgtcatcggcggcggtggttggatcgcccgtcgatgagcgagacgcatactcttatgttggaaatcctctccgatcaaagggtctgttgaaaaatgtaagctcggcctgatgacgggtttggcaccttttgaaacgatcgaagacacagatgcagaggacgactgtatctgagcagactgatgaacgaccgatgcccgatcattggcaggagttgatagcgacagctcctggcgggccgtccctccttgcggcgtcaaagagattgagaaaggtttgatgttctgggtctctttttgagccacgaggcaactagaaggggatccagagtcaggaatttcgaagagcctagctcgggaagaacgtccttcaacttggtcctcggcaggtctttttcgggatgaagaagacagcatgccactgagacctttaggcgtcgaccgaaatggcctttctggcagaggtttaatagaggaagagggaggcatgaacgtggcgatcgtggttgttgttgtagtttgaaggtagattctgagttgttcccaagaatggaataagatcccttagcaagtttagaagagatcaagatatcaagatagtacttactgtgaccgagaaagatgctcgttcataggcgaatgagaacgctgatggccactctatgagataaatactgatcaaacagctgatagaagtgtcttctggacagaagctctccggtatcctgagcagataattggaatctatctcgatcaatactctttgatggtgagtagaggatgagccagaggtgtatgtcaaccgtaaacacgtatggataaagcatgaaactcggttgacaggaaatggttcatttctttctgtcagtctatttttagcattgaaagtgaaaaaaggaacgacaagccaacatttcatgactagaatacatgcacatctaaagatcgcaaagcagaaggtaaacaaagataacccgttccacttgctatggctgacagtggaagggaaggcggcgcaactatcgatagatatacacatgcgcatatacccttgcatagccctaaaggcatccgcgacccgtaacctaactgagcgactcaatgaacgcctaagcaggccgtctagctatcgatcggtcgacagaagtatcggtaaggacaaggaagtgctggaaaagatgttagacgctatatccctggccgatggatggtagaacaaggtctgcaactgtgccggcgttctgttccatggataaaacggtcaatatagaatttcacaagacagccgatgaagatctatccgtacaagtctgggatcgagcggatctcttcgggatctgttggttctgagtgaaagtgcaagcgtcccgtccaatctttgcgctcaacttctgctcgaatatcggcccaaagagaacgcccgacgcctctgatatgaacctcgccggcaaaggtatgctccaagtcggtcggcctgacccgccaaccagcttgtttgatgatagccgtcctttggtcccatggattaagggacgggccgccgtctccgtctataggtgcgctcactagcggagcaaaatacaattcaagcaccaagctggacgacggcacgcgagcgggcagaaagaaggtcggctgaggtgttctggtgtaatgaggattcgggtgatcggctggagtggagaccaaatggaaaaacgttcgatcaaaagtgatccgacggagggatccgttttgatacaacggcttgagcatagactggaacgcgtatagcttcctgagggtcaaacgatgatggacttccgatcgatcgacgtgatctatgcgtgaggtagacgtcggatacataggtccgaaccaaaggtctgttggttcgacgcatctcagcagcctagtcaagatcccctttgttgaaggcggatgggattcgatgatagaagccgtccattcggccatatctgatttttgctgagcgaactgaaggactcgaagtgaaggcaggaccgaacgaacgtcgcttagatgaggcccgagacggtgccattcgatatcagtcaccggaatatctctatccatcgacacggccagatggcggacctttcgaagggcgtcagtcttgaggtgagggatggctccctcgcggtgatcgatggaaagaaacgcgattaggtcggtcggtctccgaagaagaacggtgtgatagcaaacgggtatgaaagcatggtaccattcggacgagactagtaaagcagagacgaaatttgagggagtatatgtcaagataagagtgagcagtgggttgatggataataccttgtgtgctgcctggaacgatttgaccgaagaagagctgccgatagccttctctttgaccgcaggtttggctggaagatcgataagacgaagcatctcgaccggatgtatggtgacaacaatgctggcaacgaggatgctggcggagaaagagtgaggaagtctagacgctggcctgttagggttactgccgagtcaccagggcgctgacccggtcttggctccggggatagactggctctcgagccggcccgatgagtgatcgcagtcattgccgagagagcgaattaattatggccgagagcgagacgatcgtcattgactcgaagcgggacaggcacaagcaaggccgggcaggtacaattgaggccggacagacgtgtaaacgcgcttggctcggccctcggcccgtcacttgcagcatcactggcgcttggaagctcgatagatgattgtttacacatatctgatttgtcggtcattacttatctactctacattcggatccgtcctgtttggccggctacacgcgtgcgcttgttgacgcttacagtgtgtcgtcttttcatgtacaaaggtcgaaccttctttttaacttcctttttcttcttgactttttaccaccgaccaagaatatatctttcgatcttggtgtcttcttcatccttgcatcgagtcctctcttttgattttctatatccgccgaccaatcgacaaggccaaaacaagaacacctttggataatagacattaacactaccaccaccagcactactgccgtcaccaccgtcgctaccaatactaccaacaccaaagcttccaccttttcattcatcgcctcttatccgtggtctcgtcctcttcatatccttcgtccttcatgaagtctatgacggaagagaaaactctgtctgaaaaagactcaaacgccatatccaacccgacgaaacccagccgatggtcccgtcatactagagcggtcgacccgaagagtgctgttgtcggtggtggagaggccgcagcggctatcgcgatggacgaatccaccgctgctgtcgacccgaaaaagaaagaccagaagaaagtcagcttgttgaagctattcaggtcagagccatcttcgccatctctgttgtagccacaaacaagtctctcactcttgcctctatcgatctcaacatgttctttccttctataacgggacgtttcatccttcacaggtttgccactacaaaggaagtggtgctcaatataatcggactcatctgtgctggtgaggcttacaatcttttaattatgagcagaccgaattgagacccatcactggttgtgtttcaacttctgcttctcttgtggcctcttattaccgtttttctttttgggctcacttattacattgatctgttgaccgggtctacatagccgcggctggagccacccagcctctcatgactttaattttcggtacgctcacagattcttacgagccttctcattttgagacagaatactagttccaggcaaacccttaacggatcgatcttttgctttttgttaaatgcaggtaaactcactggatccttcgtcggattcgctaccactcttcagaaaattgcctctagccccgacgggataactcccgccctccaggctgaactctcggcagcccgtaagtagcagagtcaactcgtttaaagggttccttgagacttaaatctgatttccggcgcttcatcttctttctgtcgggagaacagagtctgttgtgaaatccgcttctgccaaagatgctttgtggcttacactgattggaatcgtgagttctattcaaacctctttgctgtgcaaatacaccatcggcactggtcctgactcttcatcggctctgtctcttgatgtatcatacagggcatgtttatcaccacctacgcatttgttcgtttatttttgacatatctatctattgtcaagcttgctcacaatcttctattcttgtgttcacagatggctatttttgtctttaccggagagcttaattcaaagagacttcgggagcgctactatcaagccgttcttcgccaggacgttgcctggtttgataccgttggagctggagaaatcgcgacgaggattcaaaccgatactcatcttgtccaagagggaacgagtgaaaaggtcccacaggccctcagctacatctctactttcttcacagggtatatttaacattcattcatgtctgttcagtgcctggcatgcttggctgacaattactttatctggtttcttggtttcagtttcatccttgcctatgctcgatcctggaggctttctttggccctaacatccatgatgccatgcatcatgctcgtcgggtgagtctatcttcctgatcaaactggctcctaagagattttacgtgtgagcttttgttgacggctaattcctactctgcgttctattcggtgttgaagagtcttcatgggaaagtttgctaccaaatacaaaaccaatcagttgacatgcgttgccgaggccggatctctggctgaagaggttatctccaccatccgaaccgctcaagctttctccacacagaagactttggcagccctgttcgacagtcacatgtacgtactatgttcaactctttgtactctatcgcatcaaatcgggtatctgatatatgcttgtcttgcgcatcttcgcttttcatgatattcggcttgttccgtagaataaaatctcgaatggatggatacaaacaggcagtcagtcacggttgcgctatcggggcaatgtgtacgttcgctttctcaacgatcacttcatctcctagacgttggagattagatcattgacagactgatcattcgttgggttttggatttatctagtctttatcatctatgctgctgtgagtggaaatcgagttggtatgtcgagtttgcgaagtgtaagaacctgatcaatcaactccttttatatcacaatagtatgcgctcgccttcgcttttggttcgttgacttctttctaaaatcagtcattgattgctgagaccaacgaggcttatcttatgtcttgtctcgtgtatctttattgtgccttcgtcaaaataataataattaggtggagttctgatcactgaaggccgagccagcgctgaaatcgttgtcaacgttttcatgtccatcttgattggatccttctctcttgtcatggttagtgctccgtattttctctggaatctggagtttaaccagcggtacatcgagtgttctaatattgctctgcatttgcaaccatgctagttgaatcctgaagtacaagctatgaacaacggtcagtcgatttgcgcactctatcttcttgatcataatcagtttatcgacatgcagctaaaatctcatctttcacttttgcagctatgggagcggctgctaagttgtacgagaccatcgatcgggtgcctgagatcgactcgctcagtgaggaggggcttcgaccagacagctgcatagggcacatttctttcgaaaacgtccagtttcattaccccagccgacctggagtccctatcttgaagggacttagtgtggttagtttcttctgtttgtgtcatcaaagaagtttttgtgatgagaaacaaataactaaggaactttcttgtgttacgtgactttaggaattcccggccggaaagacagcggcgcttgtcggaagctctggtagtggaaaatctacggtgagtcggtcataacagagttcaccggggtgtccttcggctgagttctttccctggtcgagtaatgctgacgaatatgtgaggatctgattatcacaggttgtatccctggtcgaacggttctacgatcctgtcgccggagtcgtcaaactggacgggagggacatcaagacgttgaacttgcgatggctgcgacagcaaatcggtcttgtctctcaagaacccgtcttgttcgcgacgagcgtccgtcagaatattgagtatgggttcatcggatctgcctttgagaactactcgcctgaagagaagtttgctctcgtcaaggaggctgccatcaaggccaacgccgacggtttcatctctgccttgcctgagggatacgatactatcgtcggagaacgaggaatgcttctttctggaggacagaagcagcgggtggcgatcgctcgagctatcgtatctgacccaaagattcttctcctagacgaggctacatccgctctggacacactctccgagggtattgttcaggatgccttggacaaggctgctgccggccgaacgaccatcactatcgcccaccgactgtctactgtcatcgatgccaagaagatccttgtcatgggccaaggcgagatccttgagcagggaactcataacgagcttctcgcctctgatgggtcgtatgccaagctagtccttgctcaaaagctcgcagctgcggacgaggaagaggatggtgaggctgatacaaccgggtcctctactcttgagaagggttctgcctctcctctagagaaagagcaaaacgagaaaccccttggactccagcgaagccataccggagggcagtctgtatcatctcaagtgttggctaacaagcgggaagagagaacaaggagtgtcaaaattctgccctaccgaacgattcttgctcgacttgcggtgatcaacaggggtcacaaatggttttacgtcattggattcatctgttccatcctgagtggttgtgtctatcccgcgttcggtatcttgtacggtcaggcgctcaacaacttcagtgccgactcaaacaagaagattcgcgacacctcttaccgaaccgccctctggttctttatcatggccattctatccggtattatcatcgcagctcagaactacaccttggtccatgcttcggaagggctcacaggaaaaatccgttcaatgtcgttcaaggcgatcttgcgatctgacattgcctggtttgatgaggaaaagaactcgactggtgctctcacctcttccctctctgataacgcccagaaagtcaacggacttgctggtacgacgctcggaacaattattcagtcgatcgctacaattatcagtggatgcatcattggtctgatttacggttggaagttggctcttattggaatcgcctggtgagtagctcgacaccttcgagtttttcttttgccgttgtcatatcactcatctcgatatgtttttagtattcccttgatcatctccgcgggttatatccgacttcaaatcgtcgtactcaaggacgagaagaacaaagccttgcacgagagcagtgcccaattggcttgcgagtcggcaggtgccatccgaacggtcgctagtctcaacagggaacaacaggcatgcgacgcctactcgcattctcttcttgagcctcttcaggcagccaagaagagtcttttagcttccaatgcattgtacgctgtgtcacaagccatgtctttgtgggttattgcgctcgtgttcttcattggaagtagatggatcgcagagtacgtatcaaagtgtttatacatccatcacatatctggttctcaacttggctaaaaccatgtcttcttttacacttcgaagcctttcatacacgactcagtctttcttcactacgtaagttcaaagttttgatgcaaagttgccaatttgtactgagcatttaaatattcacggccggcactgtctctagtcttatgagtgtggtattcggatgtatccaagccggaaatgtgagttttgtctacatcacgttgatatggagtctagccaccgtactgatttctttgttccttcttgttcaggttttctcttttgtgccagatatctcgcaagcccagtccgctgcctctaatttcctccacttgatcgattcccgccccgagatcgatgccgagtctacggaaggcaagatccttgatcgtgccaacgtcaaaggccacatccggttctcgaacatccacttccgataccctacccgaccaggcgttcgagtactgagagatcttgatcttgagattgagcctggaacgtattgtgcttttgttggtgcttctggttgtggaaagtcgacttctatccaactggcttgcagattctacgacccactgtgagtttttcacaatttgttttgtcaagccgcatggttcatttgtgattcgagtctgacctctgttgaatgactctagttccggagaagtcactcttgatggggtgcctctgcatgagctcaacgtcaacagtttccgatcgaacatcgctttagtgtctcaggagcctacgctatacgctggtaccatccggttcaacattcttttgggagcaaacaagcctcacgaggaggttactcaggaggagatcgaaagggcttgtgcaagcgccaatatcttggagtttatctcgacgctgcctgacggattcgacacccaggtcggaggaaagggagcccaattgagtggtggtcagaaacagcgaatcgccatcgcccgagcattaattcgaaacccaaaagtgctgcttctcgacgaagccactagtgcgcttgattctacgtctgagaaggtcgttcaagctgcgttggataatgccgcgaagggccgaactacgatcgctatcgctcatcggctgagcacgatccagaaggctgatcgaatctttttcttcaaggatggtcgagtgtctgaagcgggaactcatcaagaactcctcgctctgcagggaggctacgccgagcttgttcaaatgcagatgctctcgaaatcatcatgatcctgtagtttcgttttctttccttacctgggcacgttctatctcaatgatatgctctccctttttcttcccttttgtcacctctggtctcttggattattttttttacctcacgtttgattctgcttagactttttgttgaccagataatcagatcggcctttatattatactatcatactttcatctttctcgacgtcctgttgccagactgtattggatgattcattttttttttaaattgaatttctcattctggtttggtctacactgtcagcgcaatgagagcagacatggttatgcgagtctaccgacaatatcttttgattaagaatagtatagaattcttaagaagtaaacaaaaatgtcgaactgtgtaatattcatttgtcaatcttccgtttcgcatgcttacagaactcttcaatcctcgacacatacgtacctttacccatctcaacaaagctttctcttcaagttttccaagagccactatggttgtctccaagtacatggacgctgaagtgatttccatctttgtttcgcccgttgccgaacattctcttgtgttctgaatgaccgctactgattctgaatttaaccattgggtatctatcgtttttctccgtgtgcctggcttgattgtaaacaaaatggacgatatcatcttatcgaaaggatttagcagcacttataaaatctgaatcttcagctaccgttgagaagaaatacgcgatcgttgatgtgagagatagcgacttccgagtaagcatcctttttgccttacacgttctttctgggccatcaatgcggaatctcatcttttcgaggacatctgcatcaatccgttttcggaaacactttagggaggtaatattcctgggtgttttagacttccttcgagagaggcgaatgctgaaaagtacgcacagctagccgttgagttgaaggacaaggagcatgtcgtgtttcattgcgtcatgtcccaagttcggtgagttcccactttggcttcatctcccaactttatctatacattatttcccaaaaagacaatcacctacccctgaagaacaatgcagacaacaagaccatcagctgactgacaagatgttgtgttcgttgcctttggaattttatcagaggtccgaaggctgcaacgaggtacgccgaggcattggctaaagcctacccggaatcgaaacaagaggttcatatacttcgagaaggttttgctgggttccaaagcaaatatcgagtatgttctctttcttcttctttttcttctctttgttcattctttccttcgacatgattgagtagactcggaacgagtgatacgctagattaaactgaatgccgaactgatggatcttcgatctcaaatgtctcgtttgaatctttcagaaagacccagaattagtagaaaagttcataaaagctgcctgggattgaaacggtcgttcatgaggtcctgttttcttgggttcaggaccaaccttttccttctttctcatctctttttagattatagatagacccaagatgtatatgtactctcccctcttctttttgttggaaacggtcgcatgaatagcttgagtgctcgcgtacaatcatgtccagctttaggtacttcaaaacttgccaaatttttacttttgttgatcgaaagaccgcacagtttgatggtgtcctggtttcatttatggaagaaagaagcaacaaaaaggacaactaatgcaagatgattgaggatgcagaagatgattatgaatgggatattgacggttgtatgaacattggaatttgtgagcaaagtgtagtatgcgcaagagcacgtaagggatgtatcgatgtataaagagatatgaaacggtttttaggagataggctaaaagaccgaagtataaaaattaaatttaggtcaaagaaagaaggaagggaaggaagagatgatgggttcaaactcgaccccaaaatcccttcagaagcaagtatcgagacgcgaacatgatagctgtaccagccaacacaaaacttccggtaaagccagctacggagagatacgatccggttttcgtcagaatgctgtttgataatttcataagggaatgaaaaaaataatcaaagatgacaaagaaagacgaattgtcaataaaggttgtttgtttggacaacgagtgattgaagcgaattgaaaaaaaaaccaaagagacgtacgctccagagatgggcggtccaatcaaagcagcgagagatagacaagtggtcaacgttcccattcgacgcccaatgtcgaatgtctctccaagttgagccacaccgggactgaatagagaaacgaaggagccacagaagatccctactcataacgaagaggaaagaaaagatcaatgaaaactaattaaacactaggaaagagaaagaaagtcaggtaagaaccgaacggaccatagatgatagcgaatgcgatcaatgcgcctttcgtagtacaatacggccaggcaaacatctatgtccatcaaacaaatccaccagattaagatttatcttctcactttttctctgtactggacaaagagagctaagaaggaacaggcaaactcaccagacaaccggccagcatagaagcaggggccagcaggttgattggtccgaccttatctgcaaagaacccagggacaagtcttccgataacactcgatgcgttagagatggagatcaggtaagtcgagaaatttcctaatccttgggatcgacccatgacatctagcagtccgaggagaaaagaaaaagctgattaattaggaaaccaaaagctgatagaaacgtcgatatcctgataaacaacgacgaaagaagggacatacccaaataagatagaggagtgtagagcccaaccatgatcagccagcagcctaagacatatagactacaagacagtgttcaagttagtatctcagagtctttaccgatcgatgtaaaggggaggacttgcctgaaagcgggccgtttgaatgctgcgaaattaaatatccctccagacatgttcttaggtggtaatctaggtctcaatgtctgatcccaccgggataaacgttttgcatcagtggtagatacattcagttaaaacatagagtcagtaagatggcttccaatgaaatcgatgaaaagcaaggagacagactaacgagccaagcaaatccaatggaaaccatgatgatgaaaccacaaactctcaatgtccatttgaaaccaatcagaggaatacactgccggatcaagattgggtaagctgttcctccgatactcgatccacaggcaacgacaccgtaggccaacgatcgccgcttattgaaccagtgggataggatagcgagcgcaggtccaaacaagacaccggcggagagaccctgatagttgccagccgattatgccatgggtgccgcatattggatcggcaagaagaagaaaggtcagtttcaggcaacgaacgtgaattgcgagaataaacaggctgtgtgtagataaaatatggagagagaggaacgaacaagtaaaataccttgacagagcaaggcctgatagtattcatgcgtttctgcaatgagaaagacgctaacgacgtaaagaacacatcctatagtgaacggcacaaagtgcttcccgatgtccatcagacgacccatgatgaccgctggaaggaagatcagacagtactgtggcgacaaggttagagacgtgacgatggcaaacaagcatgcaggtcataccaagcaatgtatgcgatcagtctacttgatccggatacagcgcgatacatacatactgacactcacctgggcggaaccaacccacgcgattgctgaggatgtttggttagataggtttattgattgataatactcctgaatagtgaaagaaatttccaaaacgactggtcagaaaagactctttacttgcggtcttagcagcctgcaatagatcatggtgcaatacatcaagacatacttgaaagactccccacgagtttgtgaaaccaaaggtcgacatcgtgcacataagagctccggcgacagcgagccaggcccttagacccccatctggaaaggtcaggacttcaccatccgaacactcttcctttgagatttcaggtaagttgtcgtccagctccgtcgtatcaaattgggcctcttccggtttgcccttgacttcgggctcgatctctgcagacgagaaaccgacctcatggataggttttttgcagggatcggccagggtgtggcaagtaaccgaagaagcggtccggattggagaagaatgaaccgaggaggaagagcaagagaaagctgcaggcggatcatcggagggacggaaagacatgttgaaaaatcgtgaaggtatgctattctcttcccttctttctctcctctgtcttttcctatgatttcttcctttccctctaccttgacagacttatattctgatggtgttagtataccggaccgtggaacgacgagtgaagaaggatgctggttaagaaaatcaacttgtttagtcacaaggttcgaatttccaccgcttactgacgggcctgataggagaactccggtgacatccggccgaaaatgcatgtaatccggcggaggaaagtgatcatcggcattacccgctcgatgccatcaggtcaactagcctttcattcataagcttcatcttgagcagtcgaactttcatgtgtgtacactatttgagtaaaaaggagacagtgtttcatatggaacacgaggtgcatagagacatcaataaatcgaaacgcaagacatttctcaattgatcaagccacaggcatgcctcgggcgacttttgaaaagatctagaaacccggaaaagagatcatgccgaaagagaaagaatcagtctttgatggaagaacaaaacacttctatgactcagtcgtacctcggtgaacactgctggctcctgggcaccagaaacggcgtatttgttgtcgattaccgtaaacggcacacccgagattcccatcgtcgacgatttcagcacctcctgctgaacctctttcaacaattcatcagactctaagaatcgaagggcctaaggaaaaaaaatgtcgaacccagatgagaagagagtattagaaccgttgagggagaagagaaagccgatcggtgagcgtcacatgatacacaaaacatacctcttccgtggtctcaaagaccttggaggccacagcttcttgagcaagccaagcgtggtctcctacgtttttctcattttcaaaataaccctacagagagaatagagagaaacggccgaccaacataatactgtcaatggtgggtctacaatcattgagagaaagcaagcagatcgcatggatctctatgattgtaccttgaagattcgattgataaggtcgagctgcatatcctgtccatttttaagatatgccttactgatgagtcggtgggagctggtcgtttgactgatatctccaccatatgagcttgattgccagaatgtcagatgtcaaacatgtttgttagtgaaagccttgaggaagcaaataatgaagaaagtgaacgtatgagcaaagagaacatacaagttgattccacattccttgcctttgtccttcatcattttgatcatgccatccactcgttcggctgagccaaacttctcgatatatacacctcgcttgttctttggactctttgatgcatttggatcaagtaagaatggatggaacctatggatcacgggaaaaaagagaagaagaagcgatggttcaataacctgaggaagaaggctcaacagaaaaaaacataacaagggatgaaggaaaaagaactcaactggatagaaaagtcaacatccgggctatcggctttgactttctcgatcgcctgctcgatcttccgaaatccgctacacgacaaaaagggaagaacagagcctagagaatcagtttcttcaactgcttgatagatatatgatcgtgttgagcttacagactgatgtaaaacgattacgagaggagcatgggaagtgattagtcagagatataaatttgggcatagaccaaacagaaagatcgactgactagcagaacggacagacggctgtgtgcgttttgatagatccgaatcaagaactcaagacgacatcagcatttggccttcgtgaactgatgggtcgatcatgcagagtagaaagaagaaagaagaaagaagaaaaacgatgaataagaacaacttatgatgactaacagtctgaggtgatatctagcttgataactttgttagtcatggttctggctgtatgaaaactagcgtgatagatagatcttgctctaaagcggagagaggtgaggcgatggaaggcaagaatgatggcgatgtttgaaaggttgttaaaaagattgtcgaggtgattgtcaagatgatttttgggatgagagtttatatactagacatcatcggtcgaatggatgagaacaccgagattagataagaactttttagctgagtcagcctccacgtcggaccaagccttcttcatacccgtcttcctacacacaactccgttgacgattcaaccttcatcatccatcctccattcttttggttctgtcatgtcgaatagctcatcctcagaatcactcaacactcaaatacttcatatcaagggttcggtcgaatgctcacatccagcttgccatcttcatgatttccttccgataaaggttcgtctgggctgctttgtattcccacgttgccaccacacaagctcgtgctgatacactatttgtcatacgtttacctcgttgaatcaaaacaaaataaagtgtcccggatgtctccttctgttctgcactcctcatcactctcccttccattcgtccacctcgggtcatccttgctcgtccccaccacccgaccgtacaccgattccttgtccgctttgccagcttccgatcagcacaaatccaggtgaggatccgaacgttcggatggatgttcatatgggcagtaaagagtgcagcgagaatatacttcagaagggaagagccgagaaagagattatcaggtcaagaaaagagaggggcgagctttgcttcaataaaggttgcaagaagacggttcagggtgggttgggcgtcaaatgcgaggttagtcttgtctttgtggtcttcttctttttttctttttctttttctttatccaaccactttccatgctcaccggttccaaattccttcccattaaatctgaagacttgtaaaagatcatattgccacccacatcgattcccttcctctcactcgtgttctactatcgtgcctcaggcagcacagaaacttccgtcaaacacccgatcgatccttggaggtccatctcgagaagccgcgctggcagccatcaagcgggctaacctatccggaaaaacaagttcgaagccttcgtctacgccgaaaccggtgattgttcaaaaaccggatccgaagccattgtcatcaaaagaaaaggacgtcaacccgaacgagcagaaaaccaaaataaagccaataacaaacccgttgagcgctacctcaaggtaaacacactaattcctctttctttcttgcattccttcgttcatcgttttgcacgcgaccggcttggaattactgttcgtctattccttgttcgatggttgtcctctgcatatgcaacaggcaaaaatcgagttgcaaccttgaatcttactggatgtttgcttctgtttcccgactcttcaccaggcatacaaaggcagaatcttcctctcgacgtcaggctctcgctaacagggctcgactaggaatcctcaacgaggaggaaaagctgatgtgggcggaaatggtcggtcaagaagagcgggaccggcgcaaatctggcggaaagtcgaaggaaaagggatgcgttgtatgctgaggggaatagatgagatgtcaatacagagctcttgtgaatgtagatgtataccctgcttgttcgcttgctttccatgtctctggtatatgtacttgcgaatatcccggctcaaccttcctggttacactcatggttacacacacgtgtccaaatcgtcatcactccgactgtcccgtccccaaaagcttcgcttggccaatgacttcttattcattcaactatctaccaactacgatctcatcaagacacaatcagtcttccacgctcgatacatacacatacacactcattcatacttacctaagctgacatggcgttcacaacgcttctcttccagtcgcttgccatggggatatcatctttcctagtcggattggtcccaatgctcctcggttcgacaaacggttaggcaggttcttgatactcgtgttcatggagtggttgaaggacaaagatattgatatcacaaatacgacctcatgtcgtttctttgtatccatcgagacatgtaggtaaacgactgaggttcttgtcggtttacggaatgggattgctggtcggcgcggcgttgagtgttgtcatcccagagtatgttatcagtctgtctcagcccggcctcgcacaagatagtatggacggaagctttgtgggctgaagctcttcattgtttacacacgtactctactgttcggttgactggctgaacgaaccttcttttcgtgcccatagaggagtatcaacaatatatgacgcaacatcgcttgtgtctgctaccgtaggagatcacgatggagatgacaccgtcgaaggtcagagtcaggtcatcggaatgtctctcttaggaggcttcatccttatgatgatgtaagctgtgaaccctgtaaccttcttcaacacccagttatgaatcgagacacctgacacctcgttttcattattgcgtttgtgtggttctggcgtgttatattcagagtcgagaaagtgtctcactctctgaccacccgatctgctcaaaactcccatgcatacacaccagtacccccgaacgtacgtcagtcgtcctcttctccactcattttacctccatcacgtccgccaacttggcaccgactttcgcaccgggcatcgaaccatgacctacaattaaatcagcaggtacccgaagatgacaggtttgatgaagaagtggatgaagccttgatgtctcaggcatcgagctcgccaagaagactatcaggtaccgctgttctaggaggacccagtttgggagggtcagggtccacaggaaacgagaaatctggtctcgtcaggctagttatgagggatcacccaaagagtttttcggcaacgcttgctttggtcattcatagtctcgctgacggagttgcgttgggagcaagcgcaaggagttctcaagccggaagtggtcttgggctcgttatttttgccgctatctttgttcacaagagtaagtgtcttcatatttcttcagcaatcctaatccacaagctcacctgaggttcctttggtgtcaatgctctttcttctccgtttcatagttccggcatccgttggattatgtacaaccctcctctccgatcacctccctcggccactcatccggacatgcattgccctcttcgcttccgccgctcctctcggagcgtttctcacctacactttagtcactcaaatttcaaaaggagaagatgacgttgcctctttgacatactggaccggagtgcttctcttaatatcaggtgggacgttcttatacgtcgctaccgtcatacaagatctcagccatggacattcccacgaaacatttcaagcagagggccaaacacagacagggacaggagcaggagatgatggaaacttatcaaatccggggacggaagagctgggctctatggcagcgcttgcgacgattgttttcggaatggtcactccccttttgttgtcacagatgagagaatgagaccaggatgtgttattcctttttctatttcgttatccctctttttcctctccaaaacaatttaaattaatttatcaccctttgggattttagatagtgcacttttttgtgatactctagtcaagtgatacattctttctaacttgaaggtcttctgtttttctaaaacatctgctcgcgatcctatacctttggccttaagcgaggtatttcttgaaccaagcaaacgttgcttccgcacttgccaactctgccttcacaccatccaatgcatgtccttcgcctttgaaaacgaggcattcaaccgcaagttccggaatccgatcttcttccaacaatgtacgattataggtcttgatttgatgggatcttgatcgtagggcgtggtaccatccctgttgtgtttatcatgtgttcacaaaaatgatcagtcctctgtgctgacgagttgtatttcctggaagaaaaaagggaaataacaggaaaaatacgagccttggtctgactaggaggaactctttgatccgagtcacccatcaagatcaaactaggcgctttgacattgtgcgcgttcccgatcggagatctcgattgaaggaatttgtactggtcgactgtaggcgtcgtctgtggtcgatcgtctttggaggagagagagaacgggagacctagctcggcgtagacccttaatttccgtttcggttccgaagttttccgttacaaggtggattgatcaattgtgaagagatgttttcggcgttagggatatcttttaagcgtataggtaaacaatgaatcgaaaataggcctcaccagtctggtatatcagatgtacccgcattctcgccaaggctgattacagggtttcggaggatcgccgcatgaaacgcgtccggatactttgaagtcagatgagcagtgaggaacctaattcagatgcgaaacgagcatgtttggttatgtattaagaggatacagaaagagtgcttgtgttgaagatcagacataccctccatgagaaccgcccatgataccgctatcctcaaaacaggaagaagttgcatcgtcagacaaaacaacgtgttggaatgaccaactagttgatggatggactcacatctttggctttgtttctccttccgcctgtgcatctcctaacatcctctcgacagcctcccaacaatctcgtatatccatctgtccacattcccccaccaacgcttgtgcccacttctctccgtagcctagactaccggtataattcaccaaataaatttcgtacccttcttggacaagcgcagctgctaaagggctgaaggccgtggtagtggttgagtgaggtcctccatgaatgctcaagagtcttattcctgaagactgagttgagttagatgaaggtcggaatctaatcgtttctactgggtgggtaagtttgataatgtccacacgggctatcatcaccaaagaacaaaatcgtaaaagtatcatacttggtcagaccatcgcacacatcattcacgagaaagaaaagatctctagatgaaagctcaccgtcactgtccagtttgaaaccaccttctacaccattcaagatctggagttctaaatcaccctcatcatcaggcgttatctgtccgaccacaacctcttgtgggtccatcagcccgctacggaccaaacacacccttgtttctgcgtcggtacctaaaaccgaccagctgttcaatccctctcttgtcaactcgacagggttggatcgaatgcctttgcctgacacgtccagtgggattgcatatacagtcgacctggaccgcttgatagacgtcaacacaataaacggctcgttcgtattcaagaacgggaaagcaggtaaagcctggacataaagacctgggaaggcgtcttttgactctggatcccatacaggaccgacaagaacatcatcatcgtcacgctcttctttttcggtcttgctaatcagagagaggttacttaagtgctgaaggtgcagggaggcgcatgagttatgagcaccaccaagtgggttggataggtacaccaaaatatctggtttgttcacttttgatcgatccaatactctaggcgatcgcgcacttcggtctgacccagagatccgggtcatatctgatagagaagcgccttcgtaggttgaagtcagagatcccgaagatggaggaggaggaacagggatggtccagatctctgctcgtctgttcgtgcaatagacgatcccgagccttcgaccgtcttccattgttccataccctgtagccagcactagctttctttctccattcatcatggccaacactggttgaccaaaggagattgtctcatccaaagaagcgctcacaaccgggacaacgttgagagatatttctgtctttggtgagatattcgctgaacagtagaagatcgtggggaatgtgttcttggcgttcagttctccccaggtgggcgtgaacttatgttgatcaaatggagacagatcggatgtttgggaaggtgagagtctatgagcggtaaagacgagagaaaggatgcctgtgtctgtttgagtttcgtcgtaatacagtcttggaggcccccaggtttctgatatgattcagtccattgaacccacgtacggtcagctaataacttggcgagcaacaagcgagagagtgcttgacaagaaaaaaagaaaaaaatagggaactaaccgtctgataggaagtcaccacagatatccgtgagaatcctctcagcattcctcctacctgtccgaacatcccaaagctccaaaaccctcctctcctttccgtctaccgtgtcgactttgaagcacgccctccagaacccatcgtccgagaatatttctatcgtccctttcggaagatcgacacttggaacgttcagccccttgctggactcgaatggcacttgtaccgtcttgacttgggtaattcgggtgttgtacacgtgggaacgtacttgagtcgttagatggagataatcgggggtgaagaattggccagacttgaacgttgggagttcagctaggagtttgtaggccgatagattaggtcgaggctcgctgtccatggttgcaaaagatgtaattcaacctttaaaaggcgtgttcgttggagaatcgttgaacgagcaggcgatggttaaaagtagaagagaagatgaaggatgttgtgcacagatgaagatccacgctggccattcttcggtcatctccgtctttccctgcctgactccgcttgacgacgatctaacctctgacgactctttcagtctcaaatgattagagtcgagtaagaactaccaagcaataaggtttacttttgacagaaaggatcgagtgaccaggagactcttggatagtcggtatattagaatgtaggaaagaagaaaagcaaaggataaaactgaatcatgaaaaagatcaggaggaacgagtgggatttgtagaacaaaaacgtgggaataaacttcgtcaaacgaatggctacaaataagggaaagaagaagttggaaaaaggttcgtttatagaatcagaggcgtttgatgctaaaaaggagaaagaatctggtgtaggccgatgcgttcgagattggcaggagagatatgaggaaattgaaagagagggaaaagcgatgatgaagtccattggtctagaaatcggttagaagaaaaaaagaacgggaaaacaaaaacggaggaaacaagggtatgtgtttacgatacatgggatgaaagagaagcaaaaagaagaacaggaaggagaggagaaagcagtcgtcaggagagagggatagaatatcaccaagggaagcaatcgaggggcatgtagccacatcttaagcgtttctcggtcgaccggtgaatcctccgagttcgacgtcctctcttgaggaataacccgcgccggtaagtttctctcgttcgttctggtcttgaagggcctgggtggctgtggccgggtcggcgatacctgtccgagtaccccaaccggtctgtaagaggaaagataacgcaatgcataagaaaagctctggatcatgccaaacgagaaatgtacagatagagacacacctcgtgtaacgtgaacacggcgtagatcttcatgatcgcgctatgaagcaggacatagaaaggaaatgacaaggatgagttcaaggtcaggtcatttagaaagaagatttgcaaaggagatcggacaacgacgtacaagtaataaccgaacagaatccaagcaggaacataaatagcgtcttgaggtcggtaccacaaatgaggaagcagcttgagacttcgagtagctgttagccaaacaatatactgaatcgtccggtatgaagagaaagtaaagagacgatcagaagatcagcgatagaaatctaaacgcgtaagaactcaagaagcttcacgaacagacacaatgatgttcctgttcaagagatgaaacccaagattgaagtccacatggtcagtcttcgaagatgacacaaaggaaaggataaggagaggaaaaaaacttaccaggctggcagatgatatcctccatcttcagtattcttagtactcttgacgatgatgacgattaccagacaaggtcccagaagcaatgtcaacggattgatgaacttgtcgatcatagtataagcgacgtaaggatgttttgtccaaatataacgctccgtgaagatcgacctgaagtctgaccgccaggtgtttctcgtccatctcaatacttgcttgaggaatcgccaattaggtttcatcgtggaaagtaattctgcttctttgcaagcctggatgtacgtgttccaaccatgggaaaccatccacctggtgaggaacttgtcgtctcccgagttcaaatggtatttccctaaccaaagatcgttggtgaacccatggagaaactctggatccttcagaatgactgttcgataagcggccgtcctaccagataaacatggtactccaccatcgatatgggtcgaagcagagatctctatgttcctaatcgtcaacctgaaagccgccagaacctcccacattgtcatcttgttacccaccggttggaccctctgggacgtcccgactccaccaacctgttggtcttcgaaacaggccaacacataaggcaacaaagttgggggccagatcgcatcgtcatctgcaaacaagatgatgtccgtcgtgcagttcctgatcccatgagacatttgcaaacgcttgttcgcaaacgggaccgttaaaaccttgattttctccggattgacctcgttcgccaaatcctgcaaaggtcctctcatagattcctcggtgatgatcaagatctctttcggatttccgacgagccaagagtgggcagcttctttgaattcttcaccagcatcgatggtgggtacaatgatagtgacgtcttcggaggcaacgtacgtcgggttttcaggtaatgggatcggagaatacgtccatgtagcgatcagtcggatcatgtaccataggtaccggtagaaactattcaaacaacgtgtcagagaatacaacgagcatgatagtataagtaaaataacatttgcaaaggtgcgaaccaatcgaaccagatcaaagtatgccaacggcacaatggagaacagaatgaaaaggaaaggaacacttacccaataacaccgaatggaacgactgaaagatgatacagacagacgaagaatccaaaattaggcgaatgaaacaaaaggttgagtaaacataagcagaaacagaagtaaatacagaagagagtaagaagaactcgagtgaaacttgcaggaaggatagaaagtaaggaggtgacttacacactggaaagtcatctgcagtcaggtacctgccaccaagaggaaaatcaacattttcaaacattcgtcagtctatccagtcatcacctcaatgacgagagaggagagagccaacagggcagcaggacttgagaagaccaaggtagactctcaaagaaacttgacatccacaacacgacgagggtgacgataaagatcatgcggaacacctgcatactgcaacagaagaaaacaagaaggaatagactcacaacatcgtttatcgactgtcggattttcagaattgtgaaagaacgtggaaaagaacaatagaagaggaagagaacaggaacgaatggatagaatagagaagaaaagacggtgggagccgaaagacagaggcagagacgaaacaataaggtcctttttggcctgcctagaagataggaccacggagcagctatgtatgagagtgagagctcggacgaggtatccttgcgatgacgaccggatcaagagtggcaagatcaggattctcttctgtgttaacgatcctctaagcgagtgcgagctacgaggatgagggtgagggtgaggatgtaggtgaaggtgaaggtgtcaaagacagaatagagtcggataggtcgaggaaaaaatcgaaaatcgaaaatcgccaaaacaagacactgcgggcgtgtgtttactcatattcatacagttatcaggcttgatcgtctacaatatgactatattacaccatccttcagaccttatgtacttcttttctccgtgttcaaacgtttctcttccgttcctctttcccaccatccttttcgaggccagtagctctccaaccacctagcgatccgttcaacggcctataaaatgtgtacaaatcatatgttttcgatccgtcagttcttgaacccatgcgcttggggaatccgcacagtaatgcactagatcaaactgacttcgtcttgttgccatagaacaccttcgacatcatcattcaataccaagctagactgatgaccggaaaagagagaaatgtttcagaaaaaaaatcagtcagaccagtcataacaatgagaggtagcatgaagcagaaaacggaaagtcgaccagctataaattagattaagaacgcacgacaggatgagcctccattcgctcagctagtgcatccatctcttcggtgaaatgaatcatgccgaactctgatgagaccttgcctattaatcaagaacggaaaaaatgggtactttgcattcagctttgtctgtctttatcgatttgcaaggggcaactgtccgggagacaacgagagaggcttaccttggctatattgatatctggccaacaatctcagacaccacgtccttacatcaatctctatcggtttatccatctccggctctgtatctgcttctgtctctgtatctgcttctgtctccatatctgcctctatctccatatctgcgctagaacgtatctctgtccgcagtttgggcgatgatgatgattgcataacggcttgaagagaaaagtcggtagacctaaaagtctttgtgaggggcatcattggttgggagtcttcgtttaagagatagcttgaagaggccaacacaaagcctggcgaaggaagtagtgccgatagacctttctctccggaggcggagatgacagccgagaggactgtcacggaaagtaggaaaaagacgctaagaattagagatttgcacacatgagcggcgggaggaaagatggaaaggggggggaggaggaggaggaaaacac

SEQ ID NO: 788 - DNA, 14717 bp, Xanthophyllomyces dendrorhous
ggaggaggaaaacacactcactacagtcaccacattcgggatgatcgaaagcaatccgtttgaacatgccgactgccgatctagaggagccttcagtcctccagaatgaaccaaaacaggtgtctaatcggatgttgcagtgttcaagctcgttctcgctcattggtctagctccgttcaagctggctatagaggggtaagaggacaagagaaatagtcagcacaatcagatacacactcgatcgataaggcaaaagtaagaaggactgactgaaagttaaagtggcactctccatcttcggagatcccattttgaccaagacgtcttctacggccttcttttctaggtaattcttccttttcgctgaaagtctctcgaccggaaccacaagatctttatctggccgataggaggagagacccaaaagggaatgtatctctgcacgttctggttctgaccacagttcgttggatgaacctagtctggcgacagcccatgtccatagcatcgattctcgagctctttccacctgattcaatgtcgctaaccagactgtagataccaagggatttgattggatgagctattagaaagcatgcagaaaagggatgctaagaaaccccactcaccaggatgaagatcaccggtctttggtccgtttggatctgaggagccctgtatctctctaaatcgtctggaagaagaatttttcaagtcggcagcatagatcgttgacatctcatccatcatggctgtcgagactcctttgggaatatgtcctagaggaactctaggtcgttttccaaatcgttgggcttgatgtaggagtgaagggaaatggtttagagaaagctgagctagagcttgaaaatatggaaaagagcactcacacagcaaccagttcgacctaaggatagcagatcgttcaattacacaagcgaccggtgggaactcaacctgagtgggggtgccaagagtaggaaagaaggatcagataggggaaaagacatctgactcgtatcagcgcctttcctctccgcacccgggaaggaaaaacagacatacatcgggtgagataggttgtttgtcgagtcggaggattggtccataagctggagatacccaatccgagatagagtgctgtaaaagggtcatgatgtcagtaaacaaaaaagagtaagagcaaccgtaatattgaaggcagaagacggacactttggcctaggaagaaatcatcattaaggtatatccaatgagacgcaagcccgggaatgttggctagatgactctctatagagaaactattgaaggtgggcaaggcctgtttggtgaacgcttgtgcgccgatgatgtcgtccggatcgagagttcggtctcgaaagagttgggaatgatgatgaactttgatcgttagcccgtcgacttgaacaccaatcagtcccaaccaatacggaatctgtccgatcctgtgcccttcttcgagatcttcgcctaagccttcgacgtcccagtcgctgagaacaatgtggaatgttctgatccttttgttcatctgctcgaagaccgaacggaaggaatgttggagttcacccttgtttcggtagtgtctgagtgggggtggaccccatcctttgggtaagtcgcttatcgcgccatattttgagaattcttcatgccacatcgggtcggagctgagaaacgaggctggatgagacaagagacaagactgaagaggcaccccgaaggagaaagaaagaaggtttctcacccattaacccaggtccaaacgacatccagctcaggctgagagacgtcttctgcctcacaaggctctcctcttgcgagccaactctcgagacattcatctgataaaattggaacctggccgatagagggcgaacttgatggttgttgtggcttgaatatagcataagtttccttgttctctctgtatcaaagtcacaggcaatgtgggtgagtatgcggccaggggagcaacaaaagattagggtctcacagtagaacggtctgtaggtctgattgatagctctcagtggggctgtgagagccgatgatgatctgacccagatgacggagggaccgtccgtccgaattaccagccagatggacaagcccggccgtgcagatagtaaggagaacgagagtagctagtaacttgatcagtctttgcttaggcaattgacgttggcctgactgtatatttgtctgtggcaagatcgggttgaccctgataccaaataccatggttgagatcctgaaaacgagaacgaagaaagaacgagactttcaagagaagaatcatttttcctcaataagaaagagtggagaaagaggagcgtgtgagcattcaacacattggaactgcctttgtcttcggcacgatctctcgagctttctccatttctgccgtatctataacatgatttttgagtgatcgtcgttgaacactgcgggtcgtttcaatatttgtcttggttgaatggcagtcttgttgaatgtactcagagttcagcgcattagcatacattctgctaatcagatggacgatcaaaatgtattttcccgcattatttttccgccgcagcagaaattaacatatatacgtcaccggcgcagaagttcctgcttggctttgggatcggagccgagccaggccgcgggtccgcagcaagggccggctgagttgtaagagcttggagataaaaagggataaaacaaatgaagtgaacagaggacgcatctagttagtatgttcagagtgggactttagtactagaatgagaatcagggtgagagcacagccaagagagatagcgatagtaggagtcgaacaaaacaatgcaaaatacacgtggatatgagggtcgtacgaccatatcgagttgtatagtcgggaatcagaatcacaaacttagttcatttcattgcatagccatcatcggagattgatcctggttctcactctttgtgaataacgaaagtggtttactcctggtacactatcggggcactctagatctggttgtgacacatgtggcctttgatcgtgttgagaaaccttagccttcatctatcacgaccagcagcatctttccagaatctctctttctctgctaatggtcaactcaaactttcctatttcctctccctcgcgacatgggttccaacctgagtcctcgtagtcacttaatagactctctctctctttccggccatctttcctcgttcatatatgtttcgaactaaaaaggatcatatcttctgacaaaatcaagctatccatcctgtcgacggaatcgcaagagaaaaagaccaatcttatttccttcgtctcgatcaccgctcctttgtcgtaagaggccagaaggaggttctagtagggttgacggcaaggcgcacgtgacctaaaactcgccacaatatctcaacagctgtgcatacctcacccgccatacagccccatcttctgtgtcatcatcatcgttatccattcccatcgcataactcaccgttgcttgttcttcatcaaccttaagcttcgctttcgtatacaatttacaccgaccctgttcatcgttatgttcgcaaatatctctcatgctgacaagctgtaagtaatcttgatttctcgtgtgtaaagtcctacattgcaccgcttgtcattgcttactttcgctcgaatactttctctttcaaagcgcggttttcgctctgttcgtttcccttccctcttatcatcttttgatttctcctcgatcgattccttagcattttttgctcttctactgatgaaatctgaccattcttcggacatcatgaacgacaccttaggctggacgagtatgcaacctttctgtcgcttaccttccacgcttacctttcacgcttcaaacaacctttgacttaatttttctatcacctccttctacagatactttgaatcccgcccacatcttgcgcctcaacaaccttcaacaacgtctcagtcggtcaacgtgcccataccgagtcgttcacagatatcttctgggctcacggcggttcagtctcacctgaaccgatcgtctggcccggtttcctcgtccaccacaaccagcaccacgactaccactaacggtgcttcctctccctgggcttcagcccttagtaacaaacacgttcaaggcatggtcggcaaagctcttggctcttctccttcctcgcctgctgccacgtcgagcaatgcaaaatcgccgccgcctccacctgcacaaagttcaaaaacacgggccgccggttcagcaggtctcgtccagagcaagacgtttggtcatgtcgatacgtcttctggtctaggtgcttttaagacgatgtttaaagatcctcaggctgctcgttagtctcttggccctttgctacttttacttcgtccgctctctttgtcgtctcgctgaatctgtgattggtttctaaattttgtgatgtgaacgatgtagcgaaaccttacgaaccaccagcaaggacatccccagcgagttcactccctccgccacctactagaagggtcatccagccggaaccagagccggaacaagaacctgaggcggaaagtgatcaagatggggactatgctgagggttcgtcttctcttcttcttcaaatttctttgctctttcatggctgttttcttatatctatcaactaactggcttgtgtgactggatttattcgattgattcagcgctatatgatttcgccggcaacgtatgtacctcctccttcttcctaagtttttttcttccttttcttttcaaataaaacccaagaaagaatcccaaaagagaaactcactcgaagtcttcgatcattctgctccttcctaacgtttggttcactatccaaaggaacctggagatcttcctctacaaagaaaacaggtggttctggtgctcgagaagacatcacccgattggtggaaagcaagagatgctcagacgggtcaagaggggctgattccggctgcctatgtcaaagagatctgaaagattcgatatctcgcatgtgttacatcttctcctctttactttaatttctgtgtgcgtttcttttctttcctcgtgcccttctcgcctgccctcgctttcttaggcgaacgtggacggagcgcagaacggtcgacgaggaaaataaggaggttgggtcaagcaaagcggtgcaacttctcgtctattcgttcaaagtagtaacaggggcccttgtctgtctgcatatcatgtcttgtcacgttgttcatcatcgattattcatagactattgtccgttgcccagcatccatctgcaaatgttccctgaacttctcggtagagacacatatgagaaaatgaatgctgagggagttggaatttcaatctaaagcgtacgaaaagaagaatatgaatctatcttctacaacaaaggctcggttcaagaggaaaagggggccgaagtaaataaagacaaaaataaatgaaaaaacaaaacgaccagatgaatcggaaacctcatagtcatgtatgcaacgtgaactaaacgtacatctctattcgctcgtacatagtgttatatagcatacttctcttttttgttcttttgtttttacccaataaaatttccatctgtattatacatgtaaaagagaaaaaatctaactcgatatagagacttctttgaagcaatggaaacaagtaagcctcagcatcactctaatctagtgatccaatactcgcgttcgcgttcgcgcctgtatcaataattggagtttcttctccctcctacccccttgtataccctgctccgcaagacgaacgggggttgagaaacgaagaggatgggtgaggatatgactccaggtccctctccgccttctttctttaaaaaccttggtgaaagtaaactacagataggcaggaagggagaaaagagaaagaaaaactcggcgatccaaaagtggaagaacagacaataagatgtggagtggcgtggcaaggggtccggcgggtcgagggttctttacagaactgcaagatggaagaaatacagaggccgggttttacgcaaccagcatggcttgccagccggctgcaccgtcacctactcctctaaacgttctctttgtttcattccctttggtctcctcgttttctggtctccaaacctgaccttcaatcaaaatttcttcttctcctaaagcatctctcattcgaggaggcgtgtggctccaagcgccttctgcgaatattccgctgttcgttctcgaaatcaattcaccgaggataggcggcgaagggtctggcgagatcattagcggacgtcgctgggaggagacatccagattgaacgctgccggcttaagaccaactgacttcttcgtaggcagcacgaatggatcggccggtgatgctcgggagccagccaccgtcgacgcattcttcgtgccgtgaggacaatcgtgttcacctggaaatcggaagcctatcgtgcaagagtagagcgagtaagaggtttaattagccctgttcctgggcgattgagggcaaaacaatcgacacacctggaacgggaagtggcggcggagggatcgagtggttgtaatcgatctttacgagcatctcctgggcaaactctgggtgcggatctaccgagatgacatcctgattggggggggatgaatcgagccagttggagtgaaggagatgatggtgagtcagtctgaaagatacaagaattgccaacacaagcgggggcccacgaaacgttcgccttggagcgagctgtgagcaaataaaaagaagaagacgtacgtccatctcgagtagggagattgcagcattgaaatctttttccgaagcctttgggaactttctttctagtaatgtccatgtagattcctgtgggtgcgagagaaaggcgtgagtctccagtcaggctgacggtgtctcgaggacaagggaaacaaaagatcatacggacctgaccggggctaaataacaggtgtatatgaatatgggcagccaagttttctttcatgctgagcatcgatgtgaatggaacaagtgtgttatcttcagtcgacctatcttcgccgttcatgggccttcaggtaggagtaggcttggatggtagttggaaggaagaaaggagaggagagctcgagggaatgggccgaaggatggatgcccaacgttcgtcactatggcgggcaacaccgggaacaatcgatagccgaggtggttacaatgcaggtggttacgattctttcttcctgttctttccctccgcttccttttcttttcaacttctccactggaaaggaagaaggatggatcagtgaatggatgtggatatgaatgtggaatgagggagcagtcgttgaaagagagagggcgcaaaggtcagagctccaaggcgagaaataatttctatccctgccggcggctcagggagataagcattttccagcctcggcggttttcatatcattcgaaattgctcactcctccccgatatttaccgtgaacgactcattttatacactctattcgatacattctctacagctcggatggatctcttaggcagcaccaatgaccacaatcattccttctttgcctagagagatttgccagccgtcgtttacaagcgacctcgctacggccggacggagaacacttcgtccgtgggccgaatggcttcctcggccggtgacgatcgaaaagtgagaggttgagcctgaagatgggaggagcagggagcagttagcccgatggttcggattcaaggccacgattaataatgaaagtagcgaaacttactcaagccagacgtccaccagacttggacacgttcgtgaaccacccggagagcttgataagccgtgagaccgtgaagatctatccaggtcggcgttactctgagaaataaaaaaccgataggacatcgagctagttagtttgataagagaaaagacaaagacactggagaaactcctaccgattagacatggcgagcttggctcgggcaacgtccagagcaagtcgccgggagacatcgtaataacgcctagcctgctccacatagtgacccgcgacttcccctcctctatttgatttgcttccactggtgaatagtcttgacgcttgcattaaagcctttgatggtgtgtggatgtaaagagtttaaatagagtatcaaaggaaacaagatggatcgatgatcagacatgagagaatcaaagaaaggcacatgacgtccccacttacctctttgcgtttctccaaagcttcaagttccttcctctttagagtttcataatctcctacgaatcctaatccaacatccgtttggttcatagccggcttggcctcaacagactggaacccaccagcagccacttgatcaagttttccaataggagcagccaatacgcttgccgcagtggtcctggtcctctgcgctcttgccttcgtaccctttgcaatcggcgatggcaaaggaaaggccgaaggactctctcctattacggccgtcgccctcgttggggagttcgatctcgatccgggggcagagcgaggcaacggtgaacttggccgactactcgaccagggcgcgctcccatttttcttcgaagcagtagatgcgaccaacggaaacgtcaacacgatcggcgccgtcggtgtcgatcctgttggttttgacttttgaacagcaggcttcgaaagaaccggctttgatttcttaatactcggtggtttggatactgcgggtgattcggaagcagctaccacgcttggtaatacctctatctgcttcctatccttgaccttctcctgttcctctcttgtttcactgcttgaccgccctcgagactgaggaggcttgtcgagagagactttaacgatagacctttgcttggaaccttccaggatcgtccacatgtccaccgcgcgttcgaaatctcccaaacagacctgccacaccttctcgattgccggccggttctggattccgtcttcaacatttttcccaatgtcatccgacgaaaacaagacgtccatgagaaactcaatccctggatattccatcggctcgagttcgcttagtattcgatcgattgagccgaggagtgcgctacgagctgtatcgtatgacggatcatgaagatacgaaacaaagaacgcaggagtcgcctgagggaaaggtgatagaagagacgacatcgtctgactcgtggtcgaaaagtcatcccatctgttgagaagcaccattttcttctttccgccaggttcagtccgaacggcggaagactttggtcgagtgattggcgaagcaagtggtacgactgtggccttcttttgttttgtcaagtctcctcgcgttgaacccaccaccgtcgttgccttggcctttttgttgactttcttcttgctaacaatagtaaagtcagaagcaaacgcgtccgcaaacatgggtgtcgagggtctcgacgttcccatcatccaactctcatctctttcttcttgcgtcatgaaatcccatgtagagactggcgcgttgtccatctcatactctagtccaagttcaagctcgcgctctaggtcgagctcgcgttcgagttcaagatcgagttcaccccaactaccgcgttcttcggcttcacggatagcttcgagcgacaataggttttctacaacttgtgacagatcatcggttggattttctgctagtgcttctgccaagtactcttctgagctatgtttctcgtagattggagtaagaacgaagtgtcatcaagcaaatagagcaagaaagacagaaactttacctagagggaaaccaagctttcaacaaccctaaaggcgtgttgtccttagggcttgcgctcgtgcgctccgagctttcatcagactttgtagatccgtctaggctccaaccgtccacgtcattcaccagctcgtctattccatactttcgagctgaatttcctgcgtccgattccgcgtccggatcgagatttgagtcggaagagagaatggtatctgaggctagcgcctgtagggtttctctaactggcaataaggacgtagggtctgtgtggtcgtgatcgtatgagatagttgctatcaactgatgaatgacagagcaagatctgtacgtcagtcatcatgccttcgaccaggaagagagtaggaacaacaagcgaaacaaacgaactgtaggtgatagaggcgggtgaaactcatcctgcacaaacctcaatgagccgtcaagcgttggatgtttagaccgatcacagaagatggatcgctaaattgaagccaagaagcgacagctgacgagagaaaggatggacgtacaataagagcctggacggtagggctgaaggacatggaagtcttggaatacctttgggtctgaagagcaatcagtcgtgaaaaagggtcgtcttgctatatcttatacgtatatgaaccaattgtttcggctaagagcagcgaccgagcaggacacgaagattaaatgatgatcgtaagaaagaagcgggtaaaaaaggatggatcgatcggatcgagaggcggaaagaaccaacggctgacgacagtgaggacgaggagcttgaaggtgagcgtcatcgtttttttctgtttcacacgcgtaaccctaaacacgtggctttccatcaagtgtacaaagacaatcgttctatctcgttctctactttgtgtttctacaaaaagcatgttcatctctctttgtgtttcccatctcttccggcatccaccataacgcccacagcccaaccggctttcaccatctttttcagcccggccagccagccaagcgcgaacaagctgaaacataacactgcgttcagaacgacgtaaagatctggtttatcgatcggtggtggaagtaggtattctgccaaatggagggccaatatagatggatatgtcgtcttccgttgaggtttcaaaatgaggttcatcagtacacacagacgcgtctctcaactgaatggggagaggtttcgcttaaaaagatgctcaccatagagatgaatttgaggagcggtcgtggagatttgtacattcttcggtcgaaactacccataagatagttccagaacgcggtcaacagaacgtattgaaggatctgaccatcacgtttcaaaagcggccacatgctagtatcggacaaggaacaaatgaacagaagcaagagtcagccccttcgagtatttcccaagcgagaacaagacgtgaagggcaacgaggaagctacctaaagacagcgacattgttccagaagacaccccagtctaatgctcctccatcggtctcttcatccgtcatccacatccaaacccccaagagcgggataagaactgtcttctcatgaacctggaaggaaaacaaaaagaacgagagcgctccgtgtccggcaagaagaggaatgaatgctctgaggtccgtgcctggtggtgaagtgtgggcgaggtagaggaagtgaacggttgaagggagaagcgcgagtgaggtgagaatgagcgagagaggagggaggaaagattcgggaagaatcgaacgccatttgataaacgtatttgtggcgcactagcgtacgcgagagaaaaaaagggtcaaccttgggttcgacacaaaacagtctgggaatgcaagacaccaagacaaggaaggacaccaagacatacccagaagttggctactttgtcttcaaaaatccctcgggcaaatggaaagacccgatgagcgacttgagcaaggtccatgtgtgggtaggcaaacggaccgaggatgacggcaaaggaaagcgtagtaacaacggccagatttacaaagagacgcaacctacacagcattccaccatcaaaagtagatgtcttgagcttcatcaagacaaaacaaacttcactagatttagaaggagaaaaagaagaaaatgtaaacacgcacccttggctgcctcctaagtgccagcatttaccaacaagccagatgcccacagctggagcccaatagagcgccatctgtttgaaacacagactacaaacgaacactacgcaagccaaactatctctgccggctcggagaaggacaaaagtccaaagggcaaggccgagcatgacagtgttgtattgaaagtggccgtgatcgaccaggattaatgggggcaagaggagcagaactagtagcaccagttgcttttgaatattaaaaaggagaaatgaggaaagaaagaggtatgtgagaagcaagcgacacatatcacatatatcaggacacgactcaccttagatcgcctgctgcctgaggacctttttgttccgtagatccaagcggccagggccgtccaccagacagcgatctcccagccaacaacagacgctcgcatgaacgccttgagaccttctgtttcggctcctcgtgagctttcaagcgcgaaccacgtcggatcaattgcttgaccaataaggccagtgagaaaggagtggtaggccgtcagaggaggatagtccagtccccaatatgggagatcatagtaataccattcagaccggggtagatggagcgtaatttccatccaatgacgctgagcttcaaaatcgccgtgcattggaggtgatccttcgcctttggtttgaaaagagaggaattttttcaatcagaagggaacacggtcagcctgcaaacgtccggacgcgagcaaggggagaaaagagagaaaaagaacacaagcgcacggaccgctgtagccacccaaggcgacgagaaatctgatgagcgcggcggtgaagaaaatagagtacggaacccagtccgatagagcagctctggacatccagttgatccatcgtttggctggtgtctctggagaggaaggcgaaatgaaggagcgtgaatttgttgaggatcctgctgtcgatgaggcgtacgagcgagatgatcgtgagcgggtcgagcggaaggaggacgtagtagatctcggtcggacatcggaagaataagagtgatccgagctgagcacaaagggagaaaagagcttggaagatgtttagttgacggcggaagcatgtgtgtaccgcaaggatgaaagactataggggagcagaggaaccaaatatgtatgccgggcatggactattactgaccgtgctttggaggtccttcgagaagtaggagatgtaggaaagagaaggtttttctctcctcccgactgaacggtcatgctatatatgtgtgtgccggtatatgcttggtatcgaaggcagtccgtatgtatgttggccagagtaaaaggagatgatgaaaatgatgatgtggatggggagaacaacacagaaaccatccaggccggcaaaacatgctgaaattctctgcgttctttccatccttcttgcttctcttttctttccagctctctatattatggcttgaatgatctggtgagattgcatacatgttgatctctcgcttttctcatcatatcaacatcgcaaaagggagcgcgaagaaaaaaggttggcctgactaaagctcaaatacaaccggactcaactagaatagaagggttttctaataagatctcaagccggccaagtcctaaacacgtgtgatgatcgttcgactcatgcttccttcatcccatcgttcgtctttcggcattgacgacgaccacgacgacgaccacgacggtcaatcactcccaaggcttttcatctatccatttaattctcgctccctatgggcgactcagcaagtcccattagaagggagtttcctgcgatcaaatcaaacaccacttcggtcaatcagcaagttcccggttcggccacaacaaatcctccttcagcctttgggttctcacaactcgatcatccttcttacgcagccgctgtaggcaaccaggccaatcctttcaccgagacaacacctcacagacgatcagcatccagacagcctagcactgtgtacacacaaccttcaatgtcggactctgctcatcattctcagcagcagcagcagcaacaacagcacaatattcaacagacccgtcagcgatcgtcttctagatctcgacccctgccaggaagctcgggcccattgggactaccttctttcagacgggttctcaaactcactaccgatgatgatgatgacacttcgaacggagatgacgacgaactacatgttccggatagaggagagaagctcgtccgaagacgaatgaaggaacgaagacagctcttgtcatactctggtcaggccgctgccggatcaatcaccccaggactcaattcgagttcaaatcaagttgatggggccagtccaacgatgccatcttttgtcctaggatccaagaagcaagctagaggtagggatttctcccgtggtcagactccagggatcaactctagaaaggacgatggtggatacttcgctggattcgaccagccttcgttcctcgatcggccgtcttcgactagaccgacaagtcctttgctttctattcctccccgaatgccttctactcggcctcgtgccgaatcacttcgatctgctcgaggcaaaagcgtctcggtcgaaggctccgaacgaggaagcattcgccgacaggcaccacctgatgaccccgataacgaggatggagaatatggaga

SEQ ID NO: 789 - DNA, 12900 bp, Xanthophyllomyces dendrorhous
agaatatggagatgagctgggagaactcgcctcatctggaatcctaccggtcagagacatcgacggggatagcggagatgaagacctgcttgatgatggacaagatcaggttgaagaccacaatcccgaagatgatgaaggtgaagacgacgatgccgatgacgacggtgaggtcgagctcacactcagggatagacaggatgtaagtggtcaaaaccagtttctgaaattgcttgatgacatcgtcgttgtactgattctcatctcttgtgtcttcttcacctgactttcctgctgactcattcttccttaggctatcaatatcgagcatccttttggattgcctatctggaaacctgcgctctatcggaagtctcgaacggtcacccgacaggccgaaactgccctgcacgccattccctccgctgctgcccaaaggcatctccttccgggaaacattgcttggacagtgctcttcggatggtggctctcccttgtctgttttatcggagctgggctgatctggctgtctgaaggtggtggaggtaggtttagcgcgctcgtttgggggttgggttggtacatcttttggccgttcggaaagtacgtcgagggcgaaggaaaaatcggagcagatgatgaaggtgatgaggaggaagttgagaatgatgaagaaggtatggaggttgaggttgatggtagaaatggggttcccaacggaagaggtgtacccgggagcgagagtgaacgttcagactcctcaagaacgattaaagcgtttggcactggccataccaccgatgatgaatctgatgacgctgaaagcgctcggtccctcaatcctatccctcggcccattgctcacgaaacggatgcccttcttggagaaactacccagcacaacggatcaacgttcccatcagatgtaaacacggttacccatgcgaagagcgcctacggatcgatctcgccgtcaggtcgttacaagttaccagactcttccctttcagccgactttatcaacggaaccgaaacagtgttgacgtttggtcaccgactcggacaaatcacctactggctcgtattttgtcttatcatcgcccccttacttgccttggtctgtgtcctctgttggggttttgtattctccataccgatggcaaaacttctctgggctcttcttgagttcttgtatagccgaccattggagcttgggttcaaaccggcacccaaaattcctgtagtagatccagagatagccgcagccgccaccgaagcaaacggaaactccgccattgatggctctgctcttggatcctggaagaaacgggccagacttcgaccaggtcaggtcgctcccaccggagggcctcggtcgactgtcctattgtgtacctacaaagcggtcggcacccagtactacaagtacaccattggtggtgtcaatattctatttgtcaacctcgtccccctcgtattttttgttattgccgacgcgttcgtgttgcttcctttaacggagaagcaaaacatgggtcccttcttgaatttcctcgcggcccgagaggtaatctttcttcttgcaatctcgtccgttattccactttcgtacttcatcggcatggccgtcgcctcgatctcagcccaatcctctatcggtatgggagccgtaatcaacgcgactttcggatccatcattgagcttatcctgtactcaatagcgctcgttcaagggaaaggtcggctggtagagggttcgatcgtcggtagtctcttggcgggtgtgttgcttatgccgggtgtcagtatgtgcgcgggagcgtttaagcgaaaagagcagaagttcaacgcgaagagtgcaggggtgacgagcacgatgttgatcatggcaatcgtcggcacgttaatccctactgtgttttaccaagcctttggaacagtatgtcaacctccttttctgtctgtctgtctcatcctacttcttgttttgccaacttgtcttgttattggggtatatgtttttattctattttaaatatttaggtcgaacttagttgcacggggtgctcggacgatcagatttctcgtatagatcccttcccgttaaaaacaccgaacaaaaatgcttggggttgccagagctgtcgatatgtccatccggacccggccaaggatgctttctatcaggaaaatgtcaaaaatctgatgttcatctgcgctggactccttctattcgtacgtcgtatctttctctcttaaattgctttgtgaagtcactagtttgggtcaagacgtattcaacaaagtcatacatttctgggggaaaaaaaaagtcatatctggttggcctatggttttctctcaaaacccacgcttcccaaatttggcagaaccctcaacaactcctccaagcagaagcgacggctgctcactactctgggccggcttcggtgcaccctgcctatcgagcctcggtccataataggttgactcctgctgctatagctaacgctgctgctgccgtcgataacaataacgccatcggtggcaaggatgttcttcctactaccatgcccgtcaactcatcctctgctggttcagtcaagggacagagctccacaaccgcgacccaaggtctgacaaccggtcgtccgggattctctcatccagaatcaaagacgactaacaagccttatggattctctggtccggcgagatcagtctcaccatcacccgtccatttggctcattcgacccaaccacgtgggcctagccacgggtatggctaccagtctcaagggatagggcaaggactgtcaggtagtgtccattcgattggttcaatgagtggctctcttactccctttgtcgaagggatcgtcatcggttcacgtgcgtcaggcgaagataagaacgggtcagacaacacaggaggaattcctccgatggaacttccctcgtctcttgcgtcggacgaggtgttcaccagagcagtcacagccgctaccgtcaccgcgttgagacaccaacagcagattgtgaatgcggctgctgctgccgctgctgccaaccgacctcgacctatttcccatcacacaggtatacatggatctgcccaaggaggaggtccgggtgggccaggaacagcggaggagtcacacgagggaggaggaggacacgaaggcccatcttggagtaggacgacgagtgcaagtgtcctgttatcctgcacccttttgtatgctataatcgccggttcgtttctcttcgcttctctctatttagatcacgaacatagaggttaacttgagctcttttttcttctctctcggctttggttgtcgtgttcgtcagaaattttggtggacgtggtggatgtggtgttggaaggatccggattggacgaaaagttccttggaattaccctatttacactcgtaccgaatgtgacagagttcatgaatgcgatttcattcgctcttggcggtaatattgctctatcgtgcgtctctttgtgttgcggattcaaggcttctgctctttctgttgaaactgatgcgatcttggaaaattaaatttgtctgtttgtagaatggagatcggttcggcatatgctctacaagtctgcttgcttcaaatcccggcgatggtcgctttctcggctttctacgaccctaaacagatgggcgagtttgtcgatacattcacgtatgtcatcatttcctttctccaagaaaaacagagagaatgtttcattgagcgtactttcttcttgtctctttacaaccttgataccttttcaggttgattttccctcaatacgattgtatttgcatcatcgtacgttccttattactatagttgtgatagttaatcatgcctgacgaatctcttggtgaaacctcacagttctcgatctttttactgacttacacgtacatcgaggcccggtcaaattaccatcgagggtctattttgatcttggtgtaggtttttcttatcatccccatcaatccgttcacttgttctctttccgttccaaaattcacacctttttcgactgatttaacagatatctcgccttgctatctggattctactacgctccacatcaggatgtcgacaacacctcgtgggctacggtgttcagtgccggcgatgtcacacgaccgatgtttaggctttctcgaacggaagatatactcgcccgtttccgaggactctgggcttgagatgggattttggcatacatgattatccctagcatcttacctatctctcggtgtcaactatcttttgtaataatatcgtccacactgtagcttttctccaattgacccattcgccataaattaattttccacatagagcaacacacgccgtttcctttccatcgttctttcgtctcttgtgtttatcatctttcttctttattctgcctttttattcttctttcctccttggtctggctatgtctcgcttggttgtctaccatgtttcacacgtccacattttcggacatcgattatacagtccaccgaggtgacgtcagctgtggacaaagccgttcgggctcggccgggcgcagaacgccggcgggagggattgtacttaagatcgaatttctctccttcttctcctcttcctcctcttcacttgtatatctatcgaacgcttaagttgaaataacagcagcaagagacatgttcaaacccgttcatttactcgttcttgtccacggtaagattcgagaatttttttcagcaagggagtccgttcgaagaaggttgctcataaatcgaatcgtcttacgctcactctttaggactttggggaaatggtcggtctccttctttctaatctaatctttcttcctcttgaagaagtaaagatgaaagtgaaaatcactaatgtgcgatggatgtttgatgttaaaagggtcccatctgggatcgatgaaagaagaaatcatagcttcatacgaggaaactcataaagaatcgccaacagagcttgttcttctcttgcctcagagcaatgagggtgatcttacgtacgttgcaataaagtttgaagctgtggacccggttcgatctttggatcgctcgatcagcttgaattgcaaggaattccttcttaatgactcgactttgtgggcctgcctgcttcattcgatgattgacctggcaatctgtttctagatatgacgggatcgacatttgcgcaagtaggatgatagaagaggttgatgctgagattgaccggctagaaaatatcgagggaaaggaggtttcctcattctcaatagtcgggtactctttaggaggtttggttgctcgatatatgatagggtgtgtcttgatatctttccttcatattcattctcatccctacccgcgtgcttatcttaggagagacttcaaacaacacaggctcctagaatcccgtccggaacgatttttcgagaagcgaaagccaatgaatttcgcgacgttcgctaccccgtggattggaatgcctcgctaccggggcgtagtaaacaaattcacaagcgcgatcgggagtaaattgttatccagaaccggtgctcaactatattgtggtatgtcactcttcctctctatggtgttgtaaagagtaaaataggtcgatcttttggtcttatgtgcatcttattgcgtttcattctttgtgactagtcgacaaagagaagttggtatatcgattgggtaaaaaaggtataccgtttccgatcataatatgatggtatagccgtgaggctaattttctcatatacctgggttccttgtaggcgacgtgttttatagggctctcgagcgatttgaacgaatagatgttgtgagtgttcttcttttgcctgcatatagcgatcaagtttgttgatgaatttaagagattttcaggtagccaacgcggtattcgataaagtaagactttacccattcaggtggttggccctgtttctaaagtgtttgatcattaatattctcgaacaatcgcagactgtaccatatccaacaggagcaatctctgccgaagatccatttgacgaatatgatacaaacggtctggaaatgtatgtttcgttctcacgaagaaaagttaaacccggcccaaagcaactcctgacttcgtttaaccttctccgatcgactggttctacaattgattatatacaatagagagatggaatctgaccgacccgtcatcaaaagctttcgctttccatcaacctcgagactttcctctggatcctcctctgaagaatcttttgacagcccttcaccgactcccccgcctccaccggttccgaagagaacgcacaaaagaaactctttgccaccgtggttcagattcagatttcctctgaacatactattctttgtatcgttgccgctccttgtaccggtcttcgtatgcgttgtcctaggacacttcatcaaatccgggcgtcagtccagtcgtcgtgagttctccttctcaatattcagtgcttttcgtcacgtggtccgaacgtgttggctgacttccgatatcatttctccacattcgttccttttcgtatctgacataggtctcaagaatcaaacgactctaggagtatgggatcgactgcgatcgatcgagaaagcagtagagcatgatctatcgcttggcgtggacgaggccatgagttatgaactagagtcgagtgtgcccgtctcaaaattcatgcttgaacacgggcacaaaaaacagtcattaattctgacggaggaacagttggataatattcgctcgcttaataaacttccaaaattgaagaaggtaagatcgtgttttgtcaatttccgaccatgacaaacagagctgatattgaaggatcttttaccttgattaaataaacggaaatatagcatctggtcttcttcccggatgcattcaacagccatgcgatgatcattagtcgagatcctaaaaagttccctgaccacggtcgagtgagtcttcctctccagtctgttgtatccgatgttgcgcccagaaatctgattcatctgcttggctgtatatgtggcttgcgcggtccacatagggtcgaatcgtgataaggtcttgggctgatttactcgttatctagcatctgcaaggaatgccatagtatagaagtcattgatgttggtcttttcttatttgatgtatcactatgaataatgcaatgtgtttcaaaaatagagacttgcgccggtcaaagccgaacatcgacatcttcatatcatctgatctcatgaatacatggcatgttgctcagccatctcctttccctccgatcagatcttttccccgctgattctttatctctacagagccatgtcttctagccttccgaacgcccaggtttggacaaacttctctggagatgattaccacaaagcaagactaccatatccaattgagcttcttcaacagatcgtcaggtttcacaaatcaacctcgactcaaggagggaggtcgactgtcgctgtcgatctagggtgtggaccaggtaagtaaaagtcttttttcatcttgtttcagtacttctagtagaggagtgttggtttgttcatcgtcgacatcatcacattttcgacttgataggcacagtcactgttcctctcgctgccgagtttgacaaggtctatggggttgacatcgctgcaaagatgtatctctccgctccgaccgtgccgaacgtgcaagtatgtagccccctccttttgattcctttctatacgtagtctgtgccgaatgaagatatcagaacgattaatgacgagaataatctggctcaatatagtaccaaacggcctcggcatcgtcgctccccttcctggaggatggatcagttgacctcgtcacggctgggacatcagctcattggtttgaccatccagcgtggtggaaagagatgagcagaatcgttcgccctggtgagattttcttttcttcttcgccaaattcttccatatactctacctttcatgctggtagcttggccctgatatcttcttacgtcatggcgcctttggtgatgataagggggaactgtggccgtgtggacattcggtccatgtttcgtatccagtaggtctactctttctctttctttccgatcttcaattccttcagcttgcgcttatatatgcgtgcttactctaggtccctatatttcactccctgtagacccagatcaggacgagacttatccaccggcattagagaaccttttgaaggtcacccagcgctacgccggtcctcttcagccatatcgaacgaccggtaacaagttgacgtacgagctatacgataccctacccggcccgtcgtccgctagtgatttatcgattgaaccccggtggactgaggaagcgtccagaaagaaatggggctgggagagcgaagaagcgtacgtatcgaatgagaagggttaccgatggaatgtcatccagaataaggaaggtctattaggtgagaaaggggagcagacaacagatgaggacaaagctatcgaaaggacgctgaaaagtcggttgacgttgaatcaggtgaatatatctctggttacacttgcctctccttaccgttccttctgttcaagctccgaatcatcttggtctgaatttgctccggcctccatcagctcgcaactttcttcgcttcagtttctcccatcatagcatatcgagctaatctccaacctgatgaaccagactggatcgacgagcagttccgccaaatctatagggaaggagcctcgctcactcctgatggttcagaatggaatggcgagacggtcattggcatcagaagagttttgagcgttgtggtttggaagaagaaggattgattgtacaagacatcgaacgtggaagataaaattaaatgtctatttttttctttggtaggcgtgagatcaacgatacagacggtgcatatataatgagatcatcatgaactcaatcaagagaacaaaacgaaaagacatatttaggccgaaggcactccatccaccgagatcggctccaccgctcttactcttcgctgttgtaggtatgcctcaatcttttcctttaactcagtatctacagttgaaagggaacgaccagaacattagactacaaaagtcgtcaagccgatgatcaggaaatcgaaactgaaggacatactagggatacaatcttccaatttgagcggtacccgattgaatggatcagtcggatcagatagaagatgagccttgatggtcgatcgatcgatggttgttttagaggacggcaaaatgacaggatccctcatgagcgtgtacataagagggtctagattttggaacatcattatacaaaaattatttatatattagctttgagcaaacacttcaaggttatttttgaaaattacataccaaggaactcgtccgggagctgaccagagaaatatcaggtgagcatgtctgcttagagaaaaggttgaacaagatgtaggaagcactcacatcatcaccctcctcttcagcttcgatcttcgctttagtttcctccaccttctggcacaataaaactatttgttggatctcaccaggcgttttgattgcccggttttgtaagattccagctaggcgctcgaacaactctttacgataacttctaccctctctcgcgacagcctcaacaaagcgctgctctactcccaagttcctgaagatatctgtcaagtccccaaggagtgctttcggatcgaatcgatactttttcctgtccttcaccttaagatcctgcatcttgcttccgacgaggtttgccagattgaaacacagcatagcggctaatcggtcgacgatctctggtttgaggaaaggctctcggacggtacctgtccattcttgtagaacattgatatttcgttttcctccgtccgtagaccaaccagcttgattttctgccgacttgagcttcacctccttgtcttgtcgctcggtgtcggacaacgagttccaggtggctgtatcggccatctcggtctcgattgcggagatctcggccaagttagtcagactttcttcgaggaggaaagtacagtcgttcatatgcatgttggcaaagatgacgaaacggtcctcgttggcactaaaagagaaagacacaacgcgaacgggtaaggatacaaacataagagcaagcaaagatagaaaaatcacccacatcgaatccttgaggaatgaatctcgatggataggatttttgaagaggtatcgaaggacagagatacagtttcgtctcatcgagaatctgataatagaagaggaagaggttggcgtcgttcgagaatgaaacttcagcaacatggaacacatacttgtcgtagaactgttgatggccaccagtagcctccatgtctgatgaagagagggacagagtagagaaatatgttagatctcctcctctcgtttctgagactctcatatctcgataggtccagagaggaactgaccaatatagtactgaatcaggctgggcacgagctgttccacagctaatggatggtacatcaaagccggaccgaggacaccttctcggtagtagccccaagcttgacaacccatagccaagaactggatttgaaatcgtatcatcagtcatagaaaatgatccgacggataaatagtaaggggaaagcttacttcaactagcttagccttgacaaagggattcttgacatattttccactcaagaaagtgatgatgaatgttatgagtttggtttgatcggtactatcgaacacttgaggttggtggctgaatgggtaccatgagtcgacaatatcacttagagacgaagcatattggaaagagtctcggatcaaaagacacacctcatcaaaaatacatggtagtcggccatatcttctaaaatgaattcaggtagcattcggaatgccatcggagcctcatcgggtaaaggtaaactatcgttttcgaggacaaaatcggattcttgaattagttgttatacatctctttggtattctactcaaagatgcgtccacagagcgatgggaaaacgcacgtgatcatttccttgggataaatatgagtcggatcgacgagccgaacaaaccaggtcatcacaaagctttggaacatcatcaccctcgaaacaaaatctttatcgagaagctgaacatcataggcggtgacgaaagatcgagtcgtggctatgtccgtctagatcagggtgcaacagaaaacaaccattgagaaaatataaattacgagaggtaatgagctctgctgaccttgagcttcttgatcatggcctcgccctgcgcttcggctggtgtctgaggaccaaggattcaaatttaataaataaaaataaaaataaaaataaaaaaagcccgccgttgtcagtcgtttgtaagcatgtcgtattgtatcgaaacacgacacgactcacccctctccatgtcgaatctgtctcgactctttttagctccttttctaactccccgaccttcttctctaagtcacctcgactgttgatcgtcttacctaaaccgacatgttggattccacacgctaggaaaaacacatccgagatgaagttcactggtgttgttgaagaataggtagatggatcggcggcgaagtactcgtctgcttcagccttcgtggctcggatcttagtttcttcagagatgttgatcctagaagactttcggtaatagtctgggtcgactttgtccagctaagatggatccaggcagagagttacattcttagaaaacaacatctctgcgacatcctagattagaagaattgcgattgtgacttactttggagtaggccacgtccatgaccggttcgaaaaaccttaacaacaaaacttgcaaattcgtcatgaacccatccgatgaaacggttgttcggttgacctgattgcaggtcaagtcattacaagtgtcaaaatattgattgaatatggttgtttaatattcctgttggagaagatggtatgcgaagatcgactgaccctcataccagaccgtttctcattctgcctcacagcatttgcaaagaactctaccactttttctcgggcggcaggtcccgatcgaatgatgttgttatagatcgaaaacagagtatcctgagcgaccacatcaggatacatgaatatcaagatgtaagccattaataatccttcagcatatcgaccagtgattgtgacacacctgaagtgagaaaagggtagctcgcaatgtgttttgcgcactctcattaatctctgactgcttgtcgttctccagcttgaaaaagtgcgttttggctacatccggctgtgttttcggtcagccagtcaagaaatgaatacgagtcaaggacaatcactctatcaaaatcgtgactgtatcgatatcatgagcgttttaacaaaataagaaaggcttacaaattctcgagggaagacactgagcctagtgagtgggccaagaagagacataaactcaatttgaggggctgaggcagtttccaatagccagattggcaaggtgggtaactgaaagtatcacattgtcagtagatgatgcatttgtcctcacgttgtcagctcaaccgccttaacgtgacatttctcggagaacttactaaggcagccaactctttgacctcagcgatcttcttcacgcaagccaaacatctcctccacccttcgccatcgagatcctggttgtcttccttctttccgttccagtaggcctgcagaaggaaactcagcgcaggggaaagcagagaggtgacaaattcatttccgtcggcaaatttgatggagagctcgagaagaagctgagggaactgt

SEQ ID NO: 790 - DNA, 30520 bp, Xanthophyllomyces dendrorhous
gggtagacaagaaagcaggaagaaactcgatcacgcccagcggtttactggatgaatagatggatggagacgtttaacgagtgagcagagcatcttgggaagtatcaaccagagtaaacacgctcactctgagggctgtgggaacattccggggtccttcaaagactctcccatgtatccaagtatagaatcattcacttctgatgccgctttagtccaacctgagctctcctccggtttgtacccctgttgatcatatgatgccaagtcggataacgatgaggtctctgtaggtcgatacgttaattcgagtgcgatcaaaatctgagacatacttgtcgttcagcaccaagcttgacctgtcctagtcgcttccaacatcctacaaggtactcgaaaatagtttccttctccggtatatttgcgagaacctgaagctcgtccacgtcgtctctgttgtacggagaccaaattagtatgagaagcaggggtacgatttctcggttatttgatcactcatcagacgtatgatcgagcgatcaaaggactcacgtcatcgagttaggatcaagagagagtctagcaatcaggatcctgtctgccagagaaggattggatcgtccatgagattgccctgtcaaatagataaaagggctgacctatcagatccaactcgtactaggagaagccatgcaccacataaggacaagagggatacacctaccttcagacgagagttcttcggaaagttccttaagccagcaaatggtccaatcgaccgcctctgctcgatctctctggagttacgcgccaagagagattgcatgccgatgagtcgtagactagacgattgttatatttataatcagagcaagacttacatctaaggtgattccaaaaatccactcgactgtgtccgattgccactgctcgaacgactttgtgggcacgggcttgacagcttgccttggagccggagcggggggatgtggaggtctcgtctttgcgacaggcgctggtttcgttgccggcgggacaggccgagcagcaggagtagggtctggagctgcttttgatgtagcagtgggcgtagagatagatctatcagttgatgaggcagaagtcgggcggactgttggtgtaggtgttgtagtagaagttccagatgacggtgtgtttgctggagatgaggtagcaggagaagccccgagtcgttcgagacgcttcaaccgaatctatagagaaacaagcaaataagttaattggcaagtttcaacgaacggaacaaccggtatacactcactctagtagcttcgtcgatatcggacgggtctgccatcttgtctgttgtagatggaaagataatccagatgatgagaaatcgaattccttctttgaactctctttgcttacaaccgctgttagggttaagcgttaaagctagggtagatccaagatttgggtcagtaccgaaatgtgcagtgcaacaaccacacgatcacggatgtcgctctcgttcaaacagatcaacatccttcgagctgccaggctcatccgaagctctgggtctggaccatcagcatacccatcggcctgcttcgtttgtctgaagaggtctcagtcttcctctccgttttctaaagcgctgatcgtcgaactcggtcagtttccatctcaactcgtgtttcgtacttttggtcgtatcagtagaactgataacactggcttctttcttcttctttttcttcgtccatagaaccgaagcgcacgtctgtgcccaatagcaaggacggttcgatatccgatgaatcttcatctggcctttcctctcctcctccggtgcctccctccaaaccgcctcctccgcgcataagccactagtctgtcctcacccgtttctttgttacatgtgattgatagacatactgaccatctccaactcatcatgatcctctttacagctcaacaacatcgactgtttcgaccttgtgtaaaagcctgattgtctcctcgaaagatgctcgggcaggagctggttttcttactgggtttgtcaaaaatccgtaccctctggagctcaagtatgaggaatacccagatggcgggccaagtccacaggagtgggcgctgatacaagaattcatgcaagagcaagatgaagaaaggttcgtcgtctcctcatccatctcgcttcagctactctttcaattctcttcgtcctgatatctggaacctggcacatggtagatccttacatgccaatcctccggcaatcctgatcgattcgcccaaatcttcagatccccattcacggaactcaaagctcagaacgttcactctcccaacgattgtgaactggaccacccggcaggtgttctatggaccatacatatacagccaagtcgaacagatgatcaaagatatgcagatcgaacagactgagaggtttgctgctgaaggtaagatacccgcctatccgatcaacctagcctttctctctctttttccttgaccagccaactgacattctcagacctcgcttaatcacatgctttgctgttgtccatctttggtttgcacaaaaagcaaaatacgatgcctaccttcgatcccagggacggcgtcctccgtctagaaagaaacccgagaccgaccgaatcaagtggtgggaggttggactactcgccataggtagctacgtagcacttgattggttctatcaggtttggatggtcaaagatgaatgaccaggaggatgacagcggtggtcagataggaaatagataaatttggaaggcgaaactgatggaatgagatgtgattgaacatcgtctgttctatcgtctttgtattatggcctgttgtacgtttgctatcataatcaattgtttcatcttgaaagacttccttcgaagcgcgcatgtcatcagagaactttatgaagagtgcaagggagatcggatcggacaaacaagagacaacttctcctttctgatgcaaagagaacaaaaaaaaagacacgatatgtacgaaggaagtggtggttgaacgatcaaaagggtagcaagtatagactgtgaaggaaaaaagcgatgatgaagggcgtttcagaaatgaaaagagtaagagatgctcggaggtgcaaatacaagtcgacgaaatagtttcgtgaaggaagatggatattaaacaaacacgagactgggaacacaaagaaaaagacaaacaaaaatgaacaacggttgcccgggtgatttaatacagtgaatgatatatcaagaatgattggtttgaggaagagagaaaggaaagaatgttgacaacaaggtcatgtaagaggtcgttttagacagaaccggatatggattgagcgtgaggaaaatatgcttgcaacacgttggaagatattgctggatggtgaaatattgaatgtgaggaaggtgaaaagacaaatggacaaaataacaagatataggtaaagaatcaatgcaaaagtcaaagcaaaaagcgaataaaacggaccaccaaatcgatgccatcctctgtgtccctttacttgccaatcaatctttttccagttctatccgatcgagcgatctctctggcggcctcgatcgcctccatcatcctggccgcagcgatctttctactttcttcccgcccaataccactcttatccatcccatcgagctcaaacaggtcctccaccccatcgagcgccacctgtttaaattctaagacgcacgtcagaggaaccgacctgactgcgatctgagcaaggaactcgaccggtacttcctcccaaccggtaattgttaacttttggagcgctcggctgaatactggaatcggaagcggttgaccaggagccaatcgcacgaccgatcgaagatctatatcaagttcttccagtcgaacgcaataggtcgcgagatatcgaagggagagtatagtaagtcgaggagaaaaatatcgaccggttcgatcgcttagtccatcagcgagagcaggcgttcgaagggtcaactttcgaaggttcttccaggatctcgcgagtactcggacttgttgatcgtccagggcagactcgaactcaacctcttcaagcgactggagtgaagaaaggatcatggctccgaccggcttctcattcaacaccatcgcggcctttgtaatcaacggatttgccggaacaggacaggaaatgacgagctttctcagtacacccttgtttggactggaggctatcgctcggaggagatccgatgcgtgtctaacggatgagaggaaatatgatcagtacaggaagtcaacaagctatgcgcaaacacagtggaccaaataggaagacgaaccgagcttccagagaccaagtgctgggcatgtggagcacaaactctgtcaaatgctggtaatgaacaaagaccgaagtctgaatccagacgagtgtcgtcggatctgctaatcgaggcatgcttgccatagcagcgattgaagggagaacgtatatgtgtcgagtggaccggtgtgcggtggatgaattaaggatgtcgagttgatgggcacacttagtcgctgatagattgaaccacatttcagggaacttgacctgttgaagaagacagggattagtacaaccagactttggccttataaagagcagatagagagaagaaaagtgcagtattcaccgaataaacaaattcttccttgtaaaatgcatgggggctcagtcgatgtagaactacgctcctcaggttcacaaaaggtagcatgagcgggtacttccttcgtaagatcataacatccaccgcttggccctgtttgatgacctcagtgatatgtaccgaggtgatcgacgtggtgtatcgaagcaacctgtgatggtacgctagatccaagctcggactcatttcgggctgtgagtgaagcatagagcggatacgtcagattcaggtagcagcctgttctttactagaatccgaacaaacaacataccacaacgattgcattcttgcgcctgagcgctttgttgtccatatcccatttgaagataaatgagcaatcctcgaaccggacctcgcgccagagtacggatgcaccaacttcaaagaagaatcgagaaactgctaggcacgatgcgagcgaggccggagatattatatcgagttcgagaaagatcaaccgaagtagctctgggatcttcaatggtgttttgttcgctcggataggtaggctttacggatagaaagataataggtcagattccgggtgttgatcaccccctacaagagcgacaccaacgacgtacaatggttcttgaactccacctaggctggtgacgatgattccccctgttttcccctctgttttcgtcctcgtccttgcccttgcccttgccttgtcttcgactgcgctggatgtgagggcaatggtggtaaccaacctttcagggctcgatgacggcgacgttcctgtccgcctcttttccagatcaaactctatcggacctgacggagcaatcgaccttctgatgacttgttgtttttgtgttggagccgaaggaagggcggtgtaagaagatgagggaattgtatttgatcgattacgagttcgagtcagggtccgagtacgcgtccttgttcgggaatgatttgtcgagtaaagatcaatgtccttcatcgtggatgatggtgaagtggtagaagaagaggaaagggcgtaggaggttctttggtcaatgacgtctgtattggagatggtggtagtagtagtagtagtagtattagaggcagtagtgccatttgaacaggattccatgatggcaaaagacggggaagacgatccagacggttggcattctagggcagaaggaagcttggttgatgtagcttgaagaagaagagaggatatgctgtccatatttgtggtgactgtatcctgaaggggtggtaaggagcaacggcggtccagtagatagagatcaataatgctttagaggagcgatacagggacgaagaagggagttcacagttcggagaaatgagagagaagaggtgtagggattttggttggctgctttctcggaaagaatgttcttgtcctcagggtcggtgagagaaggttaaggtaagggtgtgactagactcgttgggaagaatctaggcgactgaagtgggccaagagaagggagagacaaaagaaaagaggaaccaaaaacaaaacagaatgcaaatgcggggtaaggagatatagagagagaaagaaggagaagggcaattataagaccttaagaaatcgagggcaaaaggtccttccagttttatagctgcgaaaaaagaaacaaaaagggagagaaaaaggctccaaacacaatcgggacgatttaaccggaaggttagtcagtatcaaccgggaaaagacaaaaaaagaaaccgaccaccgacgacgaccaccgcctgcggatggcatgaaacagatcaagtcttcgaaagagtgaggagagtgagaaggacatcgccgctgtattatctattagccgttcgcgtgggccatgggattagtctctctgtttgctctttcgttctttcgcttaatgaattgatcgctctgacgaaaagctccggagaaacatcaccaagtcaatatgtgcgcgggaagggtaaaatatgataacaaattgaaggggtcaaagaagggtgatcgaaaatagtcgtgaaagcagaaagacaacagagaagggagaccaaacgttgatccctccacttctcgattctcgtccatatcacctttcaaattcgccgactcgccgctggtggtttgatccgggttctccgtctaaatagcattttcgcttccctgtatcgaaggtgcatcatcggttccaatcgccaagggaaagcataggaccgggcgtctcggatccacatagccggccatagacggacatatcaccgagcggagatttcggggactgatcgaggggaaacttactgaagaaaacagagttcatcgaaacagcaggtgtcggacatatcaacgtcacaagagaaatcaaatcgatcaaatgcccgactacggatccattcattgaaggtgtaactcctttacaagcgaatcggtatacttctcaggagcattcaagagatcgagaggcttccatagaacgatgatgaaacaaagaaataaattcttaaccctgttactttcaacgggaagagaagcataatcatagatgcgtggagaaacaaaaggttggacagccttttccattgaaattgactgaaagatgagacctttggctatagactgtgccggtcactctgtcatccctgccgtttttctgtgtttgttttgagggcagagaaaaaactgaaaagttaggggctgcatgactctcatgatcgaaaataacgctttggctctattgcctttgacgttctcatttcatgcggcccccttcggtgacgttccaacgaatcgagtgactttcttttccaatccgcttccatttgttctcgctcgatctgctcttttgtttttcgacggacttaatggctggcttgctttcttcctgagaacgattgttgctgcggaagcggaattaaagcaaatcttgtctttcgacccacatgggggacagactacagcttctatacctcaggcatcttacccgcctttgtattcatccttgtcccttcctttgccggttccgaaccgcttttgtttgactttcttgccctctctttttcgggttgatcccacatgtaggctcgatcactcaatttcacttctacacaacaaattagatatcagaacatcaacaaagcctacggagctgacactacatatctatcgatggacggcaagatggatacagaattccctttgacgagaaaatacagttcggtaattgtttctatctctatctacgatcgttctctaagaaaacaccaagctgaattcacattagtttacatccctcgacctcgtcatttaatctcaatgtactgctgacttacaatcgtctttgttcactccgttttgttctcaccggcagcttcggcagcctctttggccttcttctcggccaactccgctcgggtcaatccctctcccccaaaagactctgctcaagtaggagtaacagagataccaattcaaacattcgagggtgcgtacgtgtcagaaccagactcagtttctatgaaataggacataatgatacaactccgactcactaggaagagaggcaacgataggagagctggcgagtcctgatccggtcacaggagcatattgtggttgctaatttcgataagaagggaacagatcagttcagctgtcaaggaatgaaagcatgtgggcatccagatcagctgtaaactagatatacacccacgtcagacatgtttgtttagtatatatatgtgggtctccgtgtatggatgtgtgcgtgtgcgtatgtgtgtgtatatgtaagatgtagaaagtgagatgaagtacgcaagaccaagtggcgatggatggattccttttaagcacataatagatggcgagtcaaccactgctcgataagggttcgcatatacgtctgacgtcagaaacctccgtgaacgcatagactgcggagcctggctatcccgctcttgctcctcatcttttgctcatcttccatctctttttcccacacgaccccgttcactatcctaaaagagaccaccacatcatactatccatccatctcgttagaaaaaaaatcaatctttacatcaaaaatgtctcctacctatactatccaggtatgttctgtggtctatgcattctattcgagaagaatcagtagccagttccagttcagatcttttgtggagatccccatcgctgattctcaatcctaaatccaactgtcgctttttttccctccacggtcccttcctttctactcgcattcttaggttaccggaatcagtcccgagtctacacagaccaagcttgaccagttcttctcgttctgtggccggtgcgttcacagaatctggtgtgattgccctgggattgatcgaatttgggatactaattctattatcttgtgcaaacccttttttcttttctggtgctgtcctactttctcttggggtttctcaatattcgctgcagaatctctaatattactttaacccctgggcatgacggaactcagtctgctaccattcaattcgaaaagggtatgctctgttctttcatttcgttcaaaaaaaaaagaaaaagacaagatattttcctttctagtctgcatacctgcatcgcctccttgaagttcacctacttacgccttttatgaccttttcttttgttagaatcggccgctaagactgctcttcttttgaacgagggaactttggacggagctcatctgcacgtttccagtgagtcttccttcttttcctgttcccaaataaaaggtggatcattaagaccgatttattactcttttttgtgtaggcggatctctctcctcatcctcttcagccagcggggatgataacaacatcagccaggaagacaagcccaaggtgcgtcgttccatagttctgtgtcaaccccgaaaacgatctgattatattatttgatttgaaatcaggctggcatcatcgccgagtaccttgcccatggttacgtgctcagtgaccagattgttgagcgggctatcgaagccggttcgttcaaacttgctgttcttgccttacaggaactttgacgctaagatgctgcgtttgcgttatatagataagaagcagggtatctccaacaggttcctttccttcatcaaggatcttgattccaaggccggcgctaaagttgtcggacccgagcagaccatgtaggtttaatcatgtttgttaagttcgcgtcgacccaaatgactaacctttgttgtgttcatgtctttctctttcagctctgctaaagcccacgaggtgatcgaccccattgtcgctcaggtcattggtcgaaccaaggaggttgaccagcagcgaggaatctcaaccaaggctggagactactattctaaggcgctcagcacgcctatcggacagaaagtttaccagttctacaccgagacatctaagcaggtcgtcgatgttcacaccgaggctcgacgaattgccgatgtatgttttcttactttttcggtatgttatctgacatacgagagagaacaagtcgctaatcgctcatctttttgcctactgtctcttctttccttctttccgtacctggttgaaattggtctcgttatattggtttaggaaaagaagaacgctaccactgccgctccttctgctacgcctgagacttcctctaccgaagtcccctcgtcatccacgcttcctcctgccttggccaccgccgagactcctgttggacctcagtagcctgatccaattgggtatcaccaggctgtttcgttcatctcttgtgcctcttcatctgtctttctcgattgtcttctaacgcctctgctagcctaatgatgttcttcgtttcttgcactttgctagtactttagatatcatcttctttgtatcttttctcttcccgctccatctttttcttctattatttagctgttttactttcccttatgcccttttccttttctttttttcctggtggcgaacgatcctcatgatcttgttgcctgagatgccgatcagcatgtcaaagaagaatagtatccaattttgatgggacatgaatgatggtgaaatgcccgtttgagcatcgattcgccttttgctcagtttgctaaccgtcgataccatctcgaggcaccaactggaggatagatctcctagcgttgagcatgtgtgtactttcaaagtaacttactgataaactgcccaaagaggtatcaagagaaacagatgaaggcatatgagtactggataaagtcagtaaaagagccatctagcaagatacttgacagaactaggcagctgaaaagttcgccatcgcacgggattctccagctgtacctcaagaagggagtaagccgtcagagtgaatatgtaccacagctgtaaacgttacaaatgtacattgataaaagcaaaaagagagaccaggtgtgacgggagagaactaccgacggccgatcaacccaatgatcattcattaccagtcaaggagtatctagctgcaatagcttgctgggcacgtcagatctagttaagaacagaacagggacgaaggcagtcctgtacataacaggaagaaaacgatgtgaactgaatgaacataacgttgtctggcttgtaactgtcttatcggccggcaagtggttacagcatgcgtcatcagagtaaccatctttaagaccagccatatgctcttctacctcatgtccctcatgggaaacagggataagaaggtagcagcattccatcaatcttttttgtttgcacattcattgcctttaccaactgggtagagatctttctctccctcctgctgtctctcaacacttagaatacgcatacagtcctccaagaggattcctccctgtgacctccaatgcccatatttccgatgtccgatcatagtacaaagcccatcaagcctaatcgcgtttctccgaactcgatgccagttgattgtgagaaaccaagccaccccctcttctggcttgttcttgcttcatcctctcttgtcgtcgagttggataccgaatgatctgacaaaataacatttcgctctgtttctttcttcacagtatccgttgaaggaactcaacgaatgggagagagctcccatcctcagttgtaccatgctgccgtcacggtcgagtcgctcgatgccgaaggccttgggacgatcgatccggagacctccgaagaattggtaaccacactctctctctgtgaacatcgagatcgatccagatccctctcgggtgcttgttagttcgcacgatgctcatcaattatgtgtgtcttgacttgatgccttcatgatcacacagctctacacatttgatccaacccatgatcacactcatgggaaatcggtgctacccaaagctgctgccattctcccgaggactgatgaggtgcctgcgctaactatgccaaaccgagatgaatcagtagcttatgcaaaaagtcgagaagacagtcgacttgggaaacggtggtggaaacgacctagtccttactggtttgtatactttttcttcttctaaatatattgtaacaggacgccaggtcaatttggaacaagaaagatgtatagtggatctgacattggcctaattgatttattatcaggctgctcgtcattcaacttggaagtgccttatctatgggtatgggcatagcgcccaagacagagatcttcaatcatctcgcttggtgagtttgtgactctatattctttagatatatactcctggaatggcttagagacaagtttctgaacacacgttcctctcctgccttgcttctgcacagcatcgtccactatccatacgcctcagactttccaaccaccccacctgttcaatccaaccctgtgattccgagtccaccgatgccttctccctcccaaccagatgaagttgtctcctcgtcttttgaccagactagcttcgctctcacacgtatctccatacgaggtctgtttgactttagcatcgatccaaaggaaaacaccaaaggtggattaggatcggagggtcaacccgaacggtcggttgatcctttgttatgtagaaaaagcccggtcgtccaggcgtaagttcctctcttctgtttcgatattgtctcttcctcatgctgaatcttggtttgttctgtaattcatatagtgccgctgcgaaatttactacttgtgcgttgacttgcctagaattaaaactcaacttacctgtacaacattaagatagatcatcttctctgcgccttttcttttcttttcaagccatgagcatcttccaaggtgtattggctgctcttactacagggtggtggggtagattgtctgacaaatggggaagaactcgaatcctttcgattgcgatggtagggattattttcaagtgggtcattttttgatgtttgtcctttgttccgaaaatacaatggattcactgactccgaatacgaccttgctacagtgatattgtgtttatcgtgacggctaggtatcctacatccgttccgggtggctatcgattcttgttcattgtgagcacatgcttggcttcgtgatttgattgatccttacaaaaataaacttactctcatctctatcgctttcaaactcaagggtcctatctttgacggtcttctcggaggaatgcccacgctgtctgcgacgaatcaagcctatgttgctgactgtactcccgatggaacccgagctcaaatcttctcccgtttagtaggcgtgatgatggtcgggtttgctcttggtccgattgtcggcgctgccatcatccgctactcttcagacgttctttcggtgttctacgtcgcttgtgcgctccacatcttcactctcttcatcgttttgttcatccttccggaatcgctgtctaccggagcgaaagattcactggccaagatggctcgggttcgagaacatgaaattcaaaaccaggaagaactcgaacgtagatgggaggaggaagaagaagaggatgatgttctcgcagggaacagcggatggagtcgattgagcggtgttgttcaaactcgggcggctaaacggtcaagaggagtaattcggcgattagtcaaacgagtgtttggtttcctaagtccattggcaatctttttacctgtagtggatgagaatgatccaaaggggaggaagaactggaatttgacatttgtggcgatgggtctctcatttttgatgtttatgatggtttgtcctttccttcttcatcttgtttgagtgattgagcagacgatcagttattgagatgatggacctactttatttaatccccgtttacagggcgttctgagtgtcaagttccagtacacccagcttatgtttggatggggaccagccgaacttagtccactcttaactgtcataggctccttgagaggggccaacttgttgattttccttcctcgtaagtggttgcattttaatatatcaatcaattcggttttgatcagaaagcgacgccttaaataattctcccttgattaatcgctactctacgattagtgactgtccgatatttcaaaccaaaacataacggaaagcgtccggaacaattttcactgtctgataagatctcagactctcgcttcgatctaaaactcatccaagtctctctcatgctcgacatcatcgcctattttggtatcatcctgttctctggcccaagattctttatcgcatccaccatgttgtctactctaggcgggggcgctggacccgcccttaactctctcgctctttccttgctccctagctctcggatcgcaggtaggttgtttggagcgacaagtgtattgtcggctatagtgagcaccgtagcagcacctttgctgtttggaatcacgtatgcatatactactagagtcttccccaaagccatctttgtcctctccgccactaccctttcacttgcgctcttttgtacgttttgtggattattttccagtcttggttggtcttataaactgtgcttacggagcaacgttatgtttgtttttaagctctctctatgattcggctagacagaccattacctcctctagaggatgctccaactgagcctctcttggcagaaccgcgcgaagaagagcgaggtcgaccaaggacgccaaagtctgttaacggtagaagcgatattagtctgagcacgcagtgaccagtcaggtagttgtcgtttcctttcttgaagctgtaatcggaaatgttctgtctttgaggttttttttgtacatagtttacgtttctcttcaattcatcaacgggttgtctctgagttgtattaattacacttatgtctggttcatttacgttaacgattttctcaccttatctatcctttatccttttatctgactaattcacatcaatgtactttttctttgttctgaacttcttctcgctccctgatatatgtcatgctgtttgtttctgatatctaacggtttcaagacttaaagatctcgctctgtcatggttcattgttgatattcactgggaattggcgaccggcggcgttacgcgaaaccttcgatcacacaagctctccctgtttggccctatctgatctctaaccatctacattctcatcaactcaatcagtccagatcgcctatcgcccagataggaacaaagatgtcttcggcggcttcatccctgtcaaggtcaaagatagcgagaagatcgacttcttcgtatgtgaaaccggcagtgacgatgcatgaacctattgttagtttgactcctttttgatctcacttccaaacttggtcgagcaccttctcccttttgtttcgctcaagattcaacggaagctagatctatgtgaacccagagcctttggatataattttgcttattgagtctgttttctgtgagtaatcacaggtccaactgagtttttggctacatgatgataaagattggccacaccgagtcgtgctgaacccgaagagtttccctatggctaagcatggggatgtcatcaaagtaacgttcatcgaaaaagaacataccggcatacgaaccgatgatgaggatagtgggagtgctcctcatggtgtatccggttctggtctaggatctgggtccggagctggacaaggaaggaaagcagaagatttcttattcaagttcgacgcagaagcattcgatacgttgaagaacaagggtgtacagaatttgaatgtacgtcgtgaccacactcgatggtgtcttctgtcaatctttgtatctgtgttcaaaaactcaagtgaaaaagctgattagatcttccttgtggctttcagatctcgatacataagacaccttgtcagatttttggactgaatccaaatagcgggactatcagactagagatcgtaagaacttcaactctgctccttcgtctatatacgctatctctgacgtttgttcaaacctctccccgtattttttaactgcttaggttgacccagcaaccagaactgcagattatgtgcgtccttttcaaaaccagttgtgtgatcgagaggttgctcagagctgaatagtcggatttctattttgatcaggtcgagatcctattcaaggatcaatacattggaagatccgacatgtggcgtgtaggagtgagcttggaagattcatgtattcacgtaggacagaaggtttgtgtcctacttgagagaatacaacgtcacatgtttcccgacgataacaatcgctgacattgaaggttgatgtctgtgttttcagatctcatttatgggctgcatcaaggccgagatcaaaaacatctatatcaatcagcgcaaggtcaggaaatagacttatcatatccagcttgaaacattgagacgtattgctcatatgactataactctttacgttttcatcgaaagatttcatcaagcttcatgtccgcccgaacgaagagtgagtgccaaatcatttagactcaagacaagacaactgttaatcactcgagttactgtggacagcaatatacaggtcagcttcagctcgatgtgtactattcttacagttgtgtaaggagatgtacgaatttgatgaggatggagaaagatattatgagaagatcatggttcgtctcttaatcttctggttccatcgagtttccttgaagtgatgattcgcgcatatcaggtcgttctgtctgacgagtactcctcatttttatatcatctttgatctgtccttccaaccaatacacggtttgatcagcatgggtttcttccggaactattcgctcgatggcaagcattaaaaaccaaccacgtagtcagcatcattcttttctccagggtctactatgactctgacgagtgagttctccctagacctctattgtgtaactatcctcaaactacttcaaacccgggtttcttaccagatagacatctttgtctgtaggaaagagcttatcgatgcacccataggatacgatccggactctggatggtacaaagactttgtacgtcccttctgcctgcttccttcatatcaatcttgctttcttagattatgagttcgatgttcaatgcatttcttcggcattcatgaaaacagtacaaagtctgtgtggacatcgaatccaatctgaacactcgagcagtgattacccagctcaagacggagcttgcaagtttccaaaaagaagtcttgctagatcatcatcataaggaggggcagaaagcgttgattttgggtagtctgtcttatgtacgcataccatcatctccacatcttgccgcgagtataagcgaacaggaagtaggttagacagggaacgaacaggcttactggatgatatcgtgtcatctcgttctctcatttggaacctccaacaggctttccagggaaatgtattagaagctttgaatttggccttaaatccatatgataggcatcgagtcgatcgtgatctaactcgaacgtgagccacgacttggattttcgcatgacttttttcttctttcttctgactagagacaatgttcgtttcgatgtctcaatcttcagaggcttggccataatgatcataactccaggtaagcgcttgtctttctggcggttttgatatacatatgcaagttctcttatcaggtttttcacaaatgtaggaactggatacttcaaggtcgacaaagagtcagtttggagcttatctatctatcaacgttctagaactcaagactgattgccctaataattatgcaacttaagtttgctccgactgacttccgatagatgcaacgatcatggattgggtattgagcttagtatgtctctgattcttacatggactagtatatgttttatcatctgttaatcatcttcattcttgtctttagtctgcctcaacaagatgcctctgcatagcgttcctctattcagtttcaaaaccgcaagtgccaaggatccgacagaagagttcagaagtgcattaggtagctggtgggatcctacaggaacaatcaagccacctgtgggcatgagagatcctttgttctcagatggaccggccactggaggagtcgagcacgtacaattttaccactcagttcacttctggatttatgcctgctattggagcaaaagtagtgacaaggttagccgagttccatgatgtctcatcggattcaatatcacataaccaagactctgacacttgagtttgttatgccgtcctttgagcgaacagctttatcgaccagactcgtttatacctcgagtcaagatggctcaagttcagaatttgggtgtgttgaatcatggtgcgtgtttgctgtttccattgtagatttgttctgtcaataacatctgtgattttctggatcggtcattcagatctcactcctattgtgcttcccttcttggacgatgaactgcatctcaacgactctcatgtctcaaatacatccagtgtttcggatgaccgggtcaagcaacagcagtttgacgagaacatctttggggattcgaaacgccggatcccgaataggcctgctaatagaagtcatcattcagcgtccagccgtctacaatatcatcgttctgcatcggtacatagttatccaaaccaagaaatccctgatgaattttctcatcgatctgcctcgcctcaatcctccatgttcggttttgggggttcatccttcaaatcccagtcccttttgcagaacgccttcagtcatgaacgtgccagacttctttcagcaaatggtcttccttctgccaatcctctgtctcacaatctccgtccttcgagaaaccaacgagatctttctcctagcccgagatcagaggatcctccggctttaccaacttttgccaagcgacagcttcctgcccagaacacatcggcgttatctgcttcgctcgtacctcctaatccgatcccttcacgaatgacaaatacatccagaacgtcatcatcaggatcggtggcctcagcggtaaccgtcaaacctcaattcaaagacaccgctaaagacctgttgaagcagttgtcaaaagacgaagacgaaactcatgaacctggaccagctgtggaagcaccagtggtgacgaaaaaaccatcaaagccgaattttgtctcaatgatcggttctcgcttcttctatccatttgtctcttctaccccttctacacctgcctcaaaagcccctgcttcgtcgtctgtatcaagtactacaccatcagcgtctcgtccagcctcacctgctccttcatccacatctcatcggtcgtcttcaaaaccgagcaccgtaccagtagtcgacactaaaccaatgtcttccttatctaagcagaccaaagggatcaagccaattccttcgacgccggaggtcaatcgatccgagtcaaacccaatgattgtcattccacaagcaattcctcgcgcaacgccctccaattcggtccatcccactcctcgaaattcctataatgcacgaatgatggaggcgcctgctcactgtgctcatggtagtaacgctaattttgatcaaccacaaagacaaaatacgacgcgctccactcttcggccgtcagccagtagtaagccaaatggatctgttgtcaaacactggattacattggatgagaacagaagatggcagcatgtcgtaccaggaggagtctatacccatcaaatcaaatggaaatcgatggttgtggtaagcacatagcttcatgtcaatatctacccatgactctgagaagatatctaagtcataaggtctttctcttggatcatcatcacagccggcctgtttgcccattacagccacagacctaccaagcgatgaatttttagaggagaattttgttgagtactctgcaaatgtgcgcgtttttttctccttttttctcgactgctctcaaaatttagcaggtagacatgactgattgactttgctttttctacagtacccgatggagtacaaagatgaaagtcctttcatcaagcccaaggatgggaagatcacgatggagatggttgtgagagagatggcaatgcagcggtgagctccacttgtgtgaaacgctatgtggttgtcaatcgacccaactgagatatctagttccttatcacagtctcgcacaagggtttcaagctgtggtagcatcttctgattccgttcctgaaattcctctgccagagccaagtttgatcagggatgacagacacgtccatcgaaaacataggactgatattctccaaactgaaaccatccgtaaaaatcgcacgactatccctcttcctggaggagcgtctgaagctcttcgatcaaagacatctattttcctttcctggtccaacaccatccataggttggatatgaatgaagaatctcaatccatcacagttcgtcggtacgtgtttttctgttacgttcgcattccgatgagtaatatggtaattaatcgtggtggatactcaatggacaaaccatacgtcgacatcagatatacccgaaaacccacgtactccatagcacccaaagaatatgaggctatggtatggacgcaggggtcgtcgggcttccagaaagtccaggcgtcattccactatccagtatgtcattctcgatgtatagatttgatcacaccttcctaaaaattgatcgttgacgtgttcgacctataggcagcaagactagcttcgttcaattggagtaaactggatgagaacatcataggaaacgcgattggacccgctgatataattcatggtatcacgttatggcgaacgcgttatatcctcatcccttccgagaaccgacctagccctattgtgctcactgggaccaactcacttggagaaacgttgagcttagatgaggtatgttcaaaatcatcttgatgggcattatataccaactgatcactttgtacaaacttctcttggatggcagatttatgttgagggggctcaacagcttgtcgctttgttcgcaaaagctcgatggcaccctagtgatgaaaaccctgaaaactttaagaccatcgaacttcttcaaacaacgctagatccctcaagtgagttttttggtcgtcaagaggacgcggcctgttctgacttgcaaactgtattcttttgtttctagcgtgttggttggaccaagtgttattgaaggaccttcggagtcggcaatctaaagcagcccctcaacggaataaactgttgattagcaagatgacgttgcctcagctgatgaagtttgtttcagatccaaaaaccggcattcctttgaaggacttgttctggaactttgatgtttatgtaaggaaaactgatctgtatgagttaagccatctcttgactatcactgaagtagcattttcttcaattttaatcgacagcctgacgctttctcgggcgagcaattagtaaattggctttgtgaaaacttcagagatcttaccactagagagcgagcaactgtttggggctccaagttgttcgatgaaggatttgtcgctcatatccataacaagcacaaatttatcgacggtatgtggagactcgataattcactcagtatatctgaccactcgcaccaaaaagacattcttgttaatctgataattatcatttttttcacaacaggaaactatatctaccaacttcatcctcctgatggtcctcctcctaaaccgatccgaagttggttccggtctaaatcatccagcagctctgccacagctccttccacgcctacgggatcgctcaaagagcgaaagcctctcgagatgcaatctgatatcgtcattaaccttgatcctcaaggtcgaagcgatcgagccgagacggcttacttgcattatgatgtggctcataactataagatcgggtatcactttgaaatttcttgggttggatccaccgcgcaattcatcgaagaaatgcggcagagctggtcccaaaagatcgccaagtatggacttcgtttggttgaatcaccgatagagcagatcagctcgatttccgtcagaaatgcttttagatcttgtcacaagatcaaattggctttgaagccaccaacggaagaagaatttaaccccaaccttccgttcgaccgccggccgacgtgctattactttgagtgcgcgcttctcaccgatttgggattcatcttggacgttggtcttgtttttttgattgcattatatgtattgaatcttttactaaattcagtgctgaaccttgattttgaactggctgtatttatctcaaaaaggctgagtctgataagcactttgtcaagaactccgtcaatctgcattatcaccgaaaagcggcttatgattactcgcagtcagttgatacttttacgtgaccgaagcacatcgtctcactctgtctcacaccatggctcttctctcgaatctaattctctcttcttctttttttcaggttcgtccataaatcgggactcgcatttgtacaagtactggatgatagtgagggcttcttatggcttgaaaacagtacgtttttatctttaatcgctacccaatccctccttctgttttttttttaattcaatgtatgttctctcaatagtgctaacgagaactttttgttttcctaaaccctatttgcgggttcggtcactcttctgcccgggtagaaatgtttactgagacgacgaaagaagctaagagcgcgggccgaagtacccgggaacgagcggccgagcttctggctcatatcgagaggatatgttcttccccagaggttttgcaggttcattatgatacagcgaggaaagctagggagattgagcttcgatatgttggctgttgattctgagatttcattgaaaagcgccggagggatttccaaacgactgatcttttgtctcagatcgattcgtgttatcaaagcttttgtctttattctcggatcagaattaggggaaagcaagaaaagaaacaagaacaagaccaagaccaagaccaagacgtggagaacatagtagaagtgtatatcccaaattcccaatctctccgaagaaagcaaagaaggaatacataaaaagaagaaaatgacaaagagagaaaccagggtgaagaaactaggaaagaaagagaaaagtacatgtctagagaagaagagggaatcaacaaaaaagatgtgggagaggcttgtctttcagaggttgataagatgaacagaggagatacaaaaagcggcggaagttgatagatagcgaaaaaagaaaggggggggaggttaaagaggagaaggagatattacaatggaatgtgagactataatgatagaagaggtcaaccaaacattgaacgagaaaggatcaagatataggaacaggggaataaagatcaaggttgggtaaagcagaagtaagagaaagaaagagaaaaaaagtcctatttggtttagacgagagggaaaagagaactaaaatggatcatctatttgtagtccgagctgagaccttctttgatttctttctgggtgatagcctcatctttctcttcctctctgatcatcgccatttgagcacaagaaaaagagaatgaaaaattatgagcgattaaagtaaaaagaggcaagggaaggaaaaagtgagggagaagaaagagggatacgaactgtctccattttttactcctctccaccgctcgtttccaacctttccactttcgttccctctgatcctctggcagctttggttcaaactttcccatcgccctcgcattcaccttccggagcgtctctggtttcgaaatgtcccatccaaatagaccgatggcgcttcctgcgagaagagctgatcctagagcggtcgatctgaggcgggtggacagtcaaaaggaagtcagatactatattagtgaccgtcgagaaagggcgacgttatcaaacaaaaagggaaaggaaaggaaaaaaaactgactctctcatcactggacgttcaatattgaaccctccgatatcggcctggatctgcatcgcatgatcactgttggtcactcctccgtcgacccgaagcttcttcaacggcgtatcagaatcggcccgcatggcttctaagatagctcgggtctgatggtaacggatgagaaaattaaagcagaaaacatgagaagatttcctcagagtcagcgtttgtgaatcagaatgaatgtcagttttgatggacgaaagggacgaaacctgataagcgatagcctctaaagtggctcggacgatgtgcgccttggtcgtataactcgagatcccgatcaacaaccctccggcctcagtatcccaataaggagcgagcagaccagcgaaagcggtgacaaagtagacacctccggtatccgagacttgagatacgagatcatccacgtcagaagatttatgaatcagatgcatctgatctcgcagcctgtacggaaagaaaaggcagtaggataaaagaggcttcagagatgtagggttaattgagaacagacaagaaaagaaaaactaaccatttgatggaagctccagcaacagctacacttccttcaagtgcatacaccggtttcgagtttggtccggcttggaatgcgacctgggatccattttaaagacgcagtaggtcgagaatatcatgaaattttgtcagtcactctcttccataatcatttatgaacagaaaattaagttaaatgaagataaatggaactgaattaaaactgtcattgaacgcacagtacttataagaccatgtttacttcgaataggctcatctcccgtctgtttgaagcaattaaaaaaaaagaaagagaagaagggaaaatcttcaacaagttgccccaagaagaagagagagatccgacaggagggaaacgtacgttaaatagaacgaatgctcccgttccataagtcgcctttgcctctccgaccgccaaacacttttgtcctacgagcgcggcttgttggtctcccacaattcccgctatcggcacaccctcgagcggaccttcgaagattgttccgtagacttctgaagatgatctgatttctggaagcatgctttccttcagcccaaagaatgccaagagcgagggtgaccaggagatcgtttgtaacgtggtgaggagcgtccgacaggcgttcgagacatcctggatgtgtaaaccgttctcgattcctcctgtcagattctgtatgtcggaatggtcacaaccatagaggatagaacgagacatgtcggagatggatccgagggagcaggcaaaaatttagtcaaacgagtctagatgtcggtgggtgagaagaacaaactcccaagacgtacatagacgagccaactgtcgactgttccaaagcacagtttgtcttcctcatgagcctttttaatcgatggatgagcatcgatcatccatcgtagcttgacggcagaaaagtaggttgatagtgggagacccgtgctggatgatgccgacacacatgcatacaaacaagggtgtcagacgcgagtctttctgatgtctgccggaagtgattcacttacagctctttgattccctgggtgcccttcagaaactttttctttctgccttccccaccgctaccgccgccgcctttatcatcgtcgacctctatgagaccttcgagcttcaactcgagatctgacccgatgatttcgatgccgacatcatccaacagccgttggtatcggtgaatctctgaggccgtcctcgagtcatcccatacgatggcgttgcacatgggggatccggtctccttgttccacagcaaggtggtttctcgttggtttgtgataccgagcgccttgacggactctcggtcatagccgaggtcttccatctcttccaccgcgccttctatgcagtcgtatacggattcaaggaggtctatcggatcgtgttcgtgccatctgaagggaaccaaataagacacgagtcggggcgggtcataaaagaggagggtggggaaggtttgggaggaggaactataggtaagtctcgggtgaagaaagaaaagaaaaagaatagtctgaactagatgacataccctggctctgggtagtgttgagtgaattcgacttgatagctagatacaatattggcaaattggtcgactatagattgtgccaagggtcagagagaagaggatatagagagagggagagggagaaagaaaaagaggaacagggcgtgagattaagtgttatgttgtgaatctatggataaactgatcggacagaacgggaccgacatatgatgaatcttgtggaggttgttccaacgtcgagagctctgcgatgaatgtcgaccattggcagagcagagcagaacggaagaggagagaaggggaggtaagaaaacaaggtgaaaaagagtcggccgtgacgtcaggatgagccagaggagaactgattggacaaaggtacaaatcatagaccgaagggtctccactgatgtagaatcaaggaaggagacatacccgatgaactctgctttgtctgtttgatcgatgaagtcggggagagaacggaagcgaggtcgaacggacaaaggaccagagccgagattgaaccggagagatggttggattcggtaccaaaccgagtggagtgacgacgaaagacgagggtttagcgagaaagaaagacaagtagaagaacgcgatttctgtcagcacaacctcaggtgtgaccatgtatgccctgctcgtccagaaaagagcagagagcaaagagaacgaagagaacgaaaagagaccatggctcgagagtggacggacgagaaaaggagaattttaaaaataaaggaagagaaaaaaaggccactaacgactgggactggccggacgactaggcaacctgctgggtggtaaactctgagcggggctagcaggaccgttctgacttgctgagactgaggacaacggattcatagtatctggacaggactggggaatgtgtttatggctgatggttgatgagttgatggtcgttggagatggcaaggagaccaagattgagcagcacccagaacgtcggcggggcgtgaacccggtccgctttcgtgccggagcggggcccgtggttacgggcagggccttagccgggtatggctcggtggttacggggtggttatacaatggttatgatgtggttatgatgcggtcaaggataaccatgaatggttatggatggttatgaaacgctcgtcaagtggctacgaggttatgacatgcacagcgtgtgtggcttcgctggcgtagcctttcaccgctcagactcacgtgtcagtcacactctcggccaattctctgcttactaagcaaccctcggtgctctcaaccttcctctgctctctcttctctactcgctcggttcatcccatccgttgaccgtccgagaaagatgatccttccagatatcctcgcaaacactcaccatcagccgacagtcaacccactgacggtaatcacctcatcctcgcactctatctcgctccttccgctgatcgcagagtatgtctctctggcttcggtcgaccggaagacgatccttgtctcggcgttgtacgatcctaggaaactcggcttcaaccctggggtcccagggttggtaaacatcgatctgtcgagtttcattcccggtttcatggacgaacaggatgaggagcgtggcaggggtggctttcaggatgttcttcagaaaatcgagctcgctgtagatagtcgtacgtggtttacttttcgttgccttttctttctgtttctctttttcttgtaatgtgttcgatccttgctttcaagctgatctctgacggggatgaacgttttttgtgtttgtttgtttgtttttcctcatctcgtctgctctgtgctgctacagtcgggcgctcgccggtcaccatcattattgattcgccagccaccttggcgagcaactttggctcgaccccgctcttcctcgtcttggtccagcgtctgctctcatcattgaccaagattggtacagtcctttcagttttctgttttgtctgactcgcagttggttatcagtaagactgaaggatcatttctctctttttttatgtttatttgtttgcctattcattcatccgtccaaccaaccattgatcgaacccctcgcattcagaggcatcccagttgatcttaccgctacctccttcgtcgagcctgttggctcctttatcgagcacgacgttgtatccgacgctgaatttgctcacccttcatcctcccccgctcttcccgttcatctcccagacgtaccatctcctgcccccaccgagcgaccggtcttcttcgtcgtcgtcgtcgtcatcgatccagccggcctcaaagttcttcaacattctttcctctctcacagatcgtcaccaggcggacgatccgtcgtgcttgccaccggacggctcgtccggctggtcccagggattcgtggtcgagctgctgatcagaagccggaaaggtcggaacggggtcggacggtacgtcgaagggatccgtcgggtggacgggccgtctgtgggctcttctggactgtcgaaagcacgagcgcggtcgatgcgcgctgtcggatggaagacgatcgagggactcgatgtccttctctcccggggtgaggccgaccttggtgggtctgatccgtcggcgacggcgggggcggaaacgaaacaaagcttgccgacgtcgtcgttcaacctcggactgacggactcgcagaaacagtccagatcgacggtcccgatcccttatgcgcacgaaggcgaacgatctgatgatgacgacgacgaaggggcggatccggccgagtcgactgggaccggaacgggaggcatcttctacgagccggacgaaggggacgacatggatgaggacgatccggatgaggacctagagttctgagtagagcggagtgggagagaaaggtcggggaccgaaagaacgagaacgcacagatagatcgacctaaactagatgtcggcaagaaattaaaatcgatggatatatcatgcgtatctttatgtgtgtgtgtgtgtgtgtgtgtatatattacgtccgtccatcttcagtcgaagtcttctttctgcaacagatggattgaagagaattatgaacgagaaccgaattcttagcgcgtagaaaatcgacgaataaataattaaatatataaatttggatggagatatttgacccaaccctagcaagaaataacaatctcgctctacagataaagcccgggcgggagaccatcctagattgaatccttctctatctctatctagcagactcaggataatctagcctttggggggtttcattccgcacgatgtttgtccctcgttctgttaagcgttcggtgagatccaagcctgcaattgggtctgcttcgtcctttccagcagaagcggcggcggtaacagcaccggtaacggcaccagcaccagcaccatcaacacgcacgaccgaacgcgtcgaacccggaccgaacggagaatacgacgagatagcaagcgtgatggaatgggtgttgagtgatggttgtctacagatcgatccgaacgggatgggtttcgccaaatggatcgatcgtcatcgtggttgtttgtccctcctcctcttcttctttttgttccttttgttttcctctacttttattctatgctgctttccttctatctgtttattcgtcttgtttgaggagaaactttgacaggagggaacaagaaccaacaagctgatatccatctcttcacacttgtcaaaaaccacctctgctgggcggggcggccaagaaaagatctaccgatcaaccagatcctctctgacccgtcgttcggacatctgtccgtcccccaaccggtgaacccacacgcgctctcgctcagccttcgacaccgagggatcctccacggccggctgaacctggtcgagccaaaagtgtttgggagcgcgaagagcaggaaggataccgagggtgggctttgggtcggcagggtggattacgagcacgatgcgttcaggcggaaactcgattcatgggatgcactttccaaagagatgtcggatgaactcgagctctatgtcgttcgtcccgatttctttattttccttcctctttctcttccttgatttgtctttcttctttttttcttctttctttctctcttttttaatttcgtttcaaagagacaaactggtggctaaatggttgcggggtttgtgtatttttcttttcattctatactttttttaaat

SEQ ID NO: 791 - DNA, 374 bp, Xanthophyllomyces dendrorhous
aaaaaaaaaaaaaaaggaaaacatcccacctagccaaaagacatacgttcagatcctctcgttcgtcaacacgctgttcggtccatcgtgtattggtgaaggggaaccgttccgggtggcgtctctgtcgtttcctttgaaagcgaggggctatgcgtttgtgtgtctgccgtcgggacaagaccgggaccgggtgttggatgcatggtcttgggagggggcgcgcgagcgggcgcctgggaaagggaagggcacggaaagatcgggcgagggaccgatcgagggtctgcagaaagaagctaggttggccgggctgagatgtctgcctaggtgagtgtctctggctttgatgtgtgtgtgtgtgtgtgtgtgtg

SEQ ID NO: 792 - DNA, 401 bp, Xanthophyllomyces dendrorhous
ctccaggacgtcttctactctgttcgagacaagacccgagtgatcgccgactcgcacgcctcgctcgcaaagacggtcgagggttcgatcgtccagcacctccaaaagctccgagcagagatcaaggctcacatcaagaacgtccagaacgataccggccgactcgccgccaccgtcgccaaggagcgagagctctcgacgaagcacatctctgacctcgccagagccatcaccatgctcaagaatactcccatgaacgtcgttcctaaggatgacccctacgcccagaacactgtggtcctcaagcagttgcagaagcaggttagtacaatcatctccatttcctccgcccacgatttccccctctgtttcttcactttcaatttcgcttacttccaacc

SEQ ID NO: 793 - DNA, 20461 bp, Xanthophyllomyces dendrorhous
cctctaaacctacgttctacctccccaggtcaacgaggagaacgctttgcaaaagtcgatcatcatcatgcagcagaactctgctcactttgaggagggtatcgtccgatcgattcagtccgcctggtcgacgttcgacgagtggcagggccgaatgtccgtctctgtccaagagacctggaagcacctcggcgtcgccatggcccagatggagcccgacagagagtggatcgcgttcgccgccaggagcgaccacctgttggacccagagaccccgctccgaaacccggaccacatcgattaccccggaaaggacgacccctcggtcgccccggtccacgtcggtctcctcgagcgaaaaaagcggttcacaaagacctacaaagagtcctactacgtcctcacccccgccggatacctccacgaatactcctcctccgactcttactctcacaccacccccgtcttctcgctcttcctcccggcctgcacgctcggtcccccctcgacctcgaacgcgtcccgatcccacaagttccacatcgaaggcaagcggtcggccgctcctacccaatccgccggtggtcacattccgttcaagattcccggccagaacgagaccgcctacacctttaggagcaggtcccatgatgagatgatggagtggtggaacgatctccgcatgctcgtcgcccggtacctcgtcgcttccgagcagatggagaggagtggcccggtcgccgccgccgtccgatccgtcggttaccgatcagaggaggaagagtccgaggacggaggctcctccgtcgaggacgaggaagagtacgaggagaaccactcggtccacgagacctcggcccaggtggtcgagactgaccaacacccggtctccctccaccaggccccccagtacgcccaggccgagtcttcccacacccacacccacgccgagacctccctcgcccaggccacgagcggactcgagattggtgcgaacggatacccgatcgagaagaagccccagccggatgtccacaactctaccgcgctcggccagcccatcacctcgaccggagactaccgaacggagaccatcaccaccacccaccaccccgtgtcgaccggtgaggagtcttccatcatccagcccgccggtaccaccactaccaccaccaccacttcaggcgatcacatcgacaacaccgatgccgtctcccagaagggtcttctcggccgattcgccgagggtatgggtttgagccgatgattccatcgtttctttttaatccctctctctctctcgcttgtctgcttttttgatttcatgtctgcaccggtcgtctcaatcttgatcaaccgtcttgttcgttcgtcctttggatctgctcttcttgttctcttgtcttgttctcgacatctcccttataatcatgaaccaacctctctacctacatagttaattaattctgtagtcctttcttgatctctatcgtggtctcgaacgcttgtttcgtttatctgttcgtttcctctttccctttgtcttgctctatagtttataatcagtatggattctcttctttgatcgttcccgtctcgagaggcgacgcaaacaagaaaaacaaagaaaaccctacgccaaacctgtctgattgaaagctgatcgttcgctttcagctttagggggttggctttcgttttttaaactgacgatgatgatgatgatgatcttcccaaccccgcagacgtcaagaggattgatcagaggtgatgtccctattccccgggaggaggtgttggattagcaaaagcaaaagcgaagcgaaacgaccaacaggactgatatagaggcgcgacgatcattaagattatatagcaggagtccgaggaaagcaacccaaccgaaccggaccggaccgcaatgatgatgatgatgatgataagaaaacaagtagagggcaacgtgaaactagttacacaagggatcccggcaaacaggagcaagataggaccgtatggttccagaagaccaagcgagccagtatgatcctttgaaacaagattaaaaaaataatattaaagaataaagacaatataacgcaaaacctgaaaacacggaaactatatgatactatatgtcccagaaagcagcgctgagaggcagaacgagaaaaaaaagtggagagcagaaggggaggaagaagaaaagaaagaaagaaagaaagaaagaaagaaagaaaaagctggtacgtactcgacccaagatggtccatctaaactatgtccgtccgagtctatgatacctatcgagtgtccttgtgagaacatgaaaccgagttgaatgaaaccgacatgagaagagtacgtgtctacacatatgtgtccgtgtgtatggaaaagtgagagcgaaaagtgtgacgagagagataggtgtgtggtttgatcgttgcacgaagaacgaagaataggaaccaacaggcctgatcgagggagcatcaagttttatttatttatttattttattttaataatcaatattttgttaacacaacatcacttcccactcccatcctctcgatgaggctccgaagtgaacatagccgatagcggggatcgaccgaggatcgtccctatcgacgatctattctgagaggaaagcctcgaatttgtgtttcgatgtgacgggggattcgatacgtctttgttgatgtcgttgccggcggtatcatcagaggagagtgtcgaagaggaagaagaagaagaagaagaagaaggaagagacgtgaaagtgggagaagaaagttcagagttccagatcaagggcgagccggaagatgaaccggttggttcacatctactctgtcgagcttcccgtcgagtcctcaagatctctgacgccgcatccgaagccgacacctttttcgcaccggcgctcaaatctccattcaaagccgaaaggtttcttgcgctcatccctgcgcttgcacccggccccgttcgttcctttgacgacggccgggtcccagaaccatcgtcctgtattctccatcgtccactagcctgtgagattcccgggccggtgtcggaatagagatctccaacgtcggtcatcgtcggcgctgacgttccatcgattcccatctcgacatcatccgcatcttcgaatcctcctcccaatagcgaagatgaccctcgtttcagcaccgatagtctgatggtctctaccggaccgtctgcaccgggactgacgacgccggtggcaccggtaccttctccgccattgccgccaccgttctcaacctcggtgtagagcggcgcggctgttgaaaagtaagagcccacactgcgttcactctgataagacaccgttcgcttcttggattcggtatggatgaatgccgcatccggcgaggtcagtgcaggcgtatagtggacttcggaggacgatgatccatctggcggaagccgattgaatttcatctcgcgtctcaagcgacgtttcataacaaagaaaagccatgcgaatctaagtttgaacgacaaaacacttcatgttagaggtcttgatcgtcctgctgctaaagatggtgcgctcctcgcttttgtatatcctgatctattcaaataatgtaagatcacacttacattgccaaacccaagcagacgacacagccaacggcgaggcctacgatcccagccgtgttcaacgccctatcagaatcttgtggttttgtcgatcccgtagccgaatgagccccacttgtcgtgcccgaacctggggcaatctcctgttcgagtacacggacacgttgaaactcttcaacggcgctagacatgttcgccgtcaatgaataaagagagagctgaggcatttgccatgcccccgtttgagtataggaaggaccagacaggacggtatctgatggagaaaaagattcttgttttcaatgagcggctccagtaggcttgcagcgacgaggtatcgcacttacagacattccgcataaaggcagcaccgaggacacttttcaagttttcaccaaagtcagcattctgaatgtatgtcaaacgaagcaaagaaaaaaaaggacaaccttttggacttacatgtctccctttccggctaacgcagcaggtgttatatactgtaaatttccctggaaagagaagacgccgccaataaaaccagccaacattttgagcgcctgtctttcaaattgagaaccgatttgcggaacaaaaaaacagctcactatgcaggtctggtgagtcgagtctcctgaggtatatcctgatagatctactacggatacgaggaggcaacgatgagagcgcaagtgagtagacagtccaagggaaaagctccaaaaaatggaagggttcgtacacggatgaattggaaaggtgccgatggtggatagggtgattgtcatttggattgctgtagtgcatggtatatagtctgtggggttcgatagtgatcaatcgtcagaacagaccacacttcatgacaggaaggcaaagggaacgaacaatttccatccgatgccggctgttgaccttgactaccatagatagcatctagcagatctcggttgcttgtgtatatgttttgtgctccagagtcctaaaaagaagtaaatggttcactcgtcagtcgagtcaattttgtcgatcggcctctgataggttccgacaactggcggattcagagttaggaaagaaagggagtgaatggtatgctcaccaggatagcaaccggccaagcgttgcctggtaatctactttgccccatagctatcttaacctctttccccgagacaccatctatcacagaaattgaacgaacaggaactctccagaataacggctgacctgttggtccttcgattattgaactccatgtcatagaaccctgacatgacgcgtcacatatcgacggaaggtgagatctgacgcccaactgggagggaatccttggatccgacggccgagctagggatagtgagatgaaggaggttgtgtttgaatttgttggatctttggaaccatcgaacagccctcgggaagaaaggtcttctgattgttgacgacgacgacggcggcggcgccggctcgaagggtataaccagtagtcttgtgatgggtcggtgacggggaaaggaggaatctcaatattggacaacggacctaggttccagggagattggcttaaggtgtttgcgatctgatagtgtattgtcatttcaatttgttcattcaagaaacacaaatataaggggtttcaatacttgtttcgacctaaatggagaatgacaaggatcttggccggcttacgatcgaatttccaggtagagataggcccatgactccagaatacgctccgtttctcatatcctggtttacgacatcgtaggcggcggctgattaatattcatcaagaagaagaacatacaatccaatgcggtcagacaggatgaagacaaaaagtaatgtaaagagctaagcattttcgtaccgaatgctggttgtatcaacgtaaaaacaatcgtgtttaatatcacgaatggcttcaggtagaacaagggaaacacttgaagaatggctgaccttgtcgaggaaccttcctaccggcgaactccatctggtcccaaaacacgcgtcccttgatcgttccgctaacatagtcaatcgagaaatccgtatcctaaacggcagagggtatacgaaaaaagagttgtatacatatgacgcgaacaaagtcctacagatatcaacgtaatgaacaacgcaagagtaacagaggacgacgaacagcatccatagatgtggaggagctcgaaggattatacaagtgcacgttttgacagcttgaacttgtacaactcgaggaagccaaccactagacaatcatgaagaaaagatttgtgaaagagaactcagtctatgtaaacattctcgagagtattgagtgatcccaagagaagcgtcagagacaagaacgcactagatcagatgaaccagtgtcgacctggaccatataactggttcctcctatgctcacaggcaacgtgtagtaactagatttgcgtcggagagacaagacagcgaggacaacaggaccaacatgagacatgacattgttttcagaaaagtagcagatgttgtgagctcaggcataccgccagccgaggcatttaaagaagtgtcaaaaaagaaagaagaacgaaaacataactgacacgcccgtactagtgcttgttaatgtcaagtccaaaaccacaggtttgttccagtcggatacgtctgctctcggtgagaccgagtctctctgtgttaaatgtctcgaaggaagaggggaaggaatattattgagaagcatggacgggtgggaggtggttggcatgtcgatatgccggtctgtcaaatcatctggttgttgcccaggaagtgatcggtgcgagttcctctttcttctgatcttacctttggtgctgtctgttgatcaattttccacggtttgtctctctgtcttctttctaattctttccctttttctctaccttctctatgttttctttcacatttgcttcttattctttctattcttcgttgaactcgcgatcgcgaaggagatagacagatcaggtgagactgtactggttctgatgagtgaccgatggtacagatttccgaccttgtaagacctcgagtcgaggaaggggtttccctccgaacaagccgatgctggtgccgacgccaaggccaagttccccggtccccgataatccgggttagtgccggtttgtcacatttagtcgatcttcgaagatgtacagtcccattcgtccatccatttatatatatcggacgcaacgattgttacatgttacatatgtgtatgccaattaagttttcatcatcggtagatgaacatgcatagagcacacagaaatacaactttgttcacagccacgacatgaagaatgaaaaataagaaatagacaacctcgaattgaacacagatgaagatgattctctggagagtcgggacgacaatcaagtccagtacttgaccttgattccagcaacatcagtctggaagttgactccacctttggcggtgtttccacttgaaatcgtttgttggtatcgttcctgctggtttcgcgaaaagatatgtttctgtcgttcggctattaagaacaatacatgaacaacacgattaatctgtgaagtcacagctctttgaactatcagccataaaatgatgttatggccactcaccaacccaagctgtaggaggttgacgcggaaaacgatagaaatgctcagaaacacaaatcataaacaagttgatagaacgcacatctgcctgaaaacagcaagaaaaggcttacttttgacggtaatgggggtttccttctctccctgctgcgcaactctgtcatataccccttccgcactcaataccgggcttttctccacaacctcgaccaagacatcgttattaggtctgacgaaatacaaaacacctaatcgatcgaaagatgcttggtcaggcggaggagaaaccactcggtggacgctcgacttgagatactctccactgaggatctgcagggtgtcggcgatgttgacagtgatcttgaagcaataattcgagcgacaacatcatatgtcaggtttcatttatctcaagaaacagaaagcctcggcttgtagaaattgactcacagacccagggagaggcttgacccattgccattcgttgtctccgccgagtacttgtagagcagccacaggctgcctgaaaagaagggtgacggatcccaaatcgctaaaatatgcactcgtcgtattcatcagtcgattgaataaaaacaacgacgattttgaaaacgaaaactcacgtatgaccgccagagtatagcccattggctttcgcgttctcttcggacgaccgggctttgtatttcatgtatctcaagtctgtacaactcaaaagtttcggcgtctatcattagatattgctaatcttgatcaaagaagtagaaaaaaacagaaatgacgaacgatcttcagaattctggtcatagcggtgtcgcttgacaaagtattcttgatcctgtcgtggcagaagagaacaatatgttttttcaaacgatgcacttcataagactcagatagaacgatgaaccagtatgatcacttacctcgagctcgagaacgatggcgaagatgaccaacagcttctctatgatttgagtgtggattctctacaaaaaacgaaacggccgaattctatcctagcgaatatacaacggaacaaatgatggtagaaattcacctttccgaaatcgaccacactatcccagttatctctgataggctgagggtggtttttatgccaatccttgaattgctccgtgaacttgggaatgttgtaaacctcaacattgcttcgcctctggaatccattagcgccggccctgttttcccgtcgaacaaacagatttctttagtcccagttggcttatgtaaagatgaaggagtcaaaacttcttactggttcttgaaatgaggaagttcagggccctgtagatcccgaacaagaagaaaacacgatagttaagtttgacggtctttccatcacgagggtaatcatactgtctttgggggtctctcacagtgtacccattatatcctgttgaaaaataataagatgtgggatgagatcaaaacttcgagaaggtggttgtttgtaagtgctgagcagaataagggttcttacctccattcgcatgatctgctgcaaactttgctttttcctcgaacggaaggtcgaatacctgtttgcccaaggcaaattggttgtcgacttcctcctgagcgaacccgaagtttacgatatagaaaaagccctgttttaaatgatgagagtgtatgcgatcgcatcaatatcttgctgcattgctgactgatcggaaagaaaaaaagaaatgatgcttacaacgttgtgaaccgcatcattgagctgtttggcaagagcttctttgcctcccggttgatcgaaagtcgataggtcaagagaaaccagatcggcccaattgactggcaatcaaaagcaacgcaagacatcgaatcagacgggctttcagcagcacgccagtcaaggaagagaaagattaaacataccattctccttggtctcgggcaaggtagagtacggatgctctttggtaccgtaaatctgactgggttgaacgtttgcagtagtttcggacatgttgaacgggactgagttgtagaatatatgggtagagaagatatggattgagaaacagacgacaagtatcgtacgatgcttatatactctcttacaacgctgacaaagaaccaacataaatggtgatcgctagcatgttcgttgatgtccgacgaaatccaaagctagacaaaagcataggagttgtccgatgagattgaagatggtttttccgagtcgatctgaccaaatccccgagcgagattgcgttttgtgtttttatctatcgctcatgcccgacagataagataagaagatgtcgtccgtcggaatttaccactagtcttcgccttctattcacctttacctgaccatggtcgatgatgactttgactgctcaagcacgtcagcaagtaaaaaaactatgtcggcatttttcttccgggccttgaacaacgttttccgtctgaagtttatcggttaaagaaggagatgtcaatggacggatcccgatgattgactcatccgtcagtttggtattgacatatgaaagataattagccggaaatagatggcttgcttggtcagaaatcgacaccataatggaccaaactagagtcttacgaattcaaagtcatctgtgcttcaagggtctttgtatgtctagaacattatgtataagatggaagataaaaacttggtcgattttgacatgatgagttggatttgtcgctactttcaatcttttctcactcactatcctcgagcgactttgcatcatggcgccactatcaaagaaaactgattctttcgtcagatcaccatcggccgagtctcaagtatccaacgccttggataataaggagaaagccgtagtgggtaaagccaatgtcaccaccgttgagatccaaccgcacgactcgacaaagaaaccgtcttggattggatctctctgggacacgtatgatctggaaccggaggaaagacggctgttgaccaaagtggatgcatctatcttggtttttgcctcggtgagcagctcaccctattctttgctttgattttcactcagctgcgctgatcacaaataatctcggtcgatatgaacagcttggatactttctcaagaacttagatcaaacgaacgtcaacactgcgttcctcagtggaatgaaagaagaattgaacatgaatgcgaatcagctcgttacggcaacatctgtatggaccgccgggtatgtactcaatatccctctcttgtcctgattgtcatcgataagaatcctgatacaagtttctgttctaagatatgttatcggacaaatacccattcagttgatccttactagagtctcgcctagatgggttattcccgcggttcgtcatactctgatgatatatatagtcgtgtattaatcatgcttacgaccgcataatgataattctccgcctcagctggaactaggatggggtgtagccactctcgcgctctactcaatcaagaacatgtctgctctttacggacttcggtttctagtcggtttgacagaaagcggtttctatcctgccatccatctcttcctcggctcatggtccgttatacttctcgacctcatagtcttggtgccactgttcagtagctgacactgaaccttcagggttttggaacgatactcatatcaaacataggtatacgcctcgagagttagctaaacgaacatccatattttatgtctctggagcactgggaacgatgttctccggatttcttcagacggctgcctacgaaggactaaatggagttcatggtcttgcgggctggagatggtgagctttcagaattttgatatatgtcggacctttcttctgtcgctgatttatgattttttgacggtaaggctattcatcattgatgcgatcatcaccattcctatcgcactccttgggtaggtgcttctactgcttcatcctccaattgatcataaatttattgaaggacccttcctcgaacttgcgctttagatttgttttcctccctggacttccgtggaatacgaaagccaacttctggctcacacaatcggtatgctgtccttctttccaattctaaaaattcacttcccgaatctgatataacttgtacatattcaggatatcgatcttgctaatgcaagactagacaaaataaagagacgaggcgctcagccgtggagtaaatgtcgagtacgggaatttcatttcattttcttctttgtcttttcttcatatgattataggaagttatcgatctgacaaatcttgggtgctgttttaggtcaaaaaactgttcagcacatggcatatttacctcttgcctccgatgtacatgctatacaacaacgctattgcccaggtccgttgccaactttctctctctttgcctacaatgaagcgcgctcatccatccttatatcgtgaatcttgttctacatagacccccatgggatattggctcaagagcttcaacaacacaacgaacccacctgttcccgggcgaacgtattctgtctcgcagatcaatttgttacctcttccaggaacagcgatatttgttgttctcgcttgtttctatgcgtggacttcagacggaccgttgggtggtaggaggtggccttggatgctgttcggctcagtggttaacgtgagacatctcttcacttttttccttttcttctatcaatgcaaaggtcttgtccgaaatctgacgctgagagttatgtcgataatgtatggcaaataatagatcatcgtcaacactgtcttggtttctacacctttgtacaagaacctggcagccagatttttctggtactatcttcttccagccgctgtacgttctgccatttgtcgcctgcatcctattcaaagcaaacatcatcgcagcaattcacgtacttgagaacaaaccaacacttacaatttgttttcaacgtcccgctctgaacgtcgaacatttgcgcattgacactagggctcgataggcgcactctgcatgaactggattactgaaatcacaggccaagacgttagtccacctgtctatgagattcggcttgtcttgaaatggtttcatgctgatactttcttctcttttgatctcatttgaatgactgattggtctggtccagtttgagttcagagcaatcaccgtagtatgtctttatcacctatacccataccgccgctctgcttgctgatttgcctttccaatcgctccattttgtaaaggccacggcaaatgatatggcgtatcttgtccaagctattgtgcgcatatctgcttctgtttcctcgattccaggactgacggttccgatgacaaatactaaacccaaattctctttcatcttgtcctctctctcaggcccccaactttatatggaagacagttgatttcccaaaagctagaaaaggccatatctggagtatctcgctctcttcaatcattcgtgagttttgaagctcttgtttccacctttgagtgctcaaaggaataactttgaacccccaacagctaatgtgttgaacctttacgtttttttaaaagttctgtggatcatgatggtgtactatctcgataagcgagaccgtagatcccagctggcatccagctcatctgggtcattctctgaattcgacaacattaaggaagattcttcggacagtgataaaagtctagaggctttagacatcccggctgagccattgagtctacacacgactcgacgggagaggctcgatcactcaatcagttaaattcctccctttgtctgtatatcttctttctgttgaatattcttcgtttttctcttgattatagaacatagtaatattgttgtgataatcatcttcctgttttcacctgattagagtatgaacttttattttcttgtaaagaaaatcaaaaaatcacgcaatactgattgtgtacattgtcgaatggaagaaggagaaccaaggagcaagatattaagatctcatgaaaatgaagcgaacagaaaaaaaaagcatctttagtagaaactaaacgtctaatgaaaaattaggaagttataggcgaggggaaagtgatcatgaaaggtcgtgtagaacagattatgaatgtatggaggttgagcaaggttaccctatagtacaggaaccgcgatagatcaagaaattatatgagcaaagcagagcagaggaattatagagcaacaacaatacccaaaacgacaacaaccattgatccagagagcaagaagatactcatcactggtaatcgagtcgcaggaaacttattctgaatgagcagattttgaaccctgaagtatcgagcgacgcctgtcgggattgcataaaacaaagacagtcaggacgtttgcagaagagaaaggagatctgaaagaaaccaagctaaaagggcaatatacctatcaccagagtgagaaaaccgatgctgtagggttcatgtagatgtgggagcagatgagtgagaaccggagtgtcaagcgactatattgaagagtagattagacatgaacatacgcgacaagaattcctcctaacggtcgggcataccgcctgttagattgactctgagctatagccagaaggatgttctgataaatctgttcgatcgtctcgtactgctcaagcgtagaggagtctgaagtttcaatcttaggcattggtaacacatctgttgtgagcggcgaagcgagtgagaatagctgtgtcaacgctatatcagaaaagtatagatacacatccagtcagtccatgtgtttggtgaagcaaccgaagatcaaggccaaagaaatgccaaagccaagaacgaaccaacacccatcgaacagaaggcaagactcgttcggagccaagctaagaacgtgcgttccgacgcaaggtgatctcttgcaaccgatccagtgttttctaattcgagagcagcaactccggatttgtgccagaggtcgacccagaatgattcacgcggaggagaatttcgattatgtgaggtttcatcgacggcagtattagcggcattggtgaccgtactggggggcatgaggagacaactggtgtcttggctagtgttgttcgatggaaatctatacgtattgaatgttgtataaccagcagcggcggaggacgaggaggcttcagcaacagtccatggcagcatggtagatgtacttagatatgatagacaagatgcacataccgggtgatgtcgagcagagcgcacgctcagaagattatgataagttcttggaagttggaaaaaaaagaaggagcatcaaaaagatcgtcatcactcgccatcaacatcaacattgtcaacagcatcttcgactcccctatccgcgtcacacccacccatcgctagtcctcttctgtacataatggccgaaacggtagaccagttggccaacactctagctcaatcatatattcatcgttcagacaaatcttgtcgctttctcatcggtgtcgccggtattccaggttcaggtaagtcaaccctggccccgcacttggtatcaaagataaatgaaattatctcctcgaccggatcatcaaaaagatgtagaggcatcggtatggacggttggcatcattcgagacagacgttatcctcttttgaggttggtttcttccatatttttgtaggcctgtgtgaaacgttgatctaaatctcgtcatcttcttggccctccttcctataaggacccggaagaagcgtttcgtcgtagagtgagttcttcactggcgcgcgcatgccatctttcttcatggtttgtttgttcttgatataacgaccatgctcatcagtcctcctattgtgtttgctatagggagcccactttacgtttgacgcaccagcctactatcaattcatccagtcccttcgttcacccactcatgccgatcaggcgattccgtttcctacgttctcccattcgttgaaggacccttctccttctgaacaacctatcgaaccttcagatgaccttgtgtatgcgcctcttcccgtattttgacctgctgtcttttttctttcatcatgtgtgctcaactaacctcaacgccttttattttgttttacatcatctgatgcttacctacaatgaaagcctgatcgagggtctatacgttctattagatatctctccatggtcggaagcagccgcgttactagatgcgaaaatatggattgaagcggatcatacgttgacgagggaacgactcatcagacgacatatcgagacgggcgtcgagcagaccgcatcggccgctcagaatagaggtttgtgttcctcagtcttctcactgtcccctctcttcatctacgcattgctgactattaaataaaataaccaaacaacacaccgatccacttgtacgatctagtcgatggatcagatatgctcaacgcacagtttattcaagatcgtctcatcaagacagatgtcacagtcgttcatgtgaagtccgaagggtttgatggagaaggagtcgaacgaaacgtatgttttcaactggacgcttcatagtcgttctatgatctccatggacgaatttcttttatttcgccttggatctacggaacgaagagtataacaatgacagtagaatagaaggagtggatatattggtcgaagacgggagagcggaggggtaaagaaacgatggatatcacaacaaagcttgagaagctggaaagctgccctcagatcaacctgatgaggcaaataaggaagaaaagtaaagtgaaataaacgagaaaatgaaggatagactagccctagttactcaacctagccagagcctcctgatttacggaccccaataaactctgaataaccccaccggccgcgctgactctcgtcaactcctccttcacatagaccttctcatcgaccgtgcaccaacccactggattttccttcttcgcttcggaagagcctagcctggcgaaagaagcttggaatcctcctccagattcatcgttctcaatcaaccccaagtcatcctctcctcctggggcgcttggatttgggccaccggtggaagtcaagtcttgaggaaggaagagaagggcaaggagagagttcatggtggtaggccacgctttaaccagaggttcgctgaccatggtctcggatccggtcaacagtctagccaggccgatggagacaacttttcgatccttgacagagaatttctgaacttgaggaagaacaacaccctgaagaattcctccaaagattctgtgagagggaaaaaacaaatgatgggaagaccgtctccgataatggtcagatcagacattcaagtcaaagcagaacaggaaaataagactcacccaggctggacagtttcgtactgagcaatcatgaaatctggagatagatcgtctttcttgatggcaaagcagaaggcgaaaaagtagacaaaagagtatacaaacgtcggtgtttttgatgattgtagtcgagtggagagtaggacaaggatggttcgaatatagggctggagggcagatctaaaaattcatgaaaggcatgaataaccaaaacgaattagaataaaataacccatcagcttctaccaacaccttgggcagcgttccaagacatgaagaaaacggagaaaagacgtacatcggcaagcactcaaacaaagcctgcagtaaagcaaatccatgaacgtcgttgatgtttgaactgatcaacttttgaaacactcccaacaagctctgaacttgtccgttcgccacaactgtcgaggcacccctacgaagcagcgctttccacatccttacaagtgccggaacgtttccccgttgttcccatagtgctgcggtgagaagaggaccaaggaggttctgatacgcttcggggagagagtctgctggatggagctccagaagttgggagagaatctggaacacgtaaggtacgaattctggggagaaagagagaagcagtttcaaattcagtagctgtttgaatgaaaacccgcaagaaatcattcaaggttgatttttttacgaaccgacaacatcattctgaaggatagccataatgggaccaaacaattcggcctcaaactgcgctactgaagcaggcgtgctttctgccacaaatctatcaatacccatttttatccacccaaagacatgtcagtaagtttcgctggacgaggtttagcaaatttatgtgaaaagacccttgaagactgaccggatcaaagccgagacagactcgaagcagtactggttgaacttaggattactcgggttcttgctgatctccgcaatgactcctaccaaatgctggagcacaacaacgaataccggagtcagggactgccgagccgtcaggatgacccgcatgacaccttgaaggcgaaagatcaaagatcgtcgaaagtgggagaagattgatcagtttgatgtgctcatgtgcagacaacatcgagctagactcacatcgcatcaagtagtcgttctccgccatcttctccggggtaacccctctctcgatattagtgaataatgcggtcaagatgttctgtgcaaatggacggacgtccgcctgagagaacaaagcctgtccattaactctgatgaagaggattctctcgattgtcgtggccgcgtaggtgtagaccacgtagtttgacgaagagagatgttggattaaaatgggaagcaccgagactagctgatcttttgtaagctgtcaaaattgattaattcaatggaaaacacataatcaacatctgcggatatcatctcgatacgaccaagaagatgatttcttaacaaacctggtttcggaaagtgtggaggaatttgatagcatccacgagaaggaatacgttcccgtcggcagtttgcaggtcctggaacacgttttgagagaagaactggacgacatcgaccaacacgttggtcgaagtaactccatgttgaacagtcgctcctctagaggcaattgaagtcaaaagataaattgccgtgtccttgctcttccaatttcctacaggattttgagcgtattgctggagatacgcgtcaatgtacctcttaacgatggtcgtcacctggctttcaaattgctccatcaatgcccgggtgaagtccgtagcggcttgacgtcgagtgtcactctctacgtcattcaaaacagaggagcttacgaaaacattaacgaaagaaacttataccataagtgatatagaaggagaaacctacctgtggacggctctagatcggttcgaatgtactccatgggatcgtcttcaaaagtctcttcctcatgtgctgcagacaatcaatcatgagaatagaaccaaagcaacgacaaccaaagatttttaatatcgtcgtgaaaagaattgaaagataggaagaagaaaaaaagaaaccaagaagaacatacttctcaagctcatattgggcagcacaattttctccaggaacgcctcgagggtaccatcctgctcgaatagcgatcgtttgtcgcccatcttgacaacaacgcccaggaagccgagtgctctacagacgagaacatcctgcttggtggactctgccctggagacgggtccaccaaggaactcccagacggactgaacgaacggggcgagaagagtagagttgaaggcatccgagtatttcatggtgaagagttcaaggattgaacaaatctgggatcggatcctatctagcggcgaaggtgaggtatcgtcctcctgtgataaagaaaatgatcgaaatcgagatgagagtttttcaaatcatttagttaaggcaaacaatgtagtaaagaaagaagacaatgaaacatacatcgccttccaactcgggctgctcccatcgtaagtacttgccaagaagcccaatctctccggtagcaggatttccgaagaacaagccgagattgtcctcgaaaaactcgggaagatcctgggcgttaagatcatgaaatagctgtagaagaagaagtaaggtctgcgcaagctggggaagtgtggctgtgggaggtaaagacgaaggagggagggatagaagctcatccgttcgctgtagggacggggaaaaagtttgaagttgagtgctttagtgagtgacatctgttgattatagactgtatgcgctagaagtctgaccttgaaaagttcaaagtatggaacgcagaactggttcaagaccacaagaatctcagagtaaagcctgtcggaagcgaattgagacttccatctagataacaacaacaattgaaacatatcaatttatcaatgaatagtcagtagagatgaacgatgtatagcgtaccgcttgaagatggagtgcgctgtctgaaggactccaatgttgatggagaagttgtctggcgagatggacgaaacaagttgctgtgagagcgcagtcaagacgaaagagaaaggccacgatgttcagagctgctatggtaaaacgaatacgagacaatctgaaacgaaagaagaaaggacggtgcaacatacagcaaccaagccctcccactgatctgggaaatcggattctgcgattgcagctacggcttctccaaccttcaaatcatcatcgtgttagctggtatcaccaagtaaagacataatacacagcaaacacggctcacctgggcttgcagacggttgagttgaggagtggaaagggagatcatgacgggaacgagctgctctttgattatttgacgatcagagagtgaaggcacaagaggcgtaacttcctgtagaaaggagattaatgttcgactcgtatctataagtatacgagaacaacatcatataaagtcatgattcgcaagaaaccatacttacctcgacccaagtcttcttgatggcgttcttgaagtagatcccagctgccagcctgatctccatcggagcctcgccagcacctctgacgatggagagcacggagagcaggaagccgggaagaggctcgttctgggcgagctgtctctctgcgccccttcttgtctgaggatccgaagagagcgactgtgagagcaacggcaagagagtgactgtgtccatgtgtgtatgagagttgtctgtaaagaagaaacgaaagtatttggaagaaaagtgttttgatggtggaggtcaaaaagc

SEQ ID NO: 794 - DNA, 92244 bp, Xanthophyllomyces dendrorhous
aaaagaaataaaaaaattaaatagaaaaatcaaaaatcaaaaaatgttggttcatctcagagcgcgttcgacaacttctatccagccccatcaacctcgatcgcgccaacaccggtagaccatgctcacaaatacattctcactccctcagagctctggttggcttcccaactggatgctctttgtttctactctggcccttttcaataccgttcagaactatgtgagcccgacactctccaaaagggtctatgcagcaaagccagaccaagtttctcctctcgccaacagactgttcggcacctggacattggccagcgcgtgtattagattatacgccgcatacaatattaacaacaaagagtaagcccgtttgaacacatggtcgaagatttgcgttcaagtgaaagaaatcattcggatgggcagaaagatggcaacttacactcaatccccctcgatggttgtgcaatctactccttccggcagattatacaatcttgcgttcatatcttacctgatcgccttctttcactttcaatctgagcttttaatatacaagacctgcgtggtaggcaaagggtggatcccttcagccgttgtatccagtaagtatattcatagcatttccctgatagtatgtatctgccagtcgtggtctcatcttcttatgtattcttccagcggtatctctcgtctggatgaccctccaaagagacttctatcttggagcttgagatgcctattcctgtccaatgccatgttctcagatgtatggagactatatttctcagacttactgagacgagtcttgacgacatattctaatcttcttcgtgtgctgttatcgaacccgtcgtgatttttgtacttgctgatggatgacatctgttcaaagaaaacagcctgcttgtcgagctaaccatccggcttcggaatgaaagccagtgtttagattgatctgttctgcctaaagtccacgatgctgacaactctcgaaggaacgcgttccctgtatatttcggagctgatcgataagaaactggccataacaaaggaacgtgttcctcttcatcaaccagaacaacttggataccttcatcctacaaccactaccttctttccctttccctttctcttcacctcgacctttgctctccccttcttttgtatcttctctctcaatctcgcccgtgtcacccgcctccactccctttactccggatctgttggtatatagttagtcacaagatcacgcgagagttcttcgacccctcttttcctatcgtagaacctgcgtgacatatatttcgacaagcgacacgaaagcaaacaaaacaaacaaaattaatgggattattcagttgtctttctcccgaagcatttgacgtcccttgctctgacacgctgaccaaccagacgccttcacaacctcggaccaaaatcaagaaagcaagaggtcttcggaaagaggataataatagccattccgtaagttggctcatctttgctctgaaccacacagccagcgaaataataactatccgttatatttcttccaactttaggaaacatgcgctcacaaagtggctccaggaagaatttctccgatcggaccggttgttcttcctccttgccacgctctctcttcaacttcgctacaaactccaaatgatgctccctcaagaaaatctcaaatcggttctcttttttcgttgtcgccgtccccttcaccatcttcgctgtctttgtcgcgatcgtcctgctcgccgagaccagtggttgttcacctgtcaatgattggaagagagtgcgaatgggaaaatgaagataagcagccaaagagaccttcgagaccgcgtcttggtagatctttggtcagtcagaagtctctctgtctcttcgtctttacccattcttcttatcaggatcaaacatgacttagaaccaagacttcaaaccccatacctccagacagctcctccagcggcgccgacattagatgaaaaatacatatgcgacccagtttcagtgtctcaccagtcatcgaatcctaaaggaagaaaaagatctttgtcaactgcctcagtgagttggttgtgtccttccttttttgcatcatagttctcagtctctgactagatcttcgtatcgacaggtctcagacctttcaaacactagatatcgcgctcggaacagaaaatccgagtccaattcatctgtgaggctaagctcaagctcttctctcctctttctattcaaaccaaagcgaaacttaacatccagtttttacatctttactttttcgccaatttagtctgattgcccagacctcgatctagcaaacattgccccggcttcaagtctgaacgattcgctcattgtgtttcagatggattttgacaaaccagcaccactggtctcatctcgcccgccatcgatcacttcacccacttccaccgctattgctagaccgataaacacatcttctctcattcaaaatgacacttctcgttccagaactatttcaaccgcgtaccaatcgtacgaatacgaccatccagattttgatctcccacccctctcgacagacctcacgatcacgcccgacctagtctcgttgtcttcatttaagtctagctcatccttctatccctctcctgaatcttccccagaaattttatgggattctatggctcaaacggacacgcagcaaacatcacctgagcgaagattggcggcactagcggcgctgatagtggacgccccgactcctaggacatcgtttgaggcagaaaactctattcagtcaaagacccagtccgaacgatgtcttgctgaatcattttcggaccatttgaacacttccaatgagaaggatagcgcgcttgaacccggcttacaaagccgggagtcgtcgacaacgaaaacaatcgcgaataaaccgagagcattaatcaagaacgtgaacgggctgaaagctgaatggaggaaaaatagagaagcggctacttggggtgaagagcttacttgggaattcattaaagctgttaatgaaggtcggtagagcttcgtgtcaggtagagatgaatactatcgccttatcctctttctctcttcatgagctctatttactttgttcgcttatcttgtatatcatatgcaaatcgcaaacacatacacaccacataagttcaccttcctctctttgtctttctcttgcggtacatcgtgacacacttctctctccgttctcttgtatcatcactaagcccgtccagaatttctgtacatgtctctgttcataactcgttcttggtcccttttggctattttttcttttcgtcctcttaactcctcgtcgatcaaatacttctcctaattttgactccttgtcacaaatagccttatttccacctcgcagaaaatttggctaactcgaaaacattgtcatgatcatccagacacatgcgcgctcgctcgcccattcgctcacaacacatcctcttccggcaagagcaacacgtctcaccattggcttctccctgttccggcttcggccccattgcctctacctcccgctcccgctcctaaccctgcccctctacccccaagtccaccaccactatttaagatacttaacagactctgcgttcctccaccgttacctactgctgctccatttgaaatgactttgtttgggtccgaaccactggcggatgagcctaagagaatatttttcaggtgattattatcggtcaagtctcgattctgccgctgatcgtactgctgtgctcgttgtgtctgttgttgctgttgtgaaacctgagcactcatcatctgaagatcatgttgatttgtctgggcatgcagaacagggatcggtcgatagatctcttgtcgttgctccagttgttgcgatcggtattggtgttcttgaggctggtcagcttgagaacgagcggacgacgatacagacacttgttgatttggggtccctattgggaaggatggcatagaggcagaggaggaaacttgggtcggagcataggatgcaggtatctgtatttggaattcatcagctgctatttgctccctaaattcgcttcttggttccgcattcaaggcagacgaatgaggcaaactgggatgtccttgttgccttgaggatccatgtaaaggccgtctggaactctgctcctgtttctcagaaacatgtccgttgatagcaaaagatgatgccaaaggcgattcgattgaggaagaggaatgtatgtgagaggtggaaggagactgatagccgactggttgtttgaacgatgaaggaggtgactggtgatggtaacgatcgccatggtattgttgatgaagcggatgctggtgctgatgactctgaggtgtgtggttcaaatgcaaaggaggctgaggatagggttgatacattgtttgctggtgaatgtttatcggtgaatgatgctgaacgggcgcccgctgatgaccatgactgttagagcttggataaggctggacggaatggccagtctgatcatattgaccaggaagcggatgctcagatgctggtggacggacaggtgttgccaaataagaggaaggagataggatggaagacgggtgatcaatgtcgctgtaacgattggttttgtaagtttgtgcaggcccgtggctagttatttcgttagatcctctcgaagcgtaagttggctgatgtgtttcgggctgaattaatgactgctgatggtgttgcctttgttgttgatgatgaggcaacttatgaacggacggaggactcaagaacgtctgaagcaatgacatcttgtcctttgatagattttgagcggccacgttgatgtccataccggctgttcgcatcattgagggactgtttgtcgccgactcaagtggagcaccccactgctcagtagactttttgaaccgatcctctcctagcgtaacccgaggcgcaccgtccgacgtaactgccgagtccgagaatgatgtcgatgttgatgagtaagatggcattgactgcagaggagccacccctgacgaagttgctgatggctgaaaggtagtgtgcagaggcggctggaaaacagatcgaaatgtatctgactgtggctgtttgtgattgatcaaaggggatgggtgggctggattgagcagagcaagcagagatggattcggggctcgatgtaggccattccattgttgttgtccaacagaagagatattcgattggagttgaggttgaacatgatacatagaggcagaagcggcagtgccagcgctggtcgtagaatattccaaggaagaagttgaggacgaggccgaggaatgaagagttatagaggtttcaaaatcgccaggcgcggggctggaagccagactactgagttctgatgatgttattgaaggattgatatctgaatttgcccgagcttgaggatggctcaatgtgatgttaccaaacaaattatccagcattgaaatggtttcctttcctgcttccgggatcttcggcttggagtcggctatgaaagtaggcacaggcgtgtttgttcctttcgttctctctccatcgtcgagtgtggctgactcggattcatgactatcgagaaatcgtttgaaaagctcgtccaatgcgctaatcgaatctgatttactagacgtgccaggtatttcggcctcaggtactacaggttctattaaatcgagcgggaacgttatttgctcatgcgtcgtggaagactccatcacatgagaaaccaaggagtcgctagaaagaggacatgccgggggaactaatggtgtgatatcgccgttcttgagcagattccgtggtttgttttgcttgatgaattgttgaaggaacctggaacgaattgaaccgaaaaaaagatgtacactatcagcataatcaggccgtatataccgactaggattggttttataagggaacaaaaacgtactggacaaaaggaagaatcatgtagaatttaaagttgccaactttacttgaaatagaagagcccgaaggcatattcttccttttccatccagggaggtgcttcagcttgaaccattgtatagccttttgaaacgagaattgagaagagaaaaagatggaatgacagctgtcaactggtatgaccctcattcgatgacgccgcttgaagaagacagagagcgacctacaccgatctcttttcgagtcaatgtcttaaactgataatcctgagatacgccgggcacgatgaataaggtgacgcgttgaccttggatattcgtttcgagaaaattatctttattcagtaagcgggtacagtcataaccagtctcttctaaaacctgccaacaaattgggtaaaaaaagagttcagaaaatcatgaacgttaggtatcattaaagcggagtatcagataatcgaacctctctagcagcacaaatatgtttgggctcctcctggtttatctttcctttcggaaaagaccaggtgtttcctttccatcctttcactaacaagcactgtaaatattgatcaacaaggaggaacacaagaaaggctgaaggtcagtcgcctacggtttgctcctaacgccacctccaacagaaatgattgtcttcacatctgtcttgtacaaagacacgtaccttatcccaagtttcatttattaagatggctccacaaacaggaactctcatcttgtacctcatgaactccagaaacatgtgttcgtgctcatcgctccattcactcaacagaggacacactttgaaaaagatttcggaaaaccgtttgagggtatacgaagggagtgacggattcaactctcggttaaagtcctcatagaaccaaaaggcttgttcgacttggaagcatatacgaggaattgatgagagctcagatggaggaagattaagaataaatcggctgatataatttgaggagagtttgaacaatgaaggaacgaggcggaagtggaagaggatcgatcatatagaaggcgcgtcacacaatcggtgaatgagtcaattgatagattcaagaaattgatgcgttagcttccattctacttatcctcgttaacactagtgcgtttattctcaaaaacacacaacatctctaaaaacgaacgtagacacttacgtcgatagatcttctaggatctccaatagatcggccgtctggaaagaaaacgcggaggtggaggacgaagcagaagaaggcccaagatctggcggaatcgggctgatgacggacattgctggtcggtcaggagagcttgaatagaaccgaagggagggaggagataggaataggaggtgaacaggaaagagatgaggtcagtatgtgaacgttgggagtcttggtgtacgaaaggacagaaacggcaacaagacaatgaaatacagagtctttggaacagtggttacgatgatgactattgtaaatgtaaccattacatgtgactcagacaagatacataacttggcagaggatcagccaagaatctataagctgttgctgagaaacggatggatttgcttcaaggttgaacacaatgagtgcaaaggaggacgatgacagaaccgaacagtacattgatacaagaacatatagagcaggtgaacggaataggagtgagattgaaaagtacattgggaaagtatacaatatgattcgttcttgatatatacatagctttcgcaacagatgtacatgatttatgagatgatggttcctgtcgcaccggtggcagctccgaaccatcgacctaattcctcgtgcagctagatgtgagaagaaataccatgaaacgaaacgagtgttagaacttgacctataatatatagagtggctcagataatactgacaggattcatgctggttgcaccatacaatggagcgacttgaccgatgggccagatgacggttccttcgttgcaaagttgcgcccgccgaattcgatgagcaagtccatcaggagacgcaaatccaaagtcggctgtgtaatttgtagtgtgaaaatctcaaagtcagtggtaaatcgttataatattccttctcggggctgttgcacttacggagggtgcttccccactttcgaagattcttggtcactaaacatcagaagaggagtttgcagtcctcgcgcggttagtttgaaaatctatagtcacacaaatagtttataactcactgggactgtcgatgaatcctggacagatgatggtaactcctatgttgtgagggactgatagaaccctgagggattgaccaagatggtataggtatgcttttgaagctccataggctgcgaatgtgcaaggagcataaattgaagctgatgaagcaacgatgactgaaggttcgaagagagggccagtcagcaaaacaaaatcaaagttgtgatagcagctgtaggcaaaggtcgatttaccgatgctacccttcttgtaaggaatcatggattcccaagtcgcaagaatcagattgacacatccgctgacagaccgtttcacatatataatcagtggttgttgaatagacagtacccttgcatgacaaaatgaaattacttacgtcacgctaaaaatcacgaatgaggcaaaaataaaatcagaacgttaggatccctcacggtagttcaatcaatcaaacagggactgctaacttagtatcggaaactctgcgaacgaaatccacaccccaagaccgggtaccagcctcactccaggcttcctccatgtgtcccgcagttccgctaacctgaagtagcacatcgattccgcctctcctgacggcgatttccttgaccatcgctttggtctgttccttgtcgaacgtcgtaagatcatgtttgataatctcgtatgtcgctacccgtggaagattgtatgtgtccgtcttttctggctggcggagcaggagcacaagatggtacgcggaggaatcgtactgtttaagaagagacccaccgatctgacctgatccgccggtgatgaggacagtctgaactctgtcgggtgatggttttgggagaggagtaagtgacttaagaatagagagcggaagcatggctaaagttgtcaacaccgagaccgatgacattgacattgtggtctaatcggttgtttacaataaggaacagaatcatcgttacaacacacaaaagacgtcaatcagaagaataataagacagaaataaacgaaaacagaaaactaacgagggagagcacaaggttctcgagcaggtaaggcagtcgaggaatctggcagggaaagtagtctgcagagcgctcgaacttggaaattgagttgagcatgatcggctcgcctgtgacctttttgttttcttcggattgagacattgtttctaaatgatttcctttgacttcaaataaaggtgatagatgggatttgagacgaggatatgagaaacaaacatagtagagtagcaccaggaaatgtctgcttcttataggacgaactcgatcaaatccgattcgatctatcccctcttctacccgtattcaagtggagagctgagaaatgtcaaagggtcgatgcgatgaccagttttgcacagccctgatctctacgtcatcaattctgggccgtagacgatgatcacgtgttgtgatcaactgcatgttccaaacgtcatttgattgttcttgctgaagggaagtgggaaaactatctgttgcaacgggcttgcggatgagtctgctattcatgctcaagaagctcaatcatatttgagtagtaatcctataggtttatccataatataattctctatctgatgggctgtggtattctgttgcaaggtacgacacatgtgtaggtgtagtggcttctgtgttttcaatatgagagaacaatagcagggagcggagcaagatgcggaatgtcaccggtaaagaggcaatgtatcatgtcagcaacttcgtaccaaacactcacgtaactgaaagtcgatttgggtttgaacgatctttgaagtgcaaacattagtcaaaattaaatgctatttatatttatcaagttctctacatgtctgaattcaccagtgtatctgctatagatggagagcaaaagcataatacatctgggtttatagcttgctttgatcggaatagaaatgatgaagaaaggacgtagcatggaagatgatgtacgtaaacaagaagtcaaagtaagccattgtgaggtatgcaatctcatctgagataagataaacatgtcatcacaaaagaagttcactggaaattcaaaatatctgtcctctttccatcatttctccgttcagagagtggttcttcgaacgatcgcttacaaaagtagaagttaagtgtatatggtctttgttcgatactacttcgtctgatcttctctttgtcatagtaagtatcctaaaaaaaagccatctatgtgccattcatccaaaccgctttgattgtatcttgtccaacctgatggcatctgttccatcagctcctctattgaaccatgccgttcgttgctcagttcgttgattttaactccaatgaaagttcttcctgcctctttgatttgacttaagagggtcttttcatacctattctggccttggttcatttgattttactggctctcctaaccaacacgttcgtattcttctaccactcacaaatcattctttccagctcccatcattccctcaaaacgtacaattgaccaacgtccttgaacacgtttctccctcgttgagctccacgtttctactcttgtcaaatctcatcttgttcttctgtatctcctggtttctcgtgatatctacagctaagtctacttctcttttgcatagcttccaattctcctatatgtccaatcaatctttgttatctcaacctagttctttttatccctcgagggtctcttacacttttgatagaactgattctcgaaccatgtagtattcatatttaccttgcgatgaggttgttgaccatatattgttatttgcgcctagaaacataaaactattgaaaagtagggcacataacattttgagtagtttttattgctttgtctctgggatatccaatcgatcgatccatccatctacttttcaaactgccgcttttcttgctatcttggctgcctcccgcttcttcttgagagcggcgtgtcgggccttcagacttgccactcggtcaaacgcgtcatctctggaaaaaccaagacataatgatatatatttttagcatcctgattagtatgaatagggcttgaaaataatcaaaaatttcagcaagctggaaggttgtcttactgtgctcgctcctcttcctcaagtctggattaaagaatcgatggataaagagtaaataatgcatgggcttaggacacaaaagaacgcatatcggagcgataattgtggatcttgagaaagttaaaggacgcacctaagtaaaatctcttccttctcttcttgctcctttctcctcctgatagctcctgcgtcttctactacctcctcctctactgtctcctcaatcctgactggctctgcctcatacgtagtcttcaccataccattgtctgttgtctcttctgtatccttcttatttacagcagcagtagttgcaggaactgaagatattgaagctaaaaaatcgtccagctcggcatctacactagaaggagccgcagaagctgtgacgacgggagcggaggtgggatcttcggaggagacttcttccggaggaggcgtaacttccaatttaggtgccttggacggatcagcgaagaacccagggggtagcacagaggtggaggatgctgtcgagcttgattcgggtggtgttagaagtttagattgggtagactctgtcttgcgtttcttctctgacgactgtactactgtcgcggtcgctgctggccgtttcttctctaaacgctttctttcatcttctttctgtcgagcgacagatgtccgatgttgtttggaagcaatatgtccagcccactgagtgactgccatgttacaaaaaatgtatgtatagatcaaagtattagacaggcgtttcacgaacagagaatacgaccagatgacgatacctttcattgcacaaagtatacatcgaatctcgccggctgcattatatgacttgatgttgagagagcatacaaggtttattagcataccaagccaacgcaataaacactgaaccacgagtacgcacagcgtttggatcagtcaccctcggagcggtggaagctttcttagctcggagaagagatctcgcgtcggacattataagatatcagagtcttgatgacaagaggcgacagttttggttgtgtgagatctgaatgatagaagttcaatgattcgctggtgatcaaatagatgaatggatcgacgaatgggtgaaaggattgaacataaacagaaacgaatgtgttcataaccttttaattctctagaactgtgcgaggtcacagctaattgatagacttcctttccaatcgtcattcatcatcccattttcttctcgtactcttcatcatttgagtctagtctcagagaaaacaaagtcttacgatgaacacaaaactaacagggagtaacaaatctaaatgtgagtggcgtttcatattgtgtttcctgaccagaaacctatcttcatggcccttcatctctttggaagagcccttagatgtacatgttttcaaacgataccagtttatctccatgatttttcaatcaaagatttttcttcagaaggttcctttcatccttcattcgatacagagatatcacttgtgagagatttctgaagcagatggctatgagcagacagagctctatcggagatgtcccgattgcaacgtatttccatgattttcttctcaatacatccattcttcagttttcgacaaccaacgaagcgaagatggactccgatcaatctcaaattaacattgatttgtgactaccatacgcttgtctctgttccttcgtctccaggcttccatcggataacgatgctgggtgatggtggtgtaggcaagaccgcattagcagtccaatttaccagtgccgaattcgtacaagtccgttcttttcagctttgtatagatttatctatcaattgaggcgttgaccttttcatcaacttggttctctcaggattatgatccagtacgatatcttatcccagcgacctgtgttgtagcatgcgcttttctgatgccagccatcgaatgtgtctttggtaaaacaacctaatagactattgaagactcgtaccgcaaaaacctcgtaattgaaggagagcaacacgttatagaaattttcgacaccgcaggacaaggtctgtcttcctctgtctcctttctgttttgctttttgagctgttcaaaacgaacacaataatttcgtcctaaacatgtgttcgatttgatatctctgggtcgtgtggctcagaggagtacagcgctcttcgttctcagtggatcaaagagggtgaagctgtgatattggtctactcgatagcatctgcaatctgtaggtctcgactaaattgaatttcaatgccggatttattggattgtttctgacggtctcatcatcattaaacgatggaaactggacacaccttgaagcgttcaatcggatacccgaattttttcaatcggtggttgacttgaaacgtcagataggagagaacagcccgccaatgattcttattggaaacaaatgtgaccgagggtctgacggcagagaagtctcatttgcaaatggggtagaaatggctgagttactagggatcgaagatttctacgaggttcgtttttgacttttccctgtatagctttgaactaagtagaaagttggacaacaaggcatctttaatttgacatcgggaaatcaaatctgattagctctcggccatgacccgaacggacatagaggagagcttccagaagcttatcgccaaactcatggatctcaagacaggagtttcaggtgaacagaccagcgctgcattgcacgaggtagggactaacgagttgggtggtatgtctactggttcaatgagaaaaccacgtaagatgaagagttgtgtagtcatgtgaaggaagaggttgtagagtaggttgaacttttaatcttgtctttctcttgaatcccatactctctatcccttcgcactatcctttctttcagtcggcctcctacttttccactttttattttgtacatgacgcctgataatgacctgactgaattctcaccctatgacctatcttccattctatttcattgtatcactctcgtctggttacagtctttgaggctttcccgacacttgtcgcaagtccttagcatggtatcaataaatcaatgatttgttatgatttcttcgtgtcaaaaaggatgttgagtttcactctctgtttcttagcctctttgtctgtttgtctgctcatgtccctctcagaatagtgtctttaatacccaatattttctgtgcttgtcctcagactaggcggaacagagatgtccatgcgtcccgcaacatcacgcaactgggtctttacgaggaggaaaagcccataatatcagagagtatgacaaatgaccttacaaagaagaagcaaaagaaaggaaaaaggaagactcgaatgagaataagattttccatcggacaagatcaaacaggtaagagtacaaataatgtcatatgtcagaagaaaaatacaaccatcacctgatacgttatacagaaggtgaaactgagaaaagactgaaaggatgatttattcgaagattatatatgtacgaaatctagtgagtgaatcgactacaaagatgaaaagaaaaggaaagaagcaaaagaaggaaaaaacgagagctccgatatcagattatcatactccgtagggactgatcgaaagagggaaagagcagacgtgagatttgactgaatgcataacctttgagttgagaaaaggaaagaaaagagaaaacgaactctggataatcttccgcgatgacgaccgtgttcccctcgccgtcctcacctctgttaggtttgtgagcgccttcgtctctgtaggacctcgtgccaggtaccgagcggtctctcctcttcgtgcccaccattgaagtcaaattatccgtcttcagccttggcggaacaaagtatttctggacgcccgttcggggaggcgcccgggatggatgtaaaggtggggtgggcggttgggcttggtacgtagggaaacgaggtggcacgtgatttggatgtggattcagcaatgaagcaagtgacatgatgttccccgggtttgctgcgctcctaggcgtaggcggagcgcttggtcgaattggtcgaagctgtcaatcatacgagggatgaatcttgagttatggtgcgtaagcgaagagatagccacacagtcaaggcactcacgttggctaactcagggactccaaggtggtagctcgcgtcttcgataaactctaggaaagctcgctcaaatcggtcgaacggatatcgggcttgcaatccgtgaagatgatccaaaagactaggtgtttgattatcgatggtcaagaactgaataaaacgggtggcgtgaccaaacaaggcttgttcatcagcgaaatataaacttttgatatacaagtgcggagagacacatacttcggatcttctttcatccatttccctctcaaattcttctctgcgcttcccaccgctcccagggtttcttcctccaaataatatccaggcagcctcggcgaggccggctccttttccagtcacaccaccggatcctactccaagaactaggtcgaccccctcgccaccgagccagccatgatgaaggaacccttcgaggcaaacttgagtgagaagcgaagcgagcagcgcataccacgtcctcgacggccgagctgcgcctgctctggacgctctgaccggagaagattctctggagatctgtcgagaaggtggaatcgagggcggcaatcggaaggaaggtgctttcgtttgatggaatgggttggtactggaagaaagagacgctctgtgagtgccagatcgagaggatgaaccagcggtgagagaggacaatcttcgagtaggtcggccaccctgtctctcgtcgtctgattcacaagacgaagagtatgacgaagacgcctcctccacaacggaaccttccgaatcactctcgagccagtcgttttggatggttctcgcccgggcaagtcggtttctcatcagatgaaccttttgctccaccgcggtctgtccgatactttttgaaagcgctgcgctgaccagaataaactgcttgagcaggtagagtagctttccactagccaaagcgcgtccaagatcagtgctctcctcaagctgaaaccattttcgctcggccggcgccaacccagatgagaccggtcgatcgaccagtgtcgggaaggatgattccaaggcgagggtcgagagtctgaccgacggaatggatccccacgatggatccctagaaactccatcttgatacaacgccttcgaccgaccgaccgctttttttgcttttggtccaaccgtagatggaagatccggggcatgggcagaagaggtagaggtagaagatgatgaagacggttgactacctgcaaaagcccagggcccttctggtccggcagctctaggaacttgatcccagattgatccaggaggatagacgtgagtcctggatgaggaggaggcgatagcagaggcggtctcagcagagacaaaggcggctgggttgatatatgcaggattagtaaccgaaaaatctggtcggaaacccgtcttttgagagtttgttctgcagaatgacgaggcggaggaaagaaggggagaggatatgttatacagcaggtcaattgcatattcttgagaaggtgtcaccgcatgagtggactgtttgccagaagacaggggttcgcttgggccattgctgttctgagagagcacatcgaggagctccgatagtgacagccgaattcgaattgcttcaggaagcggttggacgtcctggggcgggggcgaataactgtcttcatcccagtcactctcgtcctcgctttcatcctcgtaagaacgtgaagatttgtactttgccaacatgctgtccaaaaaaaaaaaaaagacagccgcaaattgataaagcgtgagtaaattaggaagcagaaatactgataaagagcaggtcgaaatggacgccaacgatgagaactagagaaccgaaagcactcacgtagagagcagtcgttcaattccttcggccttgaccttgagagcgtggagctgactgagcgaagcctcgttgaggattggaccttgtccacttagtgaactcccaaaggcagctttgtgaactttcttgctgtccgagagcttccggccagacacgccatacccgagaacctccggcgtaccgaggagttgcttcctcttaggattgactgggagagacgagctcagggtagacaggccaagttctgtttgaagttgagccgacctggcttgaagttgaagggaaagcatatggtcgatcgccaaggtcttgctggactgactggccagttgaagtcgagcgaccgacgtaagagatgggtgttggtagggctcattttgaggtagcatatggcgaaaggatattcagtgtttgttcccaggagtgacagaggagactgtcttgcccaagagcgggtgttgatgagctgggtatgggtaagaaaagaggatcgagaaggacaaaggactcggtggggtgttttcgacgaatgaaggtgagaagaagattagaccgaacaaaagtgagtgagggtgtgagtgagggtcagaggatggatggtccaatgaactgttagaccggtagaagatgggaggtaaaaaagcaggtacccggttggccccgaactccgatgaaacccgaagaataaatgaaaaccgccggtgtcttccgaagaaatctgactcgggggtcgaaggcctgatcataaatgaaaacagctgtgtaatccgtgttgtatgtgcctgtttgtatacttattaacatgtttcattacaaaatctgtagtcagagcttgggagatgcaggatcattcggagtaatagtctgtaaccacagatcgtaaacttctacgtgttctcctgttcgttccttgttctctctttcttacttgacagcttcccccggaagccatcagggaccagatagatgagcctatagcatatccatcatagtgtcttctttccgtgtccgctaacactttctacaaatcttctcaaccactgatcttctttctcttctcttttccagcttcttctcctttcactcactcttcctctgatactcaccgcttcctctggcttcgcgcactcacccagactaatcgaaaactgaccatgtctccggaaggcttcctggtgactgtaagaatcccgctctttgcaaagtgtctatcattgtgcttgaaaactgaaggtttgcatggatatatgcgcttatattgtagaagagatggaggaagagacaaccgacctgtgagctccgtctgtctcctccgatcaacagaacatacttgaatatcattgacgttctttgtctcttaatctgaaagtatcgttgcccgctcatgtatctcgtcttcttaagctgtcagacatgtcgaaccggttgtgaccctctcggcagccttattctttatcattcttacaggcagcatcactccactccacgcccacccagcatcgaagtacctcctcatctcttcttgcgcgttcgctatcgccatcatgtcaggtgcaaactggtactgcggccgatccttcagattcaataccctgtaggaaggaatctggctcatgtctattgacgcttgatgtatcatgtcaactatcgataccgttcgcaggtcatactctccagccaacgaccgtgcatgactttctagaatcacttcattcgacaccaaagaagccgaaaaaaggaaagaagagaaaagagcatatgcccaggcagaatggctcgcaacatgtatcaacgctgcctcctttgatctttgaagatggaatctgcacgtaaacccattgattttttttgcacatatactcgtcttcacttctgaacctgtctacatcaggacagcatcgattaatttacatctctttattgtctcagtcctgttttgaaatttcggcctagaccccatccgccaagcatcagattcaaagctcgacatcgacctgcgctcagcgcacccattgctgctatccctacatcatcttcagaagacaagctctcattcgatctgtcaaactttaaacaattgtcgagctggaaagagaagattgacgtcaagtcttcttcgattcaggaatctcggaagaaagaactgcaactgccggattgccagaagaaaccgaaaggaacctcacggccatcaaacaaaaggcgcgctaccattcagaaacccacttcgaagactttgaaacaactagagttgatgggtagtgacgatcggtttgttcttgcatcattattcttgaccgctttgatgaagggatgtccttctaagtttgagctctcgtcttcgagcgagacttcacctttcttctctcagcttccctccatatgaacccaagtctgatcctcagcaatggctatcacattcctcaaacatcgatcatatcaaagtaaaacctgtatctgcgtttaccactattcatcaagctactcgatttctttctcctcttgcggaacttccggtcgaatgcagtccggtcgagtccgaacctatcacttcgtcccctccgagattggatccgcctacaaggctagtgtcggtggccgattccatcgtatgttctccaaaattttctcgatccaggatatcgaggccgagaaacaccaagattagggcaaacgatgtgaaaaagactgtcaatcaggacctacgtattttgaatttgaggaatatcagcatggacgaaaatgaggtcgaattgagaacaccagttcagtcgagccttcgcccaaggcgacttgatctacaggaactttcgactcgaccatcaatcgacccacccgatggatgggagaaagaaccagacaggcagctccgtttactttcatccactccacattgcgcgtctgcatcaaacacagtgacctttcctcgcctgtactctcgaccaagaaagagaccatccttctcggctgaggagattctagaaagacttcttccagtagcatcccaggtatcaaattcatcctggcttgagaaagagactgccgctcatgtagttcgcagcaagctaccttcttcttcctcttcttcttctccggcatggagagatagacaggacgctcagtcgtatggttgcggacaacagaagtgtcctgcttcgtctgtagttcgcaggaccaagagcattctacggcaccggtctacattaattttcgactcggccggaaacagcacccttcgcccagaaaaattgagaagaagaatgacagtcatgtttgacgatcatcagactgtctttggatcatcgtcttcagacccccagacaatcaaaagaaaactatctcacattatccttccaccatcatcgatccctgtctcaaccccagttcctgacgcatttttcggctcaagtcctgtgaaaatcaagaatagaaaaccaataaggagactgtctgatcttccgcgctcttttaatacagcatcctcttatttgccgggttgcctagaacctggtccaggtgtctcgacgacaacttcagtgtcgaatcttgataaatgcaccgttgatcgacttgcagtcagaatgtgattgccgctgagttgatagttacgatgtaagacccggtgtgcattgagtgtttctctctcatgattttacccttcctcccttcatccaagatcgttttttaaggtatattcttgataggtatatgatgtgagggtgtatatacagtataaggagaataaataaatgcacattcagagcggaatatgaacaaattactataagctcaatacatcgcctgagtggttgaagtggcggcaagtaaccctcacctccctacttcttccggattccgatctcctcccccatccctgttttcgacaataaccgagtgttcagtcggattcgcaagtacaaatctctcgacaggtaaaacaatcccttctctagccatcgaatacacccaatcaggcgagacgacaggtgtaccccatttgttggccatcttaactttctcgcctgttatctcacttggattgcatactaagtgtgtcgttcgtttgtgaaacgtcagatctgatgtacctcctgtgtgtgagtagagagtgacaaggcgttcgatcgggaaaccgaaggaaatacatcagacaaattctaagctgagacaaatagacagacggatgcgagagataagaagaagaagacatgaacgaacccatggcttccatgagttttcctacggcttcctgttctctaaacgagagcctggtcgaacacatgtgaacttcgctcattcctgtacccagccaatgttcaagaaatattagtcatcgccaacgagaacgcagcaaaagaagggagacagagggaaaaaggagaagagatgaatgatgatggagatgatcctcacctggtacaggtagctctatcgacaatggctcatgaactatattctcgtccaaagcgtatagcttatcgtccctatagcaattctcaatccaatgatgggtcgcgaatcttgcttctttactttctgatgtcgattccgagtttaagggactcaagcgtgtcggtcttccactaaatttaaatttgatttgttaagcagtacatgtttacaatggtcagtatgatcatgatgaaaggaagggggaggtgtagtcttaacaagaacaaagagaaagcagaaaaagtagttagaggagactcacgctcgaagctttacaacaacataatttaccccaactgattctgcctcttcttcactaacaatactgcctcccaactcactgacacagtctatcatgtttctccttacaagaccctttccacatctcaacaaaaaggtgagtcctctgaatggaagcaccgacggaggtggtatagaatcttggtctaggcgggtcgatgaggatttgtcaggaacggatatggggatgagaggagcaaagggcgcagaagtagatgcttgccgatcgaacgatctataaggtgaaagagttgagcgctcggttgtagagaacaaaagagatcttgacatggacattttagataagttcgttgtcgttgttgctttgctgtttctaatcccaccttcatctgaggttttatcatttccttcttgacggtcttcaaggcgtacaatctcgtcggtgggcgcatcgttggatgttttaaccgttggcaatgcatcagactcaacacctatatcgctcaatatatcacctaccagtccctgaacgcccaggtggttgttgctggttgctcgtctgaaccgtttcacgacggcgcgttcggagtcgtcgtttgttgacttggaattaacgttttgtttggagttagcagttggaggactgagaggttgagggtagagcgtggaatctttgccacgaagggccatatcttgttgaagcacccgctctagtaacatcaacagcggagaaagacatgagatcaaattagaaacaacggtaggttagactcggaggggtagagtgtatcaaaaataaaacgaacgagtgatagtatgcctatgcagatgatccttcggatactcgattctataatcctcttctttccatctccccatggcttctaaacaatcccacacccattcctcccaaacaacatgaataggttgttgatccctttcaactactacttcttttgtctttcctgtcccagtctcgatcacttcgacgtgtttgatttttcgagcaggtttcccagatgccagagtcaaattcaagtcggtattcacccttttagcccatctgaaattgagaaggaaaatgtttagaggaaaatatttatgatccaaaaaagatcagacaccagacttgttttatccaagaaccttggagaacagtaggagaacactcactcgactttctcgccaacacctgtaggggtgactaaatgagtacatgaccgatccaacactctggagacaaaacctttctgttgtttgattgattcaatcatctcgtccctctttggacctgagcaacggaagatgaaacgataagatgaaatcgtctacggcttagtcaaagccaaaatagcacgaacggctgaacaatgagtaaggaaggtgggagagtgaacaaaccaatttcaaacccagacatgcatattcggagatctcggaagataggcaatcgatgtttggcaattgactttttatttgaagtctcatacataccggttagcttatgcttgccgctaggagggcaaaataaaatgagacgttgggacaaacggtaggtagatcgacttctcctccttctgtccagatcctgtgactatctttaatccattcagctgaaagaattggtagacctaatgacaaagccacctattgaaaacagaaaatatcagctaggtagaaccaaggagcagcctctgcacgttttgacgatcactagatgatgctagtcaccttgtacttctcagatgtgaagtcctgggagactaggtgggtgaccgtgtcggttagattcatctcagtttgagctcctaattcgtgagatttattgaatagtgttggctgtttctcgccgataatcataagagcagacttgaagtcaggctatgttttgactagcgcaaaacagtccatgcaggtctgattcggaacgaaccttgtcgggaacaccagtaaagcagattatacatcctttgaaaggtctggaaacggtgttaagcacctcggttgatacctcatcgtcctcgtccgtgtcgactacacaaggagaacaaccgggttgcaacaagacgcataaaccgatagcacaggaagattcaacaatctttctatagaaatctatatggaaacacatgtcgcaccatcgggtaacgagcatgtgtacattctataggaacttaccgtggatttgggatcgacgttttcgtttagaggatgaagcgacgggctgagaagactctgtgaattccttaggtggcggtggtctcagccttgatccaggtattttggttgactgatgacctctagccatcgttagaatgatgttatgaggatctggatctgagtaagtcttgagactagccaagcaagaggtaagagttgaaagttatttaacgaagacgcgccgacgcgtcaaacaagcaacgcgacgcgacgcgtttttctatcatagccacgtgatagaacgtacgtcatcagttgactataattaaactgagccgttctttgcgctgagtttttcgatcgcttcgctataccttgaaaccccactaccatcttcatattttcacatctgctcaacaagatgaccaagagcgttccagagactgagtccgttcacaagccaactcatgagggggagagcgaagcccataagctgtttaggggcaggaaaggacatggcaaccacaagagcggaagagaagatgaggaagtcgttccaggtattgtggtacgtgcaagggaaaggttgcctttccataagagcaaagaaagtatgagatggattgattgaccattttgtgtgatatagcatcctggagcgacaggagtgatttactgctctgaaagagcctctgcaaatggcttcaccgacacatcttcggagtggtctaatatgggtcagtaggctcatacgttgtcgatgcatgattcattcgacataccatctatttgcgtgttctacttattttctttgtgcctttcataacttcaggtcaaggagcaccagaggtagggcatatcccagatgctccagaaaggaacatgataatcgatatcaatgcgctgggtggtgacgctgtcaacgagtatgcccgtgagttcatccggctttctctatggttgagcaaaccgttgaccccttgtatcttacttcgacagccactgctggagtcaaagagctgcgaagtatgttttcagtgaacctcatttctcattgttttaactggctatctaacggaacggatcgttgcaaattaattctttctttgttaaactaggcgccgtcgccaatctttacaatgttctccatcgagaaggaaaatcttcgaagtatactcacgaaaacgtctgtatcgttcctggaggtcgatctggtatgagtcgggtggccgccgtagtcggtgatgtgttttgtggataccaacttccagagttagtttctgtccttctacacaaggcaaaagcatgattgactgataggtttgctttgactggtgttttaaaggtacactgcttacagtgattcactatcagtgttcaagcgactggtccctatccctaccgttctttcccccaaggcaagttataagaatagagtgcctctctctgcgcattagcaatgtgttttggtactaaagtctaacatcctcccatgatatccctcatagaccaagtacgagcttgacatggacgctcttgagcaagagataaaggacaaaggtctttccgtcatcgtcgcttctaatccccggaacccaactggacagaccatatctggtgaaaagctgaacagcttggttgagctgacgaggaaacagcatatcacgacgattctggatgaattttactcgttctacaattacgaagatggacaagagggacaagcactcagttcggccaaatatgttgatgacgtaaacgacgtacgtgttcaagcttcgctctggatattgaacgttccaagatgaacctgagaaggctgacttctcggtgcttactgccatgcttataggacaacgtggtgatcattgatggtctgactaaaggcttgtgagttacatcttgacattttataacacagtaccttgtgtacaactgacggttgagacacgtcttcgtctgggacagccgactgccaggatggagagtctgttgggttgttggacccaaagaactcatctctgccgtctctcaaagtggatcgttcttggatggtggggccagtcatgtgtccgtctgcctttctgaatttatttaggccgatatataaacttgactgatatgaagatttgattgtacagtttgcaggtcgcggctatctctatgctggagccttctagagtaaaacaggatatcgtacgtcactttcttcagcataaagatttctcatgtactgatttcttttctaagcctcttgttggtctaccactaatctgataggtatcgctccagaaacatttcaaggtcagcacattctcttttcttttgatgttctcaactctcctgctaatgcgcttgatataacagatgaaacgagactactgtctcaagcgtctcgaggacatgggtcttcctgtggaagtttcgccagtcgcaaccttctacctatgtgcgtagcctggcatttttaatatgcaacacaccttcagcctttctgtaaactgaaactcttgattgggacgtataacatagggttgaacttggagtctctgcccgaaccacttaacaatgggctgacattctttgaggagctcttaaaagaaaaggtccgtgtgtctgtacattctttcctatttctcagagaaatactgacactcttttgatataaacagtgtatatgtgtacctggaatcttcttgttcgttgatttcttccgatgatgtttaaccctgttttaccccccgttgaccaaaacttgatttgtttctcattttttcaaagtgatgtgaatccgagtcatcgacgagacttgttccattctccttgccatcattatgtccgcctttcattcggtccgccgttggaacaattggagaaaggaatggatgcaatcgagaggatcgttaagagaagtaaggacgagttatcctctatgggcaagtcgtaagtccatctctctcctttcatctggtcaactctatctttttcattttcctctttctctcccttatccaacaagtagcctccatagactgtcagactagaatccccttcctttaaacctttcatgtatcgataacaagaattgaaacacacagaacagagcgttgaacatttgaggttccttttgttgtcctgctagattcgctcctctcgcgtcggcgattaagaaagattgaaaagggtccggatatgatagaaaagcatgtggtttactctctactttcacccgacaatatgttggagatcctcaagagggaatcaaaggaccagaactctaggttatgcttcgtcttctcttatcttccttctttcatcattttccttcttctatctgtatcctttttcagtcagttccgtgttgttctatcaatttaacctatcttattcctgaattctgtatgttctttcatgtccatatatacaaagaaagaagattgagaagctagcatatcaagagcgagaagagtcgcatgagaaatagaaagagatctgcatgttgatttgagtctgcgacaatctgacgacgactgaggatgatgggaaggttcgattagttgtgaagaagaatagaccgtatcatgggagaagaatcagagagattaaaataggtgaaatatacagcatgcttacttctaacaacaattggataaagaaaaagaaggataaactcagagtgtcctagaatgaggtgtattccagtgatacagttatatacaagacgtatgaaatagcataacagtctactatgcagaacatacagggccgcttttcaaatcctgccgagtagttttgaagcgcaggagggaaaggagatgctaccaacggagatgatgatatcaatgggtagggccttggatctcaatcatctcgttctttatgaacccgatagctagcaggaggctgactcctacaaatgctgctgtcgtccaaatagcgtcctgtgttcccaaaaggaaacgtttaattttatttcacaaccgtttccatttcggtaaagaagggactcttttcagtgcaaagaactttcgaaaagaaaagatataaaaggaatccaagaagaggagaaaaggctaactttgtagcctgtcaagagtgttgtagttgcatccggatctgactttgtagtggccgtcacgaccgccgcgctattcgccccaagcacaagagccaagtgtcagccacgggtcctgtcaatttgtatcggatggaatcaattagagtgaaaattgcatggtcgtaacataccagatagctagcccgaaacccgcgccaatctatactcgacacatatataaatccaatttgaattaccgataagaatactttggcttgagaaaagacacgtaaaggtgagagaacaggtgaacgtacttggaaagcagtattgatgagtcccccggctagactcttagctgaagggggtacacttgacatcatcgatactgaaaccacgttctatgaatccgacggccaacgtagacagttcatgtcgatatcgcggccgtaaagcatcaaagagatgttgaggaagaagagtaagccgaattagagtcgtacaaaagcgcaagcgattgaaacgtacataaactagcgaaattccgacgacacccagcatagagcttgggaacacaccctgccagaagcttgtatcaggtttgaccaaagccgctgggagcaccgagacgaaacagattgtgaggcctataagcatgagagttttgatctttacgtaattgatcgatactgagattgtgtaggatgccaaggcgccggctacgcccataggaatgaatcggacagaaacatccagaggagacatgtggaggacattttgggataaaagagtcaagtagagaacgatgcctaaattttgggaaagtttcaattgtatgaacgcatgtaggataataagttcgttacttcttaagtatagtaagaatgaggggaggattatgcgaggacgtactctgccaccagcctaaacgttaattggtggttcgtcattatttatcaatatcatgcgataaaagataatacgggttgatggaaatccaacgtacaatagatgaaaaaaccgatggcccaagtggcggcgaacccagggcgctggatatagaatttaaatttaaaaataaaataaaacaatatgaacaatgtgcgagtcagtagtgcgcactgtagacgataggatgtatcttgaacaaacggtgcttaccttccagctgatgagaattgggtcgtatgttttgcatggttctggacgaattagtcatggggcgaatgacacagcaaagactactacgagataactgaacctacaggtgattaggaagaatcgggttttgtactttttgctcgacgaatgcaaatccaaataaacactagcaaatcaaactctcaacgatcagtccatacaactggtgtaccacgacctgaacgatagagaagcttaaaaatttactgccaaagcaacaatcaaaagtccgacaatgaatccctttccccagccgtaaaccccacctgaactcagaacgaacgtcaagagaattagtccactcgttgccacgccggcgcctatgaaatctagggctggcttgggaccgtctattgtgttcttggtgtctggaaggaaaagataggcgatcaccgatacgactgctccgataggcgctgtcagccagaactataggtaagtatttcaagaggaaaaaggatgtaagtatatgggagaaatgtgcatgtagacgaaggacgacgaacgatccatcgccaccctagggcatccgtcaatacgcctccaaaaatgaggcccaaagtgaacctgtttcccccatgaaacgagggaaaacacgaggttattctgattagataagtgtttggactaggtaatcttagatgtcaaagcacgaaccctacggcacctgcagctccaaagatcgtcaatgcagtgtttctttccctgccgacgaagtagcttgagatgatacctacggcggagggaacctgatattatccgaatatgcactgtcagaatgattattttccctgcatcaagtgatcattacgaaccgttgctgctgctcccaacccttgcatggcccggaagacgatgagctgaatttctgtctttgcgaatccgtcaatcaatgtccacgctgagagccacgacattccgccttgaacgacgaggaccaagagatataatggatgtttgccagagatgtcagcactagcgtatgcgaattccgaagacggagggtaaatagacgtatacaaacagataaagacatattttttgccccatcgatcggcaaagacaccagcgaggaggaggaaacctccgaaagtcagtcttgaaacatagcataaagaggtatgtatgatgagtcagccggtcaattcaagctaaaagaagccagacgtgtgagattagacgcacgtataggccgagatcagccattgttcatctgcctgacggatttgaagttccttcgagatcgcagtcagcgccatgttgacacctggcggaagaagcccaaaaagaaatgaagatgagaaattcaatgaaagaattcaaatgtggatatacaaaaatatactgactagtcattgatacgttatcgagcatctgactggccgagatgacgacgaggatcatgataccgcggaaactagttaggctacctgtctcttttccgtcggcagctggattatcataactcatttcctcgatcccttggttgaaggacagactgatcgtcgcctggtcgatgcttcttccatcagtagtatcattttgggtgccctgaactgaatggtaaggctcgatggggaggtccttcgctgagctggtgtcgtctgcagcaggacttgcaacggagtggacaggctgtcgatagttagatgatagagtgggaacaaaagcaatttgagaggctagcggatgaattgagtttagagccgtagacgaaggtcttcttaaggacgcagaagagttggccggggcttgctctcgttgtgaggtgaacgagctatgagagcttcgttctcgtcgagagattcggtcggccaaagtaggtggttgctctgtttcggactcggagtcttccaacgcagagctgacatctacggcagaattgataatatttgggggaaacactggggccgacatactcaccctatctgtagacaagtgtatcgatgtggtgacgatagtcgaaaggatgagcaagatgttcggacagattgatcagcacgcaaagttgcaggcgggtctaggcgaatcggaccgggcttgccgggtgataggatccatgctgactaagccgatactcctcaggctttgtgtattgagcgatctaaggaagtgagttctgaacgtcaaactgtgtatcctcgttataaggtctgcgcgcatggcagcatcacaaggagagctctgagaacaagttcaaaggctgtttacatggttctgggagggagagaaaggaagggatagaccaaagatcggcgacgaaggaggccagttcatgttaatctgcttgccgacttgctggccgatatagattctattgagggttgaagatttggcagatagcctccaaagaatcccgagatcaacctgattctgattctactgcaaagcatctaagcgaagctctctgtatcttcctgtcgaccacattctttctgttcctgctaccgctcgtggtgacgatgaggagacaggcatgagtagatatctagatgataccgtctttgactattctgttctcgcttattggcgactctggtaggcaagtgtaggcagattaggtaaacacgtgattatgtaatataatacttatgtaatcaaagcaagtcattacgtaacattgccctggccagcctgtcacgccgtcacgcggctcgtccctcttttctggaattttcagaattctctgaatttttctcttcttccctccaagagacccttcgtgagtggaaagagtccattaatttgaacagaaccagacagcatggggtacgttgctgataacaggattggtctctctttgggtcgaacaacatcttgttcttgtagagaaatatccttgaaaaatcctttgatccgcacagacgagatcacttgggaggctatttcactttttttttcaacctttttaaacagttagtttttcttttttctttctttcattttcttcatcaactcgatggctaacaagaccctttatcgtccaccagccaccaacctttacactagcaaaaatgggaggaactcgatccgagaaggaggcttacttcgttaagcttcgagagctcattgactctaaccgtgagtgacgatcgattgcttgactttttctgtagacccttcaactaaagaggttctttttttaccctatctccagcctccatcttcttggtcaacgttgataacgttggatccaaccagatgcaccagatccgacagtctctccgaggaaaggccaccatccttatgggaaagaacaccatggtccgacgagcccttcgaaccatcctcgctgactaccctcagttcgagaagctccttccccacgtcaagggaaacatcggattcgtcttcacctctggtgatcttaaggaggtccgaactgagatccttgccaacaaggttgctgcccctgcccgagctggtgctctcgctcccatgaacgtctccgttcctgccggtaacactggtatggagcccggaaaaacctctttcttccaggccttgtccatccccaccaagattgcccgaggaaccattgagatcgtttccgacgttcaggtcgtcaccgctggtacccgagtcggaacttccgaggctacccttttgaacatgttgggcatctcgcccttcacctacggaatgtccatcgtccaggtcttcgacaacggtgccatcttctcctccgagatgcttgacattgaggagcagaccctcatcgaccagttcttgaccaccatcaagaccatcgcttccatctcgttggctatcaacttccccaccatcgcctccgtcccccactccttggtcaactcttacaagaaccttatcgccatctcgctcgccaccgagttcgagttcgagggatctgccaaggtatgtttcttttgttgtcttttatattttgtctcgctactgtccttgttggctctgcctctttcctcctctcctgttccccgccaaatgattattatttttacacacactgaaaatcctgagctcgagtcttacggactcgttttgctgagcaatatcaacatgatggccttccttactaccctccttctatgtctttctcaaattgtagttggtttctgaaggaactgaatcactgacacgtttaccgattcttttttattcctatgtataccaaaggccaaggagtaccttgccaaccccgaggctttcgccgccgccgcccctgtcgctgaggccgccgcttccaccaacgaggcccccgctgccgctgccgttgaggaggagaaggaggagtctgacgacgacatgggtttcggacttttcgattaaactcctttatcccgagtttcttctgaatggctttccctgcaagggacgggtgtttcggaccaggtgattgtttatgttagtgtaggaagatgggaaaaggcttgaaggaggggaaaaaagacaggtagaattcatcagttcctacccctttttttctttttctttttttttcttttttttttcttagcttgcataacagtttatctaggatgaatgctagtttctttgtttctattgatcacgtcagaagagtcgagcgggacagaacagacgaagagttattgaggcacagacaagcagaaaactcggtttgtcttgagaaggattttaatcttaaccagtctgcaacatttgagtgaaacgacgatacattcatctgaccactgagcacgcactcatcatatgaccaagttccaaggcagctatctagtccatggcatcaaatagtacagaagttacaaagacagcgtcgttgtcgtcgtctttgacgaaattgaatcgatacggacgaatgaaaaatcatcagagcatgattcaagaacggggtatcatcattcaacgtttgtgtcattgccctacaaccatatggtctcattttcaagtcgttgttgtcgtcgtcgttgtcattgccgctgttactggaggattcgagactatcggaggaagaagaggagcggaagatgaagaattggaagtgaatgccttggtcgaggtagagagtttggaaacctcagcttgccaagctctcctatcggctgtcgtcattttcggtcccaacatggcgtctagtttcgatttaatcgattgctgtttgcaatgaagatatgtgtggatttgagccgatatgtacaatatcagcttcgttgtctttatctttaatgggacaaaaggtgcaggaagggtgaaaaaagagaaatatcgaggcaaggtggtacgaacgctatcgatgattcctttctcgtcctcatttgatccgccatttatcaaaacgagcctatcgacccaatcgtccgttccgaaaggacaacctttggcatgttcggttctgatatctacccctccacttctgcgtcggatacctatctccgcactggatggttcatgcgtcgaatgcaattcgtgtgatgaggattgagatcgagacagaggttgcgtaaaagatgaagcctcgagggagattgcaagtctccgtctgcatgatgagcatgatacgagcagcttttcggagcgagttgaacgtgataaagaagttgctgtaggtgttgatgtggatataggaatccagttaaagaacgacaaaagagtagcgggtgtgctcggtcgtagagaggatgacgatgacgacgtgttgggaagtaaagaagcaatttggtgtgaattctgagagagaacaaacgtcattgaaagtgtcttcagcatcttgtaaagattcagcagtccagggtatgtggaaccaagatgaacggcagatccaactcacgagtggatgaacgagctcgacatgctgaagatcgacgagtttatctatctcgtttgctcgacgaacgagctcgtccgtcatcatgtgcccagtcacgttaccgaaagaagtcgctacagagcgagagagggagacatcaacacaagttattctttattttatcttttagagggggaatgaggaagagggcgaaggagagtacatacgatcggtctgtgaggttctccatgggcacggcttcgtatgggcttctaaaagctctcggcgcatgcgctctttcaatcttgatgctatttcttcacagcgtggtggtgatatgagaccaacagagtcaggaagaaagcaatgaaatgcaacagagagaggcagaaaacctcatacctggtttgtcgccgagccctttgaaggagctaacaacccaggccgcttgacaagacgcgcatactagcctgtttctacctttgttgatccagccaaagatgcttgcatcctgaggagtgaacgccggagaagaaaatgagagcaatgtgtaggtagaaagacgggcggtgtatgctgccagagagaatggaagaaaggaggtcaaggaagattgcctgaatggtcatccgtatcatagaaagagggtcagtcgagtctgggtgacgcgaacaaaaatcacaagaaagaatagaccaatacaaactcttctaagtctatagaggacaagaatttagatcgtttggctcctcttgtagaaggcgtttgatcatctgaggcgacaagagcatcgacggctcttttgagttcttgtttcgagaacgtgagttcggatctgaacggtttatctgttatgtttgaggtgtctagttgggaagattcctctgccggttctggttcgtcgacaacgacatcttcaggaaagagcgcagagaacacgtcttctatgtctagttggagctgaagctcgagctcggtatccgaggtatcttgtgagatcgccatgggtgagtcgatgagtcgatgagtgagtgtactgagtgctgattatgatgcttgaataagagatgagactatgtgagactgagggttgatgtggctgtgtacacgtgatttgtgattaggtaatattgtacctaagttatatgaaactttacctaaggtccgcatttttttcctcatacttattctctgtggccttttttctttctctctcttttctctttttctcttcaacatctaggtcagtcgtgtctctcgcctcttgatcgggctcagatggtgtgacagatagataaaggacatggactaaccttcatggaaaacaaccatgcctctacagtcaccgctgtgccttttaatccgttcaagtcgctagacattcacccctctttactacccaagtaaaaactcatatatccaaaaatggcttccaaggacgatttccagaagggtgttgccgctccccagttgagcaagatccgaattgtatgttgtgttttttcctcttctttctctcctttgcttcccaggtcgtggagggcatagtgggaatttgattattgacgagtttcttttcctaatatttcttccctcacaacagaccttgacttcccgaaacgtcaagaaccttgagaagttctccaacgatctcatcaaccgagctaaggacaaggagctccgagtgaagggacccgtccgaatgcccaccaaggtccttaagatcaccacccgaaagacgtcagtttttttgtttattcattttacctcgcacatgctttctgacgcaagattcgcccttcactcgcatacagcccctgtggagagggatccaagacctgggaccacttcgagatgaagatccacaagcgactcattgacttgaacgcttcctctgagatcgtcaagcagatcacctccatctctttggagcccggagtcgaggtcgaggtcaccatcaactctgcttaagcgtctcttgtgctagatactgttcgaattgatgacttggggaaacttttgttgaaagggtatctcgtggagaatcgttcaaatatatcttggagattgtttctgttggaattaaagattggggcaatgtgggcgtgtatatatcatgcatgttcacactctattgtgtttttgggcctcacagagaagaccgttgtagttgtccgtgttgatcttgaaagaacccgtacaggagaaaggttaaaagatcaagggaaagttgagcggatatcagatcagaggaagatccactgacagtcaacgagccactgagcgtttatcttgtgaacccctcttccagactaccaaacagaaactactctgtgcagaaatagaccaatccatctcgtctgccgttctagttcaatctagacaagaacgacacgggcctatcatgtgcctcaactaacccatcatggcatgtacgtgtgtgaagtctagcgtacaaagtctggatacacctccctctgactttaaccctaacactcgtcgttcgttcaacaagcgcgtcaaacctatgaggatacatcctggttttcatccataccttacatcattcgtcgcccgtggctcacgactcgattccaagcagctacgctcgacaaaggccttctaggtctacaagttctcgttcatccattcacctttcgaaagaagaaatcaaccaataaaagggaatgtcatcccggacactccgagctagaccagcaaacagaacatcctactctatcctcaatgacccgttagccatccatctatcttcctcctcctcttcgtcatcctcgacaagatcatctctctctgcttcttcatcaagatcctcggctcgatcggaatcaagatccaggtcagcctcaggctcaagatctggatcgtcttcgacctcttcagaaatacacgtccaacaaccttcattctcagcatcgacaccaaacgcagagataatatggtcaacagccgagaatgcagaagcagagtcgtccaaatcgaaatctagatcaaaaccgaggtcaaaaacgcgaaaaagctcgaaacggctaagaaaggaggatacgaagcagaacgccagttctggcttgaagaaacgacgatccagaacctttgaggatcctgcttcagatagcgagagtgaggggtttgctccttctgacgaagaagacgaggaggaggaagaagaaaatggggatgaacagatggacaatgacgataggtcgtccgacatggaaggacgatacgacgcgagcggacaggacacaccaggtgcaagaggtagagggacgaccagacggaaaggaggccgaggaggttcagtgggttcaacgcgatctttatcgttctctatctcgtccaacaaacagagatcatcagcgtcaacagccacaataacatcagcctcaaaaacacacaccaccaggcccaactcagcactatcaagagcgccctcaaaacctactcgacgaacaatctctttaccgactcatacgtccaaagctcaagctcgtcggaaggaaacaaagctccctccgacaagtaaaaacacgacccatgaagctaccatgtcagatgctatgcctcctctcttcccacattatacctcctaccttgccgcgccgcctgggttgaatcggcgaagcgagatcgtacgaaaggtaggaggtcgtcggatcactacggacagtcacgggaacgagcgagaagagttcatcagggggaaagagagtgaggaagaagaggaagggagaaaacgaccgatgggccctggtgaaacggcgaggagagtaaggatcttcacgagagcagcttgggggatgacgccctgggaaggatgggcaggagaaggttggagacctaattctgctagaggagataaagacaaaaacggatgggagggagtcgagagacattggagaggaatcgaattgctagatgagaggtatgttcccttctcgcacgtatcttccattctctttgtaaagaaaagcagtataatgatcttcgttcatatatctggtatggccgtagacaaggagcaaagtttttaccgaagccaacaaacgcaagttctcagaaactctacgctgggattttaacagatgataaggctcaagaggaatactctataccagtctatggggctacgtctttaggttcgtccatgtgtcgtcttgattgacagacagagatatatgcataaagcacataagactgaagattctcttgtgcgtatatgtttgtatttggattggttatgacaaatacagaagacataggggttgagaagaaagggtgtatattcaatcctggcggaccagtctgggatttagattggtgtcctatgactgaagaggaatccgaaagtgagaggatgtgtttgctgtccttctacgctctcgttaacagctgccttgtgtccaattttaaattttgacgaccttatcctcctttcttgtgcctcagaacgaggcttcaagctctatctagctgtatcagtccatcaatctcttgacgacagtctccctatcggacaggcaaaaccttcgaacactcctggatccatccaaatttggagtatctctccaccttctcgtccctcacattcatccgaggccgtctcagttgacccttcagcgatggatgtgtcaagcgaatcgacaccgactgccacaggtgtcgatgaggcagcagaaccgtctgtagaggtcgatcttgcaacccaggcaagcactaagggaggagcagaagaggaagaagaaaaaacagaagagcctagtccaccgagagacggattcgtgaagagcgaagatgaagaagaagaggaatgctatacccttcgatcggtcaactcggacgaagagcgcgaatcatccgttcgaacaaaacgttctgctctgaagagcgcagcctgggcaccgttaacacctgggtacacacctaaaaggatccgagatatcatctttaataaaactccggcttcaaaagaggataaggaggaggtactgattgatctcgaggggtgggagatggaaatgaagttggagatggtggtttgtatcgacggagggaacgcgtggaaagttcagtggtgtccgagtgattcagctgataaggtacatctttgcgttcttcccttccccgttacacatacaccttagtcttatccttcttttctttcaataccaaaaagttgagcaccagaaacggatccaattccaccgcagatactataccaaagttgggcgtcttagcggctacattcgaggacggctccgccaaggtgctctccattccagatccagatgcggttcgtggccaggcggatgtgatatctgagaacaaagagaaaccgttatatggtctgtcctttcttctatgataacctgatagcttaagatggccttttcaaataaccattgacatctacctctttgttgtacggttatcgataaacagtcaagctaaaaccgtcgacagtattggacattgatgatgggatgtgttggtgtctagactggggcagcgatcgaatgttggccgtaggcacgactcatggtttgtttttttcctctctcttccttgtttatttttgtgaagctgactagggtgaagttgtttggtctaggaaaaatcttggtctgggatgtaaaggaagctgctttaaccgaggacgaccttcgtatgatctttaactttccttcgattgttctatgacgaaaagaacatgaaaagtgttaattttcctcttctgtcttttgttgacaaacctagctatcccactccactctattcaagctcactctgctccgataagatctctgtcatacctgcgtgcgcctcaagctgacgcacaaggaatttatcaatatgattgggagcaatctcaaatcctgtcagtgtcaatgaacgggcggatcgtcttgacagatttaagagagtcaggaggaagtgctggtggtggaggaagctcccttacgctgcgtatggttcgaggtatggtgatttactttgattctctactgtatacaagtaaatgaggtttttgattgcgtccgagctgatcaagttgctcataatcctttcgacagatatgaccttagctactacagcagtttccattcaaaacggttcaggacttattggcgatggagattttgccgtacagatgattaggggtcgacccagaaacacgtccacatttagaaaagtttctgctcaggaaggagctatctgggttcgtcaactctttcttgtttcttcttcttatttaactaaagaacgaagagaaataactcgctctccttctattttcgatacgaaggccctgtcgacgtctgattatcatcctaacattgcctccgcgtcggcagatggatctctcgttgtctcaaatactctaagggggacgactcataaaaaagttgactgggtatgtccgtctcgatgaatttctgttcacaatgcatacacccttcgccttcggtctctgattgtcacccgggtccgagacgttcctcaggtatcgctcatggaggtcatttataggatggatatgaacgaagctacaggggagatgaggatgctagacaacatattacctcaggtttgtgtctccttataagtctttatactatctctctctatgttattcactatttcctgcgttgtctttcaactctattcgaaacacagaacgtatcgttcactcgaacacacgacagcaaagcctctgttctaccttcgctatctgtctcctcaaaaccatcatccataacgaatactgtccgacctatcacatccgcttggcgacctgagatagctgttctctcaacctcgtggaattcaggatctggggtaggcagatcacctttgttggctagtgggatggcatgtgggttggccagggttgatgtaatgatcgaaggaagatggaatagagctcgatttagaagggcggcggatatcgctgcattgagagaatgtgtggacggagagacttaagagaaggcacgcgtagcgcagaaggtgggatacgcgatcatgaagtgaaggaagacgatcgagtattgttgagttgttgctctcgcgtgttggtgtatcagtgtgttagtacgattacgaatgatcatgtaaaattcgcacgatctcgggaagctatcaacaaatcaaggcaaaataaaacaaacatcccgagtatctaacgtttaagacacatcccaacatctgatcttctcaacatgagatatacaatacatctttgagaacgctggctcttggcttgttaggtgaccaaataaacaaacattaatctttgttgccaccaacatcgtcgtcgttgtcatcgttcaagagccaaccctcctcctttagccagttttcgacttgttctctctccaccttgacttgtttctgtccttctttttctcccttctttttttccttgttgacttctccaaccaaattgcctagaacccaactgggcaatggcgcaaacggctcactttcgtcgacttgagcgtctgtggccagcttggtagttctagatgcagcagagggcgagactaatgttgtcagacaggcgtaacataatttgtcttccaacggcatcgtcggcgtttttcctggtgtcgtcgtctcgtgttctgaatgagtttgagaaggcgaggtcggcggggaagattgactggaaagtgaggtaatggatgtagtggctagccattctagaggactttgatcagccggaagttcacaaatcggacaaactcggccagcccagggattttctctagggcaactagatggtctggcctgagatgaatcgtgcgagggaggaagatatccgggaaagactagtttggaggcggttcgggcgatggtggagacggttgaggggtgcgtcgtgttgagtgtctgaatgaattctgcagtaaacaagattcggaacgcaacgaaagttagttgagtaaaacggagacgatcgatgagagcagactgaagaggaagaggataaatttggaagatagatgaagaatatacaaaccctgagtgagtgcctcaatactactcttcccaccttttccgtcctcgccaatccctaccccgctatcccagtcaagatcccaactgggcaaacctctctctctggcgtaccatgcaagctccttctttccaagcccaccgagtggcctgataacattgacaccctgtgcttcaaatgagctcgataccaacaaaggaagcgagtatcctcttccggaagcaagcgcagagacgacgagagaagccgatcgagttgacgtcagacctgtgagaagtagcgggggcgttggtgttggagatggggcagtagagagagagtaggccatccgtgtgaggagagaagaaagtagctggaatcggagagacggatgtgacgatacaggaagttgagctagtaagctgtggtaggaagaagttgggttcgcgttgggaagatgcgtcgtcttaaggactatcgaaatgacatgagagcagagagaagtccgaagaaaatcagaatttcttctcgtacgcaatggacacaagacagaagaagaatcttacctcgtccaggcaacacgttcactccgatcgtgccattcagtccacctttatcattgatgagctctccatccttgtcaaatgcctcttccaccttgaccttccaagtctcccattcatatttctctgctagcgctttgatactagtccatcttttgtctgctctggtctgttcctcatgcccaaagtcgacaaagcccacgacaatccggccccaccgagctcgacccgttcgagacttcgtcgaggtagactgacagaatgctcggtggaagagttcaagcatcgatatcgaggctgaaccaccagagcaggcgagtaggatagaaggcgtaggcgtgtctggctttcgagataaaggaggtaggtgaggaaagagaagtcgggtgaatttggcaacgacaagaagcgccagacattctctgagtaggtgagggaaaaggaaaggggatgaatacactttatagttgagcaagcgaatgcgtgtggaggactatgaggaggaagagcctgatcttacctgcagtaggtatagtgaccaagaaccatgctacccttcctatccttacatctgatgcatattctagagtcaattgtctttttctctattagaagtaatcataagcagttattatcagctctttgattgggccagaagagacaaagaagaatacgaactgggcatcaaagtctcctccttcggctctccatcaataggtactgcatccgggtttccacaagacatctgtatcgaaaatatatgttgggttgcgtcggccgtagtagtgaatacaactgtaaataaagtgtgtatgctgcctgtttggcagttggtctgttcaaatgtttcctactcaaagtggaggtaaaggatggtcacacaaagccgtaactatggtcacggaagcgtttttgaatgatatatgccagaattacttatctagacatagcgcgcataagtactatgccgtttgagtcacgtgtttgtcaatacattggtccggcgatataacgccacccgggtgatttgagtttcagggtctcctacttccgcttcccgcttggcccgaagataaatatcttctgtagactttcttcacaccgggatagaatccccgtatttactgttaaatcacttacttgccgattttgattaatcgcactgtgtgtatggggatcttctccgttaaacaccaagcgagggcggatatcgtgcgggtatgaaagggatcggagggaggggatctacattgtgtttacgcggactcaatgctcgttccaactgtgttcttccgagcatttagcctcatcatgatttgatttcgcacatggtcgacgatggtttttgtccaaccactttttgttgtctttaatttcttggtctagatgttcaatctctcgtgaagatcgatccttgggcccgatctgttattcgcaacctaatcaacgtacataatccgttccatggccttctggattgtctgttgactcgtttcgtgcacatatcctgtcgaatcttcacttgatcactaacgactcatactcgctctccttctgaattatgttcatggctaataagacattaccaacaaagcactcgggtccctccccatattgttgacatgctaataggttcgggtccggaactgctcccacttgagattgttctctgatacctatacattcaggtccaaacaagccaggtctgcctgtacgcctgtctttgttctggtctcgagaagcctcataatcgcaggagatcgcagtgcgtcctccttctgttcgcgtccttctgagtttgtgtacgcgttcttgttcagcttggttgtcctttgtttgttgttctccagaccaacttcttccttgcgcgttcttcagaattgtataaaagatggaatgcacaaaaggtcgaaggggtttgtagaagacaaaaaacgtctcgtctcaatctgttcatctttcatatcttgcgacctctatcctatattcttgatcttcagtcatcatgcgattctcttcttctactcttgcttcggtcgtcctgctctctgcagctgcttctgctcagaaccactccagtgttctagagaagcgagacactgctgctcaacctcaggcgtctacttacagttgcgaatgtgcgcccctttctgcattcagtcactcttgtcttatcttatcgaagcgcctacttatcttctacatcctctgtattcatctagacacatgccctacctggtcctaccaagatgatatctctcgagtggttctctccccgtcttactcatccatgtatgacacaaagaccatgctttgtggctacggctggcagtaagtctttcgagactctttccacttttgtctttcaagtcctaatctcgtccctctctgcatgaaatctaggcgcacagaggatgccggaacttgccgatacaatacggcaggacagagtgtgtataataagagcgataagacggctctaagctgtccctctacgacctgttagttgtgttcattcatattctggtgggccccatgtatgaagtggatggctgatcctaaattgcgaattttccatggtttttgctagccaacggagattgcccctcaccggtcgcattcggagatgcatctacaaagctttcatataaggagtcgacctcttcaaccgagtacttatgccagtcagtctccatcatgcctcttcctttttttttcttcatcaacttatcgactgacaatcaattctttcctccctcttccccctgtctatcgttcatctcagctacaccatgtgagttcacattctcatacttttctgaaagaacgagaagctatcagactgatatcaactatttatctgaacatcagtgacaaaacctatgctgccaaatgcttttacaacaaggctaagggaggccgaaagaacaactcagagacgaaatccgaggagcaatgcccattgacagctgaacagagctgtgctctccgaaaacgatcccagaagcggaccgaaactgagaacgagaagaaactccgaagcagacagtggagctaccacaaaacccgggccatggaggctgctcgaaagaggcgttaacctgggcattcaagaacatatctgagaatacttcttaacttctcttttcaggcgatcttcaatcataacctctcatcttcaccttattgccagtacttctgcctgattatttgaaaaggtagtcgatcgctcctgctcttcttctgttcttttggatgcatcaaatatatataccaccatctataccccgctcgatacccattatcttcatttgataaccttatttcgttccttcactcatgaatcattgaaatttccttttttttctcttttttttctctttcctctcttcaaaacaaacattcaatacacataccctactacgatacccttctgatctatgaatcctcacataccaaaagtgcagaaaagccacggtgtcgaatattttgaatcttttgacacgaatatttcagactgacttcacaatatatatctgctttctcgttatctaatctccaaccctaactccccatatagtcgtctcaaagaaaccttctcaactcgtttcccccctaacagtcacctttctaccttccgcttggccttccttccatctccccaaatgttcaaattatcatccaagaagcctataaccaatcaacaacatgatctatccaatgttcttagggatcgctcaaatatcaagttgggagcgatactgaatccgttagaaggcgtccaaggggatcttagcgcaatcgcggtcgatcctttgggtggttggctggctgttggtgagttctaagatctcgatttgctgctgcttaggagtatattcaacgaatgcgtatgctgttcaaaaggcaagtaaggtactctccagagattcaagtgagattactttgatgatggtcaatcgagttgcacgatcttgatagacactgcggtcaaatgaacagagctttgtaaggaggaggaagaaaatgtagaggatgagtcaagaacgaggactatgcaccagaagatccttaagaaagctttgatttgattctaactaaaatggttcactacatacaggtactttatccggtgccatctatctcactggatcttccaccgtatatgttcctttgagtatatatcatacacccccggaacccctctggaagggaataacatctgtcaagtttttgtgcttccatcctggtcatcagcgacttgtagccattggtaagatcaacgtttccttcttgatcattccatcaacagtagatcttcttgttgcttcaactttgattgagtttggctcggcatttgatacatatgtgtagactcgaaaagtcaggttcatatttgggatctgggattgattgatccgaagaccaatataccatataaagaagctaccaacagcttgtataataaagtgacgttagtcttcttttcgtctctccttgcatctattttgctaaacttcacttacccaagcttctcttcatcatctcagctccatagaccttccttcagcttccacctcacacttacctgttaccttcaaagatggagcaactggttttatcgacctatcccgatccgcctttctcgcaccttacaagatccccaatgtttgggcaaaacatgaaagtcgattacgtgcatctgggatcgaaatccccgcttcaagatcatcaaccggtccgcccatgtcaatcggggtgaatgttaatccaagagacagaaatttgatgttgatagcgtatgagggaggagtgatactttgggatcttgagaagaaggagtcaagaaacacgtttgaattgagtatcatgccaggcgcaccgggagcggctggttattcggacccagtaagtgtttcccttttcttgtcccccgtagcttggaagacatatcggactcatatagtgtatctcagaatctatttacggagagaacaccgggagtgacctgtatctgctggaagccagatggattagtcttcgctgtaggatgtaagatgtgtttcattttgtctcctgttttcaattttttcctcggtaagacagctcatcagcctcacgtacttctatatcctcacgtgacagatgacgatggatgtatagctatatggtctgtggatgactctgataaaccactctctgttcgaacggtggatgaagaagatgtcaatatcaccaacgcagaaagtgtatgtttttctttccagttcaccatacaacaaatcacgggctcgattctcacacatatgatttcgaaacattagttattcgaatccggcgccctcgaaccgggttcggtgactgagggttctctaccgaagtcgctacttcttcctcgagaacctatatttaagctttcatggacttcgttcccatcttccaccaccctcaacggtcttgttccacctccctcaccagagactatcgagttttctcaacgggaagagactattctcgtcatcctcggcggtcaatcacccagcatcaatccccaaggcgttactcttcttcagtttccagcttttcatccgccagcggctgctgtcgctcctccttccggcggattaagttcgaatgtccgagctgctttcaaagattcgttgatctctaccggaacatttgtctaccctacagagagaccatgcgaagacttttgtctagtccccagagcagatccacattacggtctaacattcgatccagtgggaattatctttatcataggttcggtgtccgatcgagcaggctggatgagtggacgagggttgaaagcctattcgttcccaccagtaagatccactaaggtggctgtgagtaagactcgaagggaacctcaagcagaagtaggagaagatgagtttgtgcctatatcggcgccacccaagacgctcgttcaggtcaacgcggagccatcggtattttcacctcaagcttggggatttgcgttatctggcgatactgagaaccaatcagatagtgatatagaagacaagggcaaagggtgggcacagccatttgtaggaagttctggatttggagagtggagcttgtcggcgaggctgtggtgtggggtggactcgataggaggaagttggttgaagcctataacgtcagagggactgagaagaattggcggaggggaaggaagagagaggcttaacgatggaaacccaaggctctggcttaatggtggaaaagcacacggaaaggtcgatggggataacttcaaaggactcaaagtgagtgaatctcttctataatctggacatcgagtgtttttgtctcctatcagggttttctagattgacgcaagagttaatttcacagcttgaaccacatcgccttttggtaacattccacctcaaccatctcgtcaggttctttgatatttcttcccaacttctccttttcccttctcctctaacaaacgagtatccagaccctctttcaaatcttaccatcgacctgccttccatcctgcgaaaccctacgatatctcacacacccattgcacagtcatatgcacgcgatccaaataaagtttctgttcaaactgttgaatttgcatcgacgaccttggaggtggctgtcattcttagtacaggggcgataatctacttcaagtatggtccggcgcccataccctcgagtccatcttcatcctccggacctgaattcaccgatctacgacatttgtcatcgccgacgcctcatctcgatggcttccagcctcaattcatcttggacgtcaatagggggccggtaggagcatgcgcggtttcagatgctgggttccttgctgtcggattcttgcaaaacagtctagcggtggtgaatctgagagaaccagaaataattctaggggatggattcagtgagcaaggtgaaacgaccaagactgaaggatcgatcgttgggtcacttcgttggactgtggttaatttgggagcaggtaagctttataattttgtacctctctactagtcaaatatgccaaaagatggttgatgcggccttgtcatgcatgcacgctgggatgtatccagattctacaccagcaatccgactcattgcttctggcaacaagggtctcatccgaatcttcagccttcattatggattggctggttgggaaattgagagaaaaccggttgtgtgcacatacgaatcgttgggtacccctttgtcatgtttcgtgctcgatctaaagtctggggaggagttggcacttgatcctagacgattagaaagtgagtactgctctctttcaagttaatctacttctcgcgttacgtcgagattgacgaaccggcttctactgcgtctctttcgcagtggcgagagcgtcttctgatgcacagcaaataggaggcgcacaaaagagttctcatgcaggctctcagagtgttatgatattggcagggaagaaaggacttagatctcagttgaatttgaatggagaaagaattggaaaggttgaagttcaaaacagtttgaaagccgtctttctagtctataaacatggtacgttcagtccgtctttatcatagtgatgaatcagatggactgattctttgagaggattatctctcgttttccacgcatagggggtcaagttcttgtggcttttgccgaaaattctgatatctacgtctattcagtcccagcactggatcttattattcacatcccctcaaggtatatctactttgatcgaactcaaatatgattttaagagaacaaacaactgaacgatagttactcttgattgtacctaatcttagagagacacttggggagatctcgatggatccgttctctggtatttttttttaaattttattttgagattgtcatcattcctaaatcagtcatgtcctaactgcagacatcattggaattgatttactttgaaaggtgactatctcgattatcggtccccccttgacattcggttccatactttgttcaacaccgctaaacctcaagatccgcaaattacattagacacccttcgcccacccatccctgctcatcctgttcctgtcaaatcatcagtcatcgcttcttggctgggtacatggggaggtggaacgctgacgggagctcagatcgatgcgctcattgctggtcctaaacgaccgactgctcttcctaaaccaaattttgcttctccaccgacgactgatcttaccgatgccaccacgactacttatacgaggggaacatcaagcgggctggacggcaaaccgattcctgtgagatcaacagctcgttccagtagagctggaggaaggaacgatccattcagagaaatggctgaagcagctgaagaaagggtcggtcttcctgttgctatcttctcactatagctttggctgatacagggcttgtatgagaatctagggcaatatgttggacggcttacaggatacgatgaaggacataggaagacaggcctctgagtggcaagaacaagctcgaaggactgctgtacgatttactgggtttctcttcctcttcacatcatccctgagctaatactacctgttctgaattgaattatagatgaaagagagtgtcaagacatcggccagatcgttcttcaagttctagatcaaactccccgtctttgttcaacctttacctggggcgacttgtactctatgttaaatagaaatgataaaaacatgataataatgtattcgaccgagaaggacagatatcaagaaaaagaaaggaagaaagaagacaaaagagcatattctggtctacccaaatttctgttgctgaactcttcgttcatctcctccccaatccgaaccttccacttccacctcctgctcctacgccagacccaccttcccttcttccacctcccgatccgagactcatctctagagctctccttcccactccgttagctccaggtccattgacctcggacatctttcgctccaactcgacgactttagtcttcatacctgaagaagttccgtctatccattgtaagcttgaaagatgagcgttcaaaatctgtgagatctgcgagattggatcttcgttgactcctgcgctattgcccgaggagggagtggcggctgacgaaggagttgttgatgatgtcggaggaggaagaaggagcgaggaagaagaatcgattttggaaggaacaacggaggagattggatctagaatgttggtggaggatgaggacgcgttgccagaatgagaggaagagagcagattgacttcttcgatcatcgtggttaatgagcgagagagagtgtccagctgggagtgaagagattccgcttgggcatacctgtagaacgccgaggagatattgaaagagagcgaaaaagaaagaagcaggcctcagtttactctatcagatgcaataggcatgattaaaaaaaaaaaagagtaaaaaaaacggaaagataaaggatacggacgatttttccctctctccatcggcaggtccaaagtccaaacctccagagcttccaccacctttgacagctccaccaccggaagcatcaaagatctcattcgcttgtgcttcgtacccgtcgagcaagttacccaattcggcttgctgagactcgatgtatgtcaaggaatcagtgatcgcttggttggactgctcagcctctaaaatctgagcatacaaattcgagatctatagcaaacggcccgaatcaataagttaatctaagatgcactcgatgtttgtttactttgaataaacacggctcgaacctgatttccgttctcgatcaagacccgatcccattctttcacctctccagcctgtctagcaaactccttgacctgactatcgagttctttactccaaccattcacgatatcttccaatgtctttcctttgagcaggttcggtaccggctctgaggctttcgtggccaccgacgaaccggccgtagtagtggcagagttagtggtagcagcaggtgcagcagtggtggtaggaagagcaaatccaccagtcttgccaagcgtggccgaggcaagagcggcgatagaagcggtggtagtggtggggggagcagctgccggcgtagcgggcttagctccgaagagggaaggagcggccggagcggtactagaagatttaccgaggagtgtaatcacattccagaaacatatctgttagtacttatctttgatgtcgttgaaatgagcaggaaacatactcggccggcttagcaccaaataggcctccagcagcaggagcagcaggtttgggtgctctgaaaagtttgatatatagaaggcacgcgcattagaattgaaaaatacgactgcaatattgagacgatcaaagataaaaaaccgggacttgctctacaggcttagctccaaacaatcctccagcaggcgcagaagtcgttgctgacctggagaaaagattgacaagaaagaacaaacaaacaaacggttagcgaagagcgaaatcgccaaattttggtcaaattttgtatcgagaacagaaatctcgaacgtactcggcaggtttcgcgccaaacaatcctgctcctgcagcgggagtcgcactcttcggagctctgatcgaacgcagatattgatgaagcggttagtatgcaggcacaccgagatatgatcttgaatacgatttcacaggacagcaatcaagattgagacgtactctgcgggcttggctccaaagagcccaccaccaaaggcaggcgcaggtgccggagcggcagaagcgggagattcagccggctttgcaccaaacaatccaccagcagcgggtggcggagcgggcgcagacgtcctacgcgtatccataagatatcgaccgtcagcgcaggacacaagtgggttaccttgacaaagaaaaaaacaaggaaaagaaaaacagtgaagcgtttggaaacgtacgcaggtttagctccaaaaaggcctcctccgaaggcaggcgcaggcgcagcggtagctggactattaatcatcccaagaccatataccagcaccatagacaagccgggcaagaaagccataatttcaatatgagaggacaaagaaaacaggattgaagaggagacgtagagagaagacgaacgttgcaggtttagcaccaaacattccaccgctagcagcagccgctccctccgccggcttggcggctccaaacattccaccaccgaatgctccagaggcagcagacgctggtgcaggagcagctgtcgatccggcagcaggtgcaggtgctccaaagagagaaggcttgggtgcagctggtggtgcggctgctccgaaaagagatgaaccggcgggagcaggggcagagccagaagcgggggcagaagatggttgaccaaagagtgagggcgcgggggtgccagaaggggtagtgctcgcgggcgctctaccagttcacggttcgaatgagacattagggacgtgcaaatagatgagattgatcaggttgataagttcaagctaaaatagatgattcaaaagaaaagtaggcacatacccaaagctgaatccacctccagcaggagtagctggcttgggtgcccctccgaacagtcctcctcctccagccgcggctgctcctcctccaaatcctccaaagccacctgagctaggcgtggacgatccggctccagatgcagcacctcctccgaagagtgaagtcgaggcgggagcaggagcggcggatcctccacctccaaagaggttggaaggcggaggagcggatggagttgtagtggttgaagggttcaagttgaaagccccgaaagcaggagccttggctggcgttgaccctgtgtcggtacaagggaacaactcaagcggtgagccagaagaagatatcgaatccgagagggagcagaggtatagatgaacgagaagaggatgaatatacgtaccagatgcagcagctgattccaaggagaacaagacacgaaggaaaaacaaaacgatcaactctttggtccttattgaacacccgaacgctcagagcatctcgcgtttccactagttctaaaacatgcccgaggttatccaaaagacgagcaaagaacgtggcctctgctatctacaaagaagaaaacagtcaagatcaaacttacgagctccaaagttgaaagctgaggccgacgatgatgatcatgttccccatttgacccaaagagacaagcaagagcgaacgaaacctcagaagcaatgtcagcatgataccctatcctgctcccctacctccaagtcctgcgaaccatgagaaccatgagagcttacccatcttgtgggttatgttgggtgagcgaatgagcgttgtgggttgaccaagaagcaaatgctggtaagaacggaatccacgccatcttacgcgtaaccatgtaaagcgtgaccaggaggcctcgaagccgcagacctagctgtggctagagcgcttctatctttcatctttcgtcgttcagagcacaaggagatgaacagaaggatgtctcggttgtgtgtgtcgccagagagagggagagagagaaagagagagagagaggagcagagggaaaaaagtcgcaaggaacaaagatgtttacaaagagagattattcattcgatcgtccagattccaaccattttacataaacactccatccactcaagcatccttgggcgtcctcggggtggagaacgcgacgttgaggatgagatttgcgtatcctggtgtcattgagaaatagagatagagagagagagaacaagggtcagtaccattccttgcgcttgtcatgctggttgcgtctccattcgaagcgcccacagccagaccgtaaatgagggaagagaaagaggaagaacataccctgtccgtggaccttgtcaatagcccgctgagcaacctctctcgtgtcaaagctgacgaaagcgtaccccttcttgactccggtttccctatcctttccaatgtagaccctggcgaccctaccgtgggtacctctaatggcctgctcgaacaactctcggagatcatcctcctccacatcgtcagacacgttggtgactcgaagagtgggcagatcttctcgggaacctccaccaccaccaccaccagggtatcgagaatcggccgaaggctgaccagctcgggcaccccgcattgacctgaatagtagaaacaatcgatcagcaacgtacatacccatatgggactatctaattgaaatcaagagcgaagctagcaagactcacggaggtacgtattttccaccggtggaagcaggagcagcagcctctgctggtgtcggctcggctccgaagtcgggggtttctgtaatattcccaaaacaaaaagccagacgttgagttgtgagcgctccttgtatgttgttacgaaggggaagaaaataaactaaccgctcgtgtcgggtccaagtccctccaaggtctccttgtaaggacatttgctggtgaactgtcggaccaaacaacaacgacgagacatggtcagccacatcattcactgacatcaacccgaaagggcggaaggatgagactcacatggtcacccttgcacaatcgacagacaatcttcttggccttgagagcgttcttcgggtcatcctcggcctccttgacttcctcagtctgattggtagaaggagagattcacatatgagtacgtgtagcggaaaaagcagaacggcacttccaggtaataaggggctttagatgaacgtacagccttgccgactccgagtttgaactgcatgttctctccaacggtggtggtggcgttctgcgggcctgcagggtttcccctctcggctccaaacctgttgttcaacagaacggatttcgccgtcagctttttgaaccaacacatgccttcctcgcctgtggtttatctcggaaagatctcgagaaaagtatcaacgaaagagatcgtacttagcccaggactttcgctcggcaacgacgtgggagacctgctgcttggataacgtgcgcttgatttttcgggtgatctatatagagcggaagagtggaagggtgagaggtggaaaatgaagagtagaaaagagtggatgagcgttcttggttcggtttgatcgcataggtgtatgtatctggacttgatatcggtgggcaagatcatatttcttgcgacgttctcttctcggttctcgcttgatcctcttcttgggcgttcctccctgttaaaaatccagacaatccttccttccttcctgctttgttttccaccttcataatcgagtcgaccggcctaacaagaaaccgtgacgcatgggcacccacacacgcgtcgtgatgatgtctaatactggagtctacggaagcacgaacgagacgggacgagagaatgacacgaagaaacataaagaagaagaagaagaagaagaagaagaagaagaagacataccttgactttctttccgtcatcgttgaacttccattcgacgatcgtggtcactccgtccgaaccgacggtctcggtcttggcagggaggacctctgaacatacagatataccggttgatgacagtgttggacgagtatgaatccatacggtgtgccaggcaagctgtcagcatacatgtgtaccctcaccatgatacaccaccgagatcaacagaagcagaagagcttaccagtctcgtcgacatcgtcggcccagttggtctttgcggcactatccacccagtaaaacggtaaaaaaaaggggctcaacatgagctctacccatgaacgtacaccccgggaacccttgctggcactcacgtagacatgatgagctataggaacaagacaaagagaagaagagcaaggcaaaggtggtcggtcactcgcaaaggcgaaggaagaaaaaagatgggccaaatgagaaaagaaaaatgagaattagtgatatttgatttattcttacttaaggaaaattaatcaaatattttcttttctctcccccctgcctttttctttctcccagctcaacggctgagaggatccaacgtcgacatccatcaccccagtcagcacacagacatcttttggaagaatgaagttcgcaaggaagcaggtaggaaagatctacaagtccacgttgatggacaggctcgtccagtcggttgccagaaacaaggattctccagactggcagcgctcgcagttacgtaagttctctgctcttcctctcgctggctatccctgtgtttctttctctttttggtgcagtcggttcaaagacagatcgtctcggtagaaggtcggactagagatcaagcgttggagagagaagaggtgcggagaattcgatcgcatatgttgtgtcgcttggtcgtgtgcttgctcgtttgcattctccgtttttttccttttcgaactctcctcggttgtcttttgggattctccttggtggatgacaacgggggttgtatccatcctctcaagcaccagattagatcaggctaaccattgttacttcttttgttgactgtccgttccacagccgcccacttgcttccgccgagaccggtgccgacgactacttatcccaccgtgcctcgtcctcgtcaggcagctctcgctcagatcgccgagtcctcgccaaagaccagctttccgatcatgaccactatcttcaaactgccaccaagcctaccgccaccttctcccgatcttgtctctcacatgctcactcatatctcttcccgagaagccagaatcgggaccgcaccaaacaacaggaagcttgcctttctcggtcggcggttgctagagatgcacctccagatgtttttgttccacgtgagggatccaaagaaccacttgcctggtcaagtcgctgaaggaagggagcttgtcatcaaaacggaagacggaaagactcttggagatggatccgaggcgcaattcatgagggaggtgctcgacccgcgggtcttgggccagtatgttggaagcaaatggggtctggaaaactacatggaatggtccggcaaggtatgtcgatttttgtctgtgaggcaggttgtccatatgaaggaacaaatcaaggaaatccacctcgttccgaactgaactgatcagtcatcgtacctggtggttatatccgtcgcacctcagactccggcatcttctgcagtggccgatccgaatattcgagtcaagagaggtgtgagcaccgtccgtgggaacattatcggatctgtgttcggtggattgtctcatgcttatgtacgttgcaaccctctctcttacactcggatgtaaatctgtatagtctgatttattgatttcggaacatctcttctcatcaacatcatcatcatcatcgtagggagctccgatgacaaacaggctgttccacatccacactctaccccatctgaagcctgtgttgcctggctggcttcacggccacgtcgatgtacttcaatcgcgcgcggaacgagtcgggttgtttgtgactgaggatgccgttcagcgggagcaacagctcttggctgaacgacagacaaagaaggagcaggagatcggagtcaaaaagcaggcctacagggagcaagatacaatcagaagtcggaggaggaatccagcagaaaccgagaaggccgatggagttgtaaacgtctagaatgggatattctcttgtgttcatctcgttcttgtgcttgtttggtcaatgcaaaaaaaaagtgaacacaagataaacacgataaactcaagacagctggctcagagatagacatgcgccgtacatgcgtgcttctctttgtcatgagctatacacaaagagagaaagcaaacaaagttgatcacagaagaaaggcaggacaaatgcgggccgggtcaggattcggttcgtcccgataaataaatcagcgagcggacgaacagaacccatctctctccatacaatcatccatccggcactttcgatcgctctgaccttccaactctctcgcctacacacgctagatcatacaggatcaaaacagtattcgcgatagacagctgggatgtcgaacgaggtcttcttaatctcgggttcgtcaataaacttatccttctcttgactgagacgggttcttggcgttcaagacatcataccatggatatggtctaatcgaccagcagcttactttgtcttcttgctttctgcttgattagatctcacgttgatcattcaagagtcagtcctgaacggatcttctcttttcaaagcttcagtttatgtctctgggggtgaaccggaatctgaatagtttacatctgggaaatacaggacgaagagaagacattcggatgtgaaggaagcagcagagaaagcgctagggctgttgaaagatcaggcaagacctaaagacttcagtccgggtaagtttcgttcagtctatccgtttctctggtggtcgttctcgccttgcccaggctagtgagaacagacaccaaacattctccagtctatttctgtgttgatgtccgtcttgaagtcggctcagtcacaaatcatcatcatgtaaggctcaacgcggtcaacaggctgatcttgttcccattcatgtttgacattcatccagaatcgaccaatgcagcagacctgattgcgcctatctcattgggcatgaagacgaaaaatcccaaagtcgtcgctctctgtataggaagtattcaacggctggtctctctaggggcagtgtctgaggtacgtctcatcccttaatccatgggtttccttcgtaacgcttgttgaacagtcttaaagcgcatgcaacacagagccggttaccaagtgtaatccagagtttggcaagcgtcgtcaatcaaggtgttgatatacaactcaaagtactacaaacgatcttggtgatcttgactacggcgaagatacacggctctcttcttggcgaggtatgatctgttcgccatcgaccttttcatattgggacattactcgagacttaccttgctggaacacatgtctggtcgttttctctgatcgcataacggataaggccttcagaatctgttttgaactgagaggtagtcggatgccagtcgtctcatccacagcagccgcttccctccgccaaggcgtcatggttatctttgacaagatctcactcgaagacacctcgtctgcagcggatgaaacgacgagctcgattgagctctccgacggctccactgtacaccttcgaccggccgcgctggacgggtacaggctttttgaggatctatgtatacttacagactcggctggcgccgttgtaggattagacaaagcagagagtagagctcaaaatctcctgaacttggacagtttaccagaaccttttggactcgagttgatcgagagtattctcagcaaccatgctactgttttcaaaaaggcttgttcttctctccttgttccatcggtgacgtcgtatgccatctggaaaagactaacgctcctgtcctctgatctcttagcatcccgaacttctggttctcctgcatcatgacctttgcccacttctactcagcaacctttcacttccaacctcctccgcgccttcctcttttcctcttacgcttcgactcatccgtgtgatatatcttcttcttcgctcattcccagacaaactcgtccgagaaacagagatcctcctcagtttccttctcaagattctatccggagaatcggcctctctcggtcacatgccaggatccgctccgataagagatatgcccgaagatagcatcccgtcagggagctacgcaacacaaaagggagaacaaagtcctggttggcttagggtgcttgcgatggaatgcatcagaggactctgctcagatggagttctactccgaaagatatggatgagatattccaatggaaaatctactgaagatgccgattctgatcgcgatccaagccctctcctccagccttcagatccgtctacgatgaacacctcggatgtgacgtcttcaccatcactaccggcgtcggtaccttctccaccccaatccaatcttttccctgcattgctttctattcttcatcggatcgctagtgagaaaccaggactattggggacgtctacccaactgaatggcatcggtgtttatgcatatgaatccgtaggaggtgatggtaactctccaggaggatcacaaggtggagtcggtggaagcctcggtgcaggtggtctcggacagaacccgtacggttcgttggaaatgatttcggggatcgtagccagtggagtgagtagtgtggtagctagtctaacgacggacgcgcaagccggactgggcgagggaagtactgtcaaagttcaatggttcgtgattcttttcacttactctcgtcttgaaaaccatccattgtatgggtgttacgtttggcatggcttgggagtgacttgaaatcctgaccctgttgctgttgttccataactatgtatagcatcgaccagctagacaagatcgaaccccccgtcttgcctgatacctacctctatcttctcgccctccagtgcgtcaacatcgtgatcgaagggttctcatccgtcatcacacccgtctatgcaactgtcctaccgctcaggtcatccttggctatagcaaagggaacgcttgggctatatgaagagagcgaggaggttcaggtgactcgaaagatgatggaggctggctggccggctttgttagcagcgctcagtttctttctgggacgtaatttatcggatgaggtgagcttcgtttggatcaaagtaactcagtttcgtttccagtgattgtctgctcatccatgtcgtctactctctcttcagctgttttccgatacgctggcctctcttcatgaagcaactgtcctttgtggcctgctaggcctgacaaccgaacgggacgcgttcatcggcaccttgtctcgacttgctgtcccaccagctgtcgtctcggctcttacctcttatgaaaacgctaccactcccaaatctcaaggaggagtgctcgccggaggtgcagaggcactgggcttgatatcactcaccggcccttctgtgcaagagccaccaagtttatcgtcaagaaatttgatctgcctcaaggttctcattggcgtggccgagatgatcggaggtggtctcggaaagagctggtttgatgttcttgaagtccttcagagtgctagctttgtgttggcgcctacaaaacgacaggccaacgcatccaacaagaagcgatcaactatcattccaatctcaatcgcccatcaatcgtccaattcgaatcttagggtaacctccgccggtccttcttcttatagagactcgactcgacccagcgtgaatcctcggtcatcgtcttccatggatcgtcagagcgatctgccgtctcgacaaggatccgacttggaaagcatccagtcgtcaatcagtcatatattcgatgctaccaccttcgagttggacccggaagctttaaccgagtttgttagtgcactttgtagactgagcgaggagatgcttgggctcgttcaaccgcaaacacaaaagggcggagcctcgaaaaaaacccattccgaggagggccccgctagttcgctcccagatgtgaaggcgttaagggacgccattatgccgaagaggaggaggtcaagtgggcttcatctcctaaaagataacgtgcgtctcttatacttcatatttgcctacatccgattgttctgtgtgatctaacgtgtatgttatattgttatatgtgtatgttaatactgggcccttctgatactcgaagcgacatcgaggagaccgttctttcgcaattgataagatcgccaagatcagcagtctcaatcttcatcgcttggtagtcatcgatccgagtcaaggctggtccctcatcgttgatcaccttcttgctactctatgtgaagctactgcttcgtccaccatccgtctccaagccgctgaagtgctggatgaatttttagtcaattctattcgggtttcaaacgaaagcgttgattccggcatccaccctctggtagtctcttcccttgcggctcaagtggagaggacatcctccggtcagtttataccagtggagatagatatccgacgactcggcctggaggctctgcatcaaattcttcagtctgcaggacatgcattggtagatgggtgggaaatggtgtttgtttgtctgagaagcgtatgtaggagggttggagagcagtacagccagctggagacattagcggaggacgggaagggtgtgagagaagtctcaacgtctagtcctattctgtcgcatcgcaagaatatgagtggagtctcaatcaggggcaatgcatcactgatccgagcagctttccaatctgtcagtaaccattccaatctttgttgaatttttttcccttattccaagcgcttcatcgacatgcggcatcttatcttctctctgctgatattcgcgcatcatgtttcttgtcctggtaggtcatcttggtgaccactgactttttatcgtcattctcagtggatcatcttcgacaatgcgttcttaccctggccgatttttcccgtcaggttgacgatgtcaacatttcactttcctctattggttccctctggaacgtctctgattttatccaatctaaacggccagaacagacggaccggacgttcgacgatctttggttctttagtgtccgagaacttctcacatgctgtatcgacagtcgggcagaagtgcggtcgagcgctactcagaccttgttccggtcaatggagctctacggatctacgctagatgcaaagctctgggagtcttgtatctgggagatcatattccctttacttgactccttaagtgctttcgctgagtccgaagtggacgataacacagatgcctcaagatggtcagattcacgagttctgacattatcgtccgtagggtctctgttctccaagttcttcctttccgatctgtcggctgtgaaggattcaataaaggtctggaggcgtcttctggatgtcatcgttgcatctttcaaatcacccgagtcccatgtgtcaactgctgccgtccaagctctcaaagaagttttgtccacttgggtctctcatctggaggaggacaacacgtcaaaccattacgaaccgtacatgactgacacttgggctgcttgggaaacgatgggaacgcagatcgtcttgatatctcttgatgacacacccgtcatcaagttcacccaagcaagtcttctggcgttcatcggagctcttctccctttacttgttttgtcgccgtcactgtggtcgattgatcgtctttccaatctatccactacccttcggagcgtgatgacctacccttgctacgacgatactcggtcagatcttgacaaccccactcctcttcaagcactgatctttgaagccttgaaacaattgaatatcgagattcctggctcgtcggctctgcttcttcaagaatcaagcagtcttatcacacttgcttttgcatcgtcgcagacagatcggcaggggcaatcgccgagacgaattacctatgtcgcagtctccaaagaggcgatgacgatggctcttcagatgtttgaatcccatcaaactgatcctgagctctattcgagcggtgctgtcagccaattgatcaaagcctatggtctgcctgtacgtgattcacttacacttgacgcatatatgtgtccgattttgagctaatgaactccttatacactcgtgtcacaggccaagctgaaagtatgtcacctctgtcctttcaaatatttccacggggatgactgttaatttaagtttgcttgttcgtgctgtatagtatgattgccctccttcatataaattcgaagaacagccaccactttggaaaacggtgggcttggttctttcttctgtcattcacgatcagcgctgatcgaatttcgattcacaggctaccacactagccctccaagtcattagaatcacgacatctgttttgacagattcaaatttaagtacgtttgatgtatttgtttgtcttttagtgacttcatctgtagctattgcgtagtggctgacaaatttgatctccagttgtggccaaacaagctcgtgaagacttgtggaacgaaattatcgattatttcgtaggagttctccttgttgatccgtaagctgcttcctacattcaaattagagcagtgcgtcactggtgtaacattgacttgtctgtttcatgatcattctccaatattcagtcgtgccacggaagatattccgatggatgcgcaaactgccgacgaaacgcatgatttgaaatatcttgccgctctcgaaaaggacattgtccctgttctcggatgggctgatattccagacctattaatcgtccggctcgctaatgccctgtcgactgcaagccaattctactacttcgattctgattcaagtgagacctctttgtgtcgaccgagaccgacatccttcgacccaagaatatatcagagtcacgatggagatggagatggagaagttcatggaatcacagcggaaatcatcggtcatcccaaagaaaggttttccagatggtgtttcgacgtcatgtttatgctagtcgataaagttgaccagagtcagtcttgatcgtacaaattacttaaactcaattttcgaagatatgaaaaactaaactggatgtttgatctagacaccgatctccgtcagagggtagccaaactagtttttcctttgctaatgtaccgctgtcagactgttctctcaacttatctggctgatcagcctctgcgtgggggtatgcctttcccaaggtaaatacaatcgaatttctatatcattcgcctcgtgggaagcgctaatttttctttgcccttgaccttggctagattgagagaagaagaactagtgtatgtgttgaaaaaacttttggagttgagtatgtatgaaggctctgtgataacgagtggttcgtattctttcatttcatcacaattcacatacctatcagaactaacacccgcttgttttcctcttcttcttttttttttcttatgtcgaacctatttgcagatgatatcacgtctatgtatcaacactcgccaagagctcatctcttcattctctatccgcttctactggatatcgcacttctaccccgacgaactcaagcgggtttagacgagggttatctgcctataggatatggctctggtgttgaagatgagatcatcggtgggaagcttgatgctcgtgcattggcaggagaatgtcttcagttggtcggagcggagtggaagaagggtggggctcgtgcgtgacatgtgctcgagcacaaatatggattgagggaagaagaaatctattctctcggtaatgtacttatttatgtgcattaaattggattataggttattgtgaatcaacagcaaagacaaatagtttttatgctagagagtggatgatcggacaaatgtaggttgatgtatgtctgggaaatccagagtatgatgcagttatgagacgaagaatgacaacaagacgatagtgcaaaaagtatgcaaaagaaaatagggaaatgagaatgggggaccagaaatcatagatggcactccaatcaggaataattaaggtatcattggcctgatgaaacttgatccattgggttttctgactggaacattacttgctcccccacgtcgagcaggagctgacgtttctgaacgggatttagtaggaggcttactgtagccagacgatgctgatgcggtcgcgcgagaacctgtaccgcggccggctgactggtcatatgcgaattgctgtatgtcgagcggtttacttcaacaaaggaaaaaaaattacaaaagaaaaagaaaaaagtaagtctccaatatagctgaagaatattgaaacaggttttgagaaccacatacgagatagtacgtggcgtcgagcgtgacggaggggcaacagcagggacagtagaagaaacagaaggaggaatatggacagatgtgtttgcagcacgggaaagtcgttttagtgtcggcaggaacatctttccatacatgttgaaacgctcttgggttacaccttcgatgtcaagaaactcttgttcatctggaaaaagtagaatgagataacgattagaggaagcatcttcatgattataatgatgaaattgcgcgctcacttaaaggaagactcaaagccatcatctcgatgatctcatcatcgaatacatcggtgattttcagcttccgctgatctgcgatctgtgaagaaaataagcacgtaattgttgagaactcttcagaagatttcctaggcacatgatattgcaattgagataactacttactcggaaccgaaccgcaataagatcagcgtagaatgattctgaagagttttgttgaggtgcgggatggcctccaaagatatcgtcatttgaagcgttcgtggcactctgctgacgactcagtggcgctctaacagaattcaaagacgatgctttggtgaagagaggttggtcctcatggatttccatgtctctaaactggtcttcttcctggtcgtcgtcaaacaccactgacgaatctgtcagatttttaccggccttgccatatttaggtttggccttggtcggtttagaggccttcatttttcggggggtattttggcggaaagccatctgaacgcgacagtttgtgttagcactgaatatcgatactagctattagcagaagagcctccacctacttgaatttgccttcctttgaacaaaaactctgtatgtgctttgcccagctatacagaaagcagatcataagagtttagccctgtgattcactgcactactgaaaatgaagggttgagacaacaaaagacctacttggatataagcgctcgagaagccactgccgttagaaatataagtttcggaaaacccttgttcgataagcaaattctcaaacaatcgctcagcatccgagatatcataagatttcccagcgccatgttcaggtatatcagcgatatcaatatcgttgacctttgcatttgatccgcgaaagattccaacagcttgtttcatagtgatccgacggcctgattcgacaacgttctggacaagacgaagagccttcaaggcatccgatgtctatatataagagaattagaaaacacaccagccataaacatcaagagtgatgaaacttaacgcaccacgtctcggacgtctattgtaccagtatcgacggcgacacatacatcacatgtttgttgactaaatgagaatcgcaactttttgtcagcatcgtcaactactgaaaagttcatcgatcgagtctcaccaattggcagcatcgaagtcttcgccgaagaaggcctaagcaatgatggtagcgtacataatcagccactgcaatgtcatgggagttgcgccgcacttctttgttaaaagataaaactaaccaaaatctgtcttcgcctacagtctgtcttgttcgtgcagaaccggagaacacctctgacgttatcattctgccgttctttctgagcccaattgagatttttatctcgcgcgatagagttaaagatggacttggtgtctgaacggtaaaataatgaagaagctgagtcagaatcaacagaaaagaagatgaagaatgcacaagtgtgaccaacctccccacgagtaaactgtgattcggaaagaaatagcaacgtcatagattgaattattgatcgttcaatcgaccaatatcataaaagggcagggggcgtctagctgggcaagattcagaattagaagagacgtacatagcacacaatccgaaggctggccatctctgccagctcgtccggtctcttgatagtaaccctcaagtgatcttggtagagcgaagtgaataacgaagcgcactaaaaacatccagaaattcgaaaaacaatgcagatgatcaggaaggttcgatcgatgtatcaatttgtaagacaaggcctaccgtctgccttgtcaattcccattccgaatgcaacctaacccaaagatgtttttcctcgattagactagagacgaaagaagtaagagaagacaaattgaaacatacggtagcaactatgacctgaatctccccactttgccaatttatctgggtaatttctcgatcgtccttcgtcattccagcatggtaatgagccgcgttgatcgcgtactgatctctcaagtcctttgctaccttctcacatccatctctactggacgcgtatacaattccactacttccagcatgttgttctcggatgaacgtggcaatttcttccgtgacctttttggtcttgggccggacttcgtatattaagttggcccgattgaacgatgatgttatcgtaacacagttttctaaacgaagtgatcggatgatgtcgtcacggacttgaaaatttgctgtcgcggtcaaggccatcaagggggtcccaggatactctgtcttcaaagcgcccaaatctcggtctgtggcaaaaaggatggaaggaagattgtgagcagatgtacatatatcgagcaaaacgatcaaggaaagtcgcttacaatctggtcggaactacaaatgattgattgttgtacatatcgctcgggtgtcagtacaatagtcaaacaagcgctattgaacctatgttcattcaaaaaaggcaattcacttacatcgtgaccccactgtacggaggcatcaggttaatcgaaaagagggatgcttgagcgaatttctcaacagactttaagtaggtttgaagaaagatgaacgtaccgagctaacacaatgagcctcatcgataacaaatcgtgccaatttacctctgcggtatatacttctcaacaaactctgaaattgagcgctctttcccagcatttctggagtcacataaacaatccccccatctatgctctccattccgctctcgcctccattcaaaaaagtgattgctctttttttctcagccgcggggagatcgcccgtaaaagcgatggcagggatccctatcgcatgcaaatgggcgacctgatcttgtattagtgaaatcaaaggagagaccacgatggtgacgccggaagtcttgccgagagtgacttgagacggtagttgataacataaagatttccctcctccagtaggcatcaatacgaagacgtctttcccggccagtgttccgttgatggcttcaagctgtttatctcggaatgccttgaggcggaatcgtttggcaaggacagaaagagcctcaacagaccatggaaaactgtgttctgccctagatgatccaggtagagtcttggcaagcgcgagtcgagcagaacgagcggaagatggcgacggtctgatacgggatgaaggaggagggcatgggacaatatccccgtaagctggtgggggagtcatctgaggcacaaaattcaatgtcgtttggactgtagctggcttggttgaggggaggggtgggtcgaccgactggatgtcatcgctgaaggtgtaatcgtccagatcgaatcctgcgcatagctcgctataatcctctacaattactggccccttgccctttcctttgctattgatagccgatccttccaaactagcgcctggtcctctttggaatgatattgtctgcggacgttcaacgatctccagctcttggatctcctcttcctctcgttgcctttccatcatcgggctctcctcttcgtattcgtccacgtcatagaccgcttctatgtgatcgagcatagctaactcggaggcttgttcctctttttcatcgtcactcacgagacatatatctgccccattgtccaaatttactgctcttgtgctttgttggttccggtgggattgttgagtacgagaaagttgtgatgaagacgtatgtacacgacgagggcttggagctgaacgatggcttatctgagggggatcgatatgcagagcagtagagctagctggaagaggaacgctgggaagacgagatgaactgctagtaggagtgcttggcccaagtggtgttaaaagtggtgtcgacgactcgcgttttccttctcgagaagcaatgatggcttttacatcgaataggttttgtcgcaaagcgcatctttttgccgaatcaaatataagtatgtaaatatcaaaatgaacaacacaaatagctttgaatattctcgtgaaactatgtacgtactcctcatcctccagagcctcctgttgatcaacagacattgaactcgatttttgctccgacatgacgtccaacaacctggtcattatttccatctgttggttcttcagcatttgcaagtccaacggttgccagcccggtattgacggaacgacagggggggcagatgagcgaggggccgctttagagccgaaaggtgcagggtcggagaaaggagcagtatgaatatttgaggaagacagagctttagtagaaggtgggatgactggtttaaattcggacttttggtagaagacacagataagtataaccacgaacatcagtcctgtaaaaaataagtagatttttgtatgagcaggagacaagaaaagatgagactgttacacacatcatccatttctgtcatggctttgacgaggatttcctcttggtcttcatcataaccataagcagatgagggagctgaagaccgatcctgcttcttcttggtctttacataccgtccactgcgcggaagaggagacgattgagtgcctaagtgaaatcagaattttcatcagattcaatactgcatgaaaacaagtctcgaaatgactacacttactaggtatttcaatcttcatcttcctagttgatgcccgaacgggttcctgtttgaccattgaatcgccatctgattaacgacggatggacacaactcaaaccggtaagagctccatacgtatatgcttttttgaaagacaggaatgacggcaaacagacctaaggaaacaacacctggaggcttctgtgaagacatcgaaaagtcttcgagtttgttagatctctgtgaaggggttgatttttgagagacttcgaaaacaaagtgaaacatctagtcaattgctatcgatcatgataataaaaaacgtgacaacgatagcaatgatgatatacctgtatatgcgactgttttgggttttttggaaccagaagttggagaatcgttcttaatggccgtaggactcggtctctttctgttcgtgctatcgatcgcagatgcaagggcgatctgtcggggtgttgatatggaaggtttggattcgattgaggctagacaggcgcgagggagaagcatacacatgaaatgaacacagctcgaaaggatcgaattaagagcgaacgaaccaggcttacgtttcttttcaagaggttttcccctattggccatacttgttttggatgtggttgctctgacaacagatgtcatagacgatcccaaagagagagccatttcttgctccaaaacctgacggatctttgatgtagacgacgtcggtcggacagaggacgacttgagcctgttgagagtctcatcgagattatttcttggggtcgtcatttcccaggatcttcaatctcgactgagacagatactctggatacagagatactgttgagacagaagagaagtgtaagagtgagtgtgagtgtgagtcgatggtaggtttaatggaaccgggtggcaatgaacggcagacggatggaaagtcggaacgcgtcgcgtggcgcgttagctgtgcagcattatatcacgtgctgccatgaccgccacattcttcgaccatctctccctatccgcttcacctctcaagcaaagccggtcgaatgatgaggaagcacgttaagattgacaaccatcactgtcttctgattggatatataacacacatatactcagagcaacgcaagggtataaagctaccatggcgttgatcactgatctatcgttcgtctctactttatttagattatgttctttcaaatctgattgctgatccgttcttctggttacccgtttgtcttgtttcatcctcgtttagctacgttctccatacattgaagctatcctatctcagatccacaacggactctgtctctgctggtattatcgatctcgatgagacctcctcaggcgatggtccgtgggttcgagcgagcggaggacgagactctgaacggcaagtcgttcgacacatgatgcggcttgatgacaatctttaccgatgttcataaacgatatattgttcaatttactgacacttcaaccatctgcttcggacctttcaactctagatggcctgagatgaataccatacattctcctgtccctgttctttcatctccacctcccaaccggtccgctctcggtcgaaatgcgcgctcaaatcgacgttctatcaatcagcaacccccaacttcgccctcagctccgaaccgggcatccttcaaaggtgacgcccatcctagtgggacctctctcaactatagccgaacgatttcgagcgagaaccaaagaattatcggagcaggcatgcgagtctctggcgccgtacggcatcggcccagacctctgcccttccgcgcgacgagaacaacaatggactcgagcgaaggtgtcaagggcaaacaagcctttttagaaagcataaagtcaggtgctcgaccagggaatagaaaacgatcagacagtgccccattaccaggtccaacatcacccgatatatcgatatccgacacagaacggaccgagaccgaagactcgatgtcaataacaagtggcgccggacctccattcgaacgacgaagacaacgacaagtcaacaatctaggagagtctggtcaagaggaggaagacgaagaggatgaagaatttttggccaatcggttggatgaagacgacgagaagtatgatggatttgacgaaaacctcgatgggatgcctccccgattgggagatgaaccaggaggcgacgggagtgacgaagaactcgggatcgaaagagagcaagaggatcttctggaaggtttcagagaagatgtcctggctggggaaatgctgaaggaagaaagccaacggggggcgtttttggaaatcagagaggaagagaatgacttagaggacaaagtggatggttcttcctacaggtgaggtctttgtgctcctctcggtccgacactgggtaaaactgatgaaactattctcctttaggccttcccctgctaagagaacgcccagtccaccaccatcgtttgcgcccatagatcttccgaaattgctttccgcgtccaaaccatctggtctctccctattgatcaaatccaattcaaccggtgcacccacgcccttctcggcatatgctcgaattgtcccaccccccaacactacaaatgttcccgtcttcaacctatctctatatttccctcattcttctcagccgttgaagcccatcaagaccaaagtcagaaaggattcaacggtagaagagattgttggattgggcttgttcttgtatggagaggagggtaggaaaccagaattgagtgctggatttgagacggaaggaagagacagagatatcaggcttagtacagttggttgggggttgcgtattgtggaggatgatggggaggttgacgaggacttcccaggtgagaatcactttctactttgtccgtctcaagatcgtttggatatcaattgaaccaacatttgccttttttattatcatctactctgctgtcttcaattacaagctcttgaccgagaagccaatgttgccaagttctctttctcagagtttgctatcacagttgctacagctactcaaggcacgttctgaaaaggttatatttctttaccttagtgactgctgagctaacaacatttctcaacagtcaatcagaatttgctcaagactcctctccctcctcggccgacggcaacaaaggcacgtggaaactcgatcagcgctcaaacacaacagccaactgctcctggcggtttagtcaagcaggagtcattcgtgtctgaaggtcggtcggatcatggcatgccattgagaccctcagttcctggtattcctgttctcttgaaagtcaccgttgtcaatgctgccgatattaggttcactacaactctcagcgtgtaggtcttttccttccctctttcctcgttgttcttgtgaattgtgtttccgacggcttatctcgagaattgcgaacttggtttcctcagaacatcggcgacatatctggcagatgtcgtagacctcgtttatgtaaagaaacggatgccagacagaccaaaagactgggtgctttgtctatcagatctgagtttgattttaccgttagatcggacagttgaaagtttgatgggagttactagtctctgtatggtgaagagaagctgggctgtcagtcaccatatcaaaggaggcgtggaaaagggaggagatccaaatggtttgtcttcatgttcttgctttctgagtagaataaaggtctctcttttttgatcatgttaatggcgctcgactatagcatctgtctttaaggatcttcaagagccagcgccatctacccttttctctgcttttgataccacgtacaaggtaagcttctatcttttcgttctctttgtacaaagcggcatctttctgatttccttcactggccttatcttggcagaaatacacagtacaaaggaaagccaacattggtcgacagttcgtcctttatctttcgaatctatcttgttctatgctcataattctgtcaatttgaatagcgagcgaatcctagctatcgacggagattacatccacatcgtttgtcctttctcttttctccataccacgtattttgttaaaacaccggctgattgattgattcaaaatctatctcttgtgctcttgacagatgccaccagaagggaagacacatggttttactacctcttctgtccgaacggcttcctactacatgtcgaatatcataggagtcaaacaatcgagaaagacaccctctatcttcaagttactggtcacgaaggaaggtggccttcaaaaaacctatgagttcgaggcggagagccagagagtagcgacagagattgttgggctgatcagagatctgtatgtgaccctcttttcacacttctgttttcggtttcttccgctctataaatccttcggtaaacctaaggaacgaggtggctcatctgtcatatttttacacttcgatgattagaatgagattgtatgttccagagaggaggcaggctgatacgttacttgtacgtaccgtacctttaccttcttatcgaaatctaaagtcctcatctaactcggtattaaatcggtttacatctttgggtttgtatcgattcgactgatagcgtcaccctccatcgcctagtcgaatcctaagtcgccgtcgaccaccagggacgtgacttttctttgcttggtcttctcttcttattcttgacgtatttctacgttcatatgttttttcttcttctgaatccataccatacccaaaccttgtcaacttttgtccaactgtccgccccaatatatgtgttcttctcatgtctcagaatccatctcaggttttgatttcggatcacagttgagttcatctgaaagaaatcatctcatgtgtgaagtaagaaataaaaggggcttcaaggagaaaaaataaactagtaatcatcctcccacgtctttcttctccctgtcccggctccagttcctgaggtaccccctccattatcaccgccggcgcctacgtcgttcagatcatccattaaatcttcctctttattctgaccgtcaggattattcgggttggtagaactgttggaccatgtcagttcgtctttgacatgctgctcatcaagaatatagtatatgtcatcagtttatccacaaggggaagacgaagtattcccagaagagaggatacaaagagagaacccactttcttcagataagcgtcgctgattccaattctcctatcgagctcccagacttttgagctccatgcctccgtctctttcgtcaatctgtcgatcatctggattgtgttttgcgaggtgaacgtctcaggaggagataaaaatgacactttcggtgatgtgcgtgtacctgacgcagggtggatctgagcgtaaatgagtcgattggagcactttgtatttacgcaaaaatgaggttgagacgaggagagggcatcaggttagcatgcgctccgtgattcttttcgtagaagtataggaagaggaaaacgaaccatgttcagaatttccgtttccaacatcttttctgtctcgcttgtatcaggatatccgagaattgtggccatatccgacaaggtgagagccgagtacgtgcgttttaatcgtaagatccgtttcgacaggacacttccctgcagtttcttgagtaggccgtagttcttgtcctgtaaattcaattaatccccatgagaagaagaatgagtcttgttgtaatttgattgatgaaggatgtgtcgattaggaagaagagccaaccttcttgaaggcttggatatcaagatctttgaagtcatcgacggatgtctggtcattttgactgataactttagggaacattttggcaagttttgtgtaggcttctgcatgcattttgaccgaccggtacagacagacggacgtgtactttggcagacttcgagcctataaaccgagttaatggagatcaggatgtatgccagatgttgagatatggcaagcctcagtaaggtctcaagttcggcactgatatgttgagaagttcagtcagacagacctttccatccctcagcagttggatcaacatgtgttttttgtaggcagctagttggaaggcgtgcgtgtttatagcaggagttgttgctacctatttggatgaagaggcgacgaacgagggcgatgaggaacccgatttgaatctcgcagattgatcgaccaaagcaagagtagaaacaaacaatttcaaaagctccgagggcttcgtcccactgttccagcacacctagacacataccgcccataaaatgatagcgcatatggtctagcggttgaagatagtattttttctttatatacaattagatgagaagcaaattctacagtcagcaaaaggcttatggtagatatctctagctacaacaacagcatgaatcgatactaacactttgaatttcttcgatgggttgacgatagaactctaaaccggtcgaatactgcttagatgcgacacaagcctaatgaatagcagcagaaggccacacaccgatagaggccagtaagaaggaaagcgcacgattcaagtctaaaataaaaaatgagcgactgacctccatgaagggtgcatgtactcccgtcagatccaccgggctctcccgccaaagaaggagaatatttcggagaggttcaatcgcggcttgcgtctaacccggcaagtgataatcaatgatcagtgtacttgacccaaaacagaggaaaagagtcacctcttcaatgggaaatacttacaaggcgtaaatgtttggagagggcaacaaacgagttggcaaatcggttgactaaagattaagaaggaaccacaacgagagagtgtaagatgagcgcgctgtctggaaccagcatgtctcgcttctccgatacggcttgaaatcaaagaacagagcactcacctggcaagctgtcgtcgtattcgagacctgttggatctagatgcagacagaactgttcggcggaggtccagagtagtagaagatcgtcgtgatttgagttctggtaatcaatgcacatccgagcgtttctggtagacagtgtcacaaagatagtgagaatgaccaaagctatcctcgatcagctaaagccagaagcacacacgcatacacatatgcatcgtctgacacacttacaagatcaacaacccggccaaagaaacccggcagaaatcgaatttctctaacggatctattctaacagccccttgtgatataaatgagctatagatggtatcactctgttcagatttgacaactctgagaagagcctgacggagatcggatctggcctgttcagagttgataggatcgatcgattggattagctgtatcaaagaggccaggtcgggtggactatcggcagcttccttcgctactgctgatgtggacgggacatgagctgatatcggtgtatgctgagacatgatgtgtggatgacgaggctgaagcagaggcagagatggtgagaaaggccgttctatctcatctgtacctgatggaagtgatagtgtggctgcgatggatgattacgatccgtggttacggtcataacactctcctgctctctctcttccatctctatttcccttcctctctattgatcaaccaactcgatcttcccttgatactatcttcatccatctactgtcgtccatccttttcaaagccatgtcctccaatgacagtaacacgagcccgctgccatcgagagagattgcagagggtaagcttatctttcgtctgtttcaatcaaagcctcaagctaaatccacatatgtctttcttccttctatctttccgtataatgcttgcgaactttctcagggatgtatatcgatcgaaagaaccacatcatcgaacaggaagtccgagcagccgagatcatgatcgttcgtgaagtccttgaggagtgcgcagcgaccgagggggttaactctaaggagaactgtagccatcttgttcgacagtaccttaggatgctgaagactcatcaggtaggtcggccatcaggatcctctcatatccatcatttactatttcgttctgacaaatctctttccggatgcttctttcgttgtctgttcgattccacaacctcagtcctccggtcaccggaagttcgagagagagaagtactacgactacggaactcctgtctctgcgtttgaagcctcgcttagccctggccaaaaactctaccttggaaaggaaggaattgccgcctcagccaaagctgccgacgaagcgtctgcctaaatacaagctaatcaagtcgagttccagttccaagtcgaagaaggcgaccattcatcttgttgtttttgtgttatcgtttgtatatctttatcttttcttttcttctctttgctacttttagttgtgtgtttctcagagtagagaagagagaaaggagctctctttgtattccttcattctttttctgtctctccttgattcattcgttgttgatctgtacttggaagaagattgtaatgctcggtaccgtcgaaacgatgccaccagatcaagttgtacgataatgatatacagaggcacaagccttgccgaccgaccctgtggctcgatcccatcctgttccatcccagtgtgagatgtatatcaacccatcatttgcgaaacatctgcggtacaacgtttccaaccatccagatatagagcagaaaaaggtagaaagagaaagaattagtcttggtgaaaacaatagatagaaggtgattcgatgaatggacgcaccggctggagggtactttgtctgagcgaaggtcaacaatctgagttgatgtaaacgaaaatgaaaggagtgggaagttaggccgtgtcgaagcagaagacgcaaagtggaggtggtgagaaagaggaagcgaaagaaactgaccgttttacgctctgaatgtactttcgactgacttcatcgttcaacacatgagctacggaatcagaagaaatcttttctcgagcggatcgttcgtgaattctgttgaatcaagtcacatttgaattttgttcagcggcaccaaacggatgtacgagaaggtctccaccaagctgagattgaacagaaaaacacacccaaccatggtgactccgatgggccaagcagcggttccgatggataacctgaggtaactatcattcgcccgttgatattgacgtgactgcatgtggtgaacgatttctgacaatcgacccaacacatctgccgggagatcctgtttttttgttttgttttttttatttaatttacatgaatcatatgttcagaagaaccatccaaggcagtcactcgaacttatagtacagtgagttaagagtgaataagtactgactcttgatcgtagagatttgaaaagtggtttcaggtaatcagcagattggacttggaccgctgccgctcgcattccttgagttgattgccggatagactctagagtgaccgcgataaacaaaggtagtgtactctgttatttcccgtctattgagtaatctagttgagaaacgatgaaacgacgaaccaggtcggtcggccatagtctgctcccagtccttgagtgttctctacagtttgaagtcaagcacgaatcactcaaatatttcagtaataacacttgaactcaagttcagaagactcgagcataatacaatgatataaagaaccggaactcaccttgagagcatagtatattaacgggtagagcttgtccgggtccgtcttgattaggcttagatctaacacgccgccttcgcccattcccataccctcccctgaaggtgcgtctactccagtcgaaccattccctccactagccttgtttgcctttttcatctcctccttttcatgtgaaccggcctgcatctcttccaacgccttcttgaaatcattcaatccggcattcgcgccggagccgcctcgctcgtccatcaattctaacgctcgaagtcggagccgtcgatccttgtcggattcaccgaataaccggatcggctgaccttttgctcgcaaacgacggacacactccacaggagatatattgaacgcttcaggccgagaggtattggtggacgtagcatctacagtcgagggcgattgagatccgctcgggacaggggtgtttgacccagaggcagggtccggagtctgaggtttacttcctcctagtcgagactgagtagagcatggaaacggtgaagatacatcagctttcaatcctacacatgcgtcagcccacgctcgagtctgatcaaccgatggaagggatcagacccagccagaaagctaagtattcagacaaacttttgagaacgcgttctttctagccaactcagccgcctccttcttcgccttagattcctccttcctcttccgatctttctctgcctcctctgccaatcggatcttctctagctcccctttggtcaagtactttttgcgttgtggtccagttgccgctgagttggaggacgtggtcgcggatccggcggtatcgtccacggcctttcgcttgagaccagctatttcttgagcgaggatgtccatgggttattactcaagttcaggttttacgggctagaggctgtaatagggtaatgcagaagataatgggatagcgaggcgggggtaacagagtatagaaagatgttgctgatggaatgatgggcgtcgaatgttaaacagacgcgaacttttttaccttctacttattttctcaactccattcactccagcatcataacccacgactctcgtagaccatggctcttcctgaagatcttgcctttctttctttatgtccgatagacagtgattcagacgaagaaggaggaggactcttcactcaggtcgttagttctagagaggaacgaatacaacgggcaattgaggaaggtaaacggacctatggccgagctcaggcagagacccagtatggtgtgagtctttcgtgcttccgtttctgattgtcttcttctgcttgactctgcactccgttcctgtctttacaccttgagagcttagtggtttgcttccaaggacatcactgctaagaaactgaacgagccgaaacatgtgcagcgctatcaaggtcagtccttcttgaagtgctttcatgggtaatacaggaattgccttgactgataagagccattttctcacttcattttcttagaatcccatgctcagttcttgtaccttcgtcagcattatagagaatgtctggtaatctgccagctattactcgcaatagaaggctatgataacagggagacaattgatatcgcccttcgatgcactcttcagcttcaagatcgggaaaggggtgagaccttagcgcggaattgtcggtcgatggtgcgtatttcctcgctttcatccatatagcatatctgtatatgagacatatacctcaggatctgtgctgaaggacctatttgagcttgatggatcagtggatcacgactcctccgttagccatgtcttccgcgcttatattcttgatgtgtgggctgtacgccggtaagctcccttattttcttcgtcttcgctcctctccgtatacgaacataaatttagcaagcgattctgactggcttgttcgttttctatctttctggatggttcctcacaccttagaggcgctcaaagcgctagtatcagccatgaccgttcgaaaccttcaatatccatatgtacaaactttgaccgactgtcttgaacgctggtctgtatctccctcttcttcgcatatacaacgcgaagcaacctctcgactccttctcgatgttcgagcgttaggacctgcttcaaagtccgcagctcagtcattcgctagaccgctgttcgaacctcgacagacatatagaacagcagcgtcgcaatcgacaaactcgtgtgatcagacgcctgacccagaagttgaaccactgaacagtagtagtgctgagggaagtcgtacaatactagacaatcatgtgtttctgactccgccggagatcgatcggataggaaaagagctggatctaggagcgagaacgatgggacgactgcaggctttatgggtcaagattgaggctcttgttgggttggccaataaagggttagttgttcaagaggagcagggagaggaagaactagtgggtgttaggaatatataaagaattgttttccatatcagacaggctcgaccgtgcggatgaaaatcgacctagagggtcgtcacatcatgacatggtgtgggtcgaagtttgaagtgcgctgcctacatatatgtctatcgaacaactttgtaggataataatagaatcaatccctcagatcaccaccagccgccctcccgacatctctaaataacagagtccgctcctttaccttccgtgattctctggcctctgtctctgcaggagtctcgtcatccaacggtcttagctctgacaagtagatatctcctatgaactctgttagtccttgttcaccaacctcgttctcggccctagaaccccaagcccaaactgtatctacgtcctcgccttcttcgcccgctcctgtccctgctcctcctcgaagagagcgttgggtcgatgccccacttgtaccaatcggttgggtttttgatttttctagataattctgacggaccaacaaggaaagaagggtgtcaagagtgtatgtaggagcatgagaagccgtgggcaggacggtggttgaatgaaagtcgagtcttttgagatacgccctgagttggtctgtttagttgtataagagaacacagtatgagaggaacaagaatgtttatacaaccggcacgtcaatcatcagatactcagctcaagaacaagaaaagaaatagagaatgcctaccgtctggtagtctccgaccgttcaccaggatgagcgccagtatgacatatagtatgcccatcattgagagatcatcgccaaacttaaggtctacgattgctccactttctttttcgtcctcctcaatttcacccgatcgtgagaggctggttgagttaaaagagtattctgggtggggttcaaaagcttcttgcatcaactttgggggaagtagcgaacggagcatgtatcctctgactgtacccatcggtgcggctagtcgagataacaatatagtatttgtgcattagtaaacggtcacatgatgaatgttgctcttgaataggttaagagccaagagatgagtagacaaatggacaagaaggaggtcagcgtacctctcttcttggactttgcttgcgtgctttcaacatcgcttcctggtccatcgtcatgagttctctttgtcttctttctagcctgcgaggctgctccagctatatcttccagtccaccagcgccttttcctttagcgcggatctctatcaattccattccaaacgttttacgaagtatacgttgggccgttccaaagacctcggcgaaagaccgcgaactcttaccaagaacttgagacaaggtgcaagagaggcccgttaattgggggacgcagtgagaatgtgatagagctaaaactatctcactctttttgttgatatcatctcgtttgagaacacctttgtgtatctctgagaacagagcgagtcggacgacatcattcgcatatcgtctgatattctgttttatccgttccattcacaccagggttcccattgatgatcagttaaacttgttttctggtccttcacttgttgaaccagacgaaggggtagaagtgagacttacggcatcgtctactgctttcactcccgatgctcttgctctttcatcttcgtcttgatcgtctccctcatcaggctcatttccttcttcccctatcctaccgtcttgctgatcatggccatcattgtcatccccgtcgtcactgttgtcgtccctttcgtcgtctgatacgatgtctgctgccggccgctttcctttactagaggacgatccagaaggacgtttatatgtttgtgatcttgatgtctgtcttgccatcttcaatcgggtacacgccagtagaatgaggctgggtcaagatggttatatgcagatgactatatgcggtcgacgcgtcgagacgcgtcgatgtcacgcgtcgcgttgatcacttaatcaaatactatcttgatcgtatatctatcatataagtaatgtaaccctaacacgccaccccgacttgtctacacacccattggacgaagaactcgctaggcgtcacactcacgcacactcacactcaaccgaccatgcctccaagaacttgccagctgtgtcagacggcgagagcgatcctcaaacgaccaaagacctcgcagcaggtctgcaaggcatgcttcttctatgtgttcgaagaagagattcataggacgatcgttcaggccaaattattcaatagaggcgacaaggtcgccattggagccagtggtggaaaaggttggttctcaggacttctctaccactcttcttcatacctttggctgcgttagagtatctctctagagacatgtaggctgaatgttctgagttcgtttgctcttgaatttgctcacttttctcctcgttgtcaatcaaagactccacggtgctagcgcacgttatgaagactttgaacgaccgatatgattacggacttgacctgttcctcctttcgatagacgagggtatcaccggttacagagatgattctttaaaggttcgtcataagctttgttctttcttcttttgaagaacacctctcgatccaaattctgggcatagaagctatacgattggctgaccttacacatccttccgtatttcttccccgtttctaacaaatcctaacagacggtcaagagaaatcaacagcagtatgatcttccactcaaaatcttatcctacgatgaactctacggttggacgatggatcggattgtgtctacaataggaaaaaagaacaactgttcgtgcgctgtctactcgtagttggcttggcgtattcttagagttaaacttggttaacttccttttggacataatgtgtcgcattttgcacatatatcaggtacattttgtggagtattcagacggcaggcgctggatcgaggagccgctcagctgggtgtcgatcatatcgtgaccggacataatgcggatgatattgcagagaccgtcttgatgaacagtctgtcccccttcttctttctcttctggtcgtctgaaaatatgacggctcatactcttttccttgcgtctgcggccttgaagtcatgagaggagatatcgctcgtctaggaagatgtacggatattgtcactaaaggagaagataccatcaaaagaagcaagccgttcaagtatacatatgaaaaagaaatcgtcatgtaagtcgctttttcttctcggtcgaaactcgtacgaacggctgatatcctacttgatgatgattgccatgaaaataacaggtatgcgtactttaaaagattagactatttctcgacagagtgtatctattcgccagaaggtcggtttaagctcttttttgttatggctcgattcttttcgactgctagcaggtcactaacgaaatcgctttcttgtatctgctcggtcaaaagcctatcgaggtcatgctcggacgttcctcaaagatctcgaggccgttcgtccgagttcaatcatcgatatcatcaagagtggggaagagcttgtgctcgatacagagatcaggaagggaatgaagctccaacgtaaggctcgttatgaaatcattgtcacctttgacgaaaccttgtctgatacaaagtctttatgtgttacttgatacaactagaaacctgccttcggtgcggttatatatcgtcgaacgatctgtgcaaagcctgcgcgcttctagagggtctcgagtctgggttgtctaacggagcaatgcacgcttcgcaggacgtcaagaaagtctccaattcgaccgacgctgcttcatcatccggcgagacggtagccatcatcggcgaggcccccaaaggtcaacgagtaatcccgttctttgagaggagaccgaccaaaccggcagtcggaattgaggttgaaggcttggaacagagcgtgaaagatcttcgagtgaatgaaggactgaggacgtcagcgttggaattggagccaggctcgaacgcggtaggccgagctgtagaaagtatataaaacccgttacaattgtctgtacatccgtaaaacaggcaacgcaaatcaaaccagacaaagcaagagcaaaagcaagagtgaggagaacgcgagaaacgacaatagaaagaggcgcgtaaggagggatggagaggtcgaacggagttttgatgcgctgtcggtccaaaaagcgagcaactccatcatcgccttccttcacccccatacgcatcccatccacgatcaaccgtctcctctttgttctgtgaattactactcaagaacatatgtttcgtccttcgccgggtcctacgctgggtgctcccaccagacagccttctcatagccaacctcatcagccaatttatccacaaccgacatcataccaacctcacacctccggctcacataacggttatgcctcaaactcatctgatccggatccctcttccaacagcaacattcttaacgagctagacaaagccgtccctctcaagtcgttcgacgcgttcccaaagattcaatcgagctatcagcctcagacactccgaggagggttgatcacatttgctgtggcatggacaatctttttgcttgtgttgaacgatttgggagagtatctctacggacagagcaactattctttcaacgtagacggtgagatcggaactcaggtccaattgaatgtcgacttgacagtggcaatgccttgtcattgtaagttcttctgtttttgttcgttttcatagagctgacggaagaagactctgttctgaaaatcccggtatctcgctatagctgaccgagctggttttgattttattctctcccgtctttctctccttcctcggcccttttattaaccgcttgtagtcctctcggttgacatcagagatgccgtcggagatagagtgtacttgaccgacgacctccagaaagacggcgtgagtagacctttgcctgtgcccgaaggaacctcatctcatctccttcttttctcttttttatgattcggtttgtcttccgacttctcgcaacttccctttcctcctctccgatctagacggtgttcgaaccggccggagtccaaactttcaagcgatcctctgatgcttcctccggggtatcttccacatctgcttccgagatcttgtcccaaaccgccaaacgccgttcttctgggctcagatcgctcttctcgttcgggtctcgaaagcgcaaacacccgcagtacagaaagaccaggacaatcattcaggatggaccggcttgtagaatttatggaagcatgctcgtcaagaaggtcactgcaaatctgcatgtaaccactttgggacatggatatatgagttgggagcataccgatcatagctgtacgtatcgttgacctctattctccccctatagtaggcaaaggaggaggacccttctgtcttacatacggaccaggaccacgctgatagtgaacctttcttttttgttgggagaacatagtgatgaatctttcgcacgtaattcatgaatggtcttttggagagtacttcccaagcatttctcaaccgctagatatgaccatggagattagtgacgaacgtaagcaagcgcttttttccctcttaatttccgtttctgagctctgatgttctgtcccatgtttgtgattgccttcaactagcattctcgatcttccaatacttcctcaccgttgttcctactcggtacatcaatgcttccggccgaaaagtcgacacgaaccagtactctgtcacggattatgtccgggtggtagatcatggaaagggtgttcctggtatcttcttcaagtatgacctggaaccgttggcgttgactattcacgaacgaacgacaacgttctaccagttcctcattcgacttgtcggtgtcatcggttcgtccctttttcctaactccccccccccaccccatctccttttctctttatccccaacagcatctgatatggctacttatgttcgatatgattgaaacgtctggaaaatttaccaaattaggaggagtctggacatgcacatcctttgctctccgagcgattgctcgattcgaacgagtcgtgaacaaggcgaaaaaaggaaagggaagagaacgatcttcgtccgaagggttcttgggcaacaaagctagcaagtcggctggattcaaggcgttctgagagatgagcagatgagccacgaggacggtcagtgcaaactcttgactagcgcgtggggggggggg

SEQ ID NO: 795 - DNA, 609 bp, Xanthophyllomyces dendrorhous
agtggcaactgctgggatagaagtaggagtgggagtggacctgggagtggaactggaactggaactggaactggaactggaactggaactggaactggaactggaactggtgaaaggaacaacagaagggacgagagatgtacaggaaccgatagatgtaccgcacaggacagtcagagccgtgactgtggatgtagtcgtttgcaaagagaccgatagacccatgtcgtcgtcgtcctctccattctcttctctgtcgtcaccctcttcgtattcagatggcggctctgcatccgaagatatatagatcggtccctcagctacaccgtcctccgtcctgtccagtgcgttcactctctcctccgtgtctgccttctccaccgtctttgccttcttcttgctgtcccgacgcctagctaccggatactcggcacagacccaggtaggatggagctcgtccgtcgagtcgtccgactgtgaggccaagtcggactggtggctgatgttcggatacacgaccggaggcgacagagaacgtctcgtggctgacttgcgagccacccgagcagacacatagagccctctgaactgtgcttgcgagaggtagac

SEQ ID NO: 796 - DNA, 40110 bp, Xanthophyllomyces dendrorhous
catggtagcttcccagatgttcatcacccccatcgtaaagacgatatcgccagctggtgcagcaggatgaatgacctatcgagacatacaccccacgctatgagaacaagttgagcgtgtggtcgaagtagccacacagtgccctgtttgcccagtcacccaatcttcctttgtgttcacgacccttcgcctacccgagacttacccgaggtcataaaacagcaactgccaagtgtcttctgagctacagttttgccaaacctggtcgctcactacagaacgacatcctttctttcggtgttccttctcttttccctccgaactaccacacagacacgaccagaatcaccatgcttcctgctgccatcctacccgctttctgggcatcgttgtcctttcttcactcggtagaggcagctcccgtgaaggttctccttaccgagagcacggctcctgacaatgctaccgtcgcaagtaacaccacgctcggtcctctgttcaacaccacgatgttcgctcccggaacagagccaggcatgtactcgtccaacttttcccgactcgtcatgttcggcgactcgctcagcgacaacggaaatggctcccgagtgctctcgaactgaacgaaaccggatcccagggtaggtccttcgtctggtttctcgtctagcttctcgtctgtttttttgtctagtttctcgtctggtttctcgtctgtctcccttcctgtgggtcacacgatcgctgggtctgatgggtctgcttgtgttccgacctgacgaaacagatctactggaactaccggtggtcgaacggaccgatctgggtggaagacctggcagagcgtatgtcttgactcgtctgtttctctctgcatctgacacgacgtccgacgtgggctatcgcggttgttccttgtcttttcttggctgacgtcgccatggtcttcctggtgtttcttcggtgactgtgtgatatctctttgggtcgtcccaggactgaacatcaccttggttgactacggtatgtgcatgctcactctgttgtgtgtgctctcgacaagcgtgtgtcctgactcgatggcatccgaacgttgtcattctctctgtgtcgatcttgtcaccagctgtcggaggggccacggtgaacaacacccggacgcctgctttcctcaacggcaccgtgctcactcctatcccgtcggctctcgagcagatcgagacgttcgtgaagaaggcgaactcttcgcttggccacaacacgttggaggacactctgtttgccatctggatcggggcaaacgacatcatctcgacgcttgagaacccggccgcggtcaacggagcagagatcgttgatgatatctttgtcggtgtggagatgctgaaggctgttggtatgttgtggtgtctccttgttgtctttctctctttctctctttctctccctactcttttcttttctcttcttctcttttcttttctttcttgttttctttacaatcttgactggctcgctctttgccttggctctagagcaacacaccatcgtgcagagtaccgcagaagactgacctgcatcgacgtgccttgccttgacttgacttgactctctaggtgctaaacacatcctccttaacaccatgcctgacatcggacgaactcctctcagtgttcttgtcggatcggatgcggcggccttgctgactagaaactctgtcagctaccgcaacgctctgttctctgccatcgacgcccaatcgctcaccgctcagaacgtgtcgtcggtgaacgtgacgaccgagtctacggccgtgccctctgctcagtttgctgtcgtggatgcgttccttggaatggacgtcatctttcggcagcctgaggcatacgggttcgcagaagagacgctgaacgtcaactgcgcacggggcttcagctcgaccgaaaatcttttcagcataccccagggtatctgtgctgatccggactcgtacttcttctgggatctggtgcgtctcctcttgtgttcttttgttgacgttgttggcagacggttgagctgacggagccgtcggcgtggcatctttgactctgtgtgttgtgttgtctgtctcagcttcatcctacccgggttgtgcattcattgtttgcacaaatcgctgcctcgtctctgctcaaaacaggatggatctcccgaagatgagtggcctgtgctccgaggtctatctagccgagaaagagaatgtgtacatgtgtacagacggatgaaatttgtcacggccttgattgatatcatgctatatagtcatcttggcaaagagttcattaaaaattgtgattcaacttaggaatgttgatcgtttgtggtttttaaggattgttggtttcgctcatcacgcattgattgtttgagcgacaacatctctgctggaaagccagcgaatctgagttgggctcgatagacaaatctgatgaagctgccgaatctatcaaggcttgttgaggctgaaaatgaaacatatttcacagtctatggttattgcaacctcgaaagtagaaagacgaaacaggaatggactcactgaggcaaagggacactattttcaaattcaaagttttgtcatagagtcgaatatctacaacgatgcatgatataaagagttgccggcatatatcttcttatcgggtgatatagttagatttatgagcaacgagcaaatgtcttgtgaaaaggttctgcaaataaatttaatagtcgctgcgtccatggggcggggaggcggatttgcacaaaaagaagatcggtttatgcaaccctaacaactcaaatgcctcacgaagattcagattactataaagaaatactcgccgcttccgagatcggatatgccgaacctaacgtatgaaataagcaagagcgaagggcgagaagactcgcaccagaacaacgacaaaatgtgccgtgcccaggaggttcatttcatattgctcgcaggtgcttgaatgcaagaaaataaggtgttgaagatatcttgtttgtgtataatataattattttatagaataaggtggaaggtaccgcgatagcagctccgaagtagatagacgaaaatagagtacaaagccagaacaaatatagcactgtgggcgatgatgagatcaggaaggatatattggcgctgagaacagcaaaaaaaagtagcgttatattgttaagatgatgcaagtgatagtctgttcaccattttccaagtcccttgagaccaccacggttgagaggaagaggggctggggctcctttgatggggctcagtactgtcggaatctcacctccctcggtctgaagcgatacagaagtcatagaacgaaccagaaccaaaacagaaacatgagtgacaggaacagactaaaaagagtagagtagattgagtaagaagctacatcacttacgttggcaaaatcccaatcaagggcgggcttgatcttcatccctaacttccgtttcttcttcttctcctctataatcggtaaggtagttcctatagcttcggcatcgggctcgtcttcaacaaccggcttgcgcttctttgacatatttgaggatgagacttccgatgttttgattactttcttcttagttggaacagggagaggtgatgatttctgtcgcggatcaatatgacggagttgaaaaatagaacgcaaagacaacaaatgatacgtcaatcgcttactactcacatgattcccaatatgccaagatgaaatccaattctccttacctcttcttcgtcatccactatcggcttcttgactttggccaaaggttttgtctttgatgctataggcagtttcccaccaatgtctttatcggatgcagtatcctaacagacgagaccagaatcagggatgcataagccgaccttacagagttatttctacggaagtaccgcaaaacagggctcgcctgaatattcgcaggaaagaaatatgtccgaattgaaattgcacgcgtacctttttcttgggccggcctctcttgagcttgacaggttcaagggaggctggtgcagcgttatctccgtcttcgtccacatggctcatctccgcctggacgtcttccacagaatcatcatcttgctcctccggttcgagcgatgcggcctttcttattttggcttttgcccgggctttagtagtaggtttcgacggtagagccttttctgatttgggtattgatgtagaggcacccgaaaaagcgcctgaatcgggtgcagggttcgaagaatgtatcgaccgagctgatagggacgtcgtcaaggccgataaggatgattctaatgtggcgatcgttttcttaaaagttatcgagaaacagagagtataagcttccaaaggatctcaagggtagtatcatgccaaaaggaatggagcgttaccttcaatgagcgaacctccttctctttcatgattaactgggcttcaacgcgtttggtttcttccacctgtatctccacctcttcttccagtccttccagttcctttcgaaggtccgtttctgttgtactgctattatttcgcatgagaaggacctataaatgatcaatggtcatgcgaaagaagaggtctgtttcagctcgagggcactttacttgtgaaattcaactgtaaaattaaccaagtaattgaagaagtacgtaccctgtccttttctcttcgttctctctccctgactccgtccaaagcggcgcgcagcgtgtcgacttcatcaagtaattctcgttcgcggtcttcccaaccttcctcttttgacttcagtcgttctcgttccctctctctaatcttctcctccttgattagagcagccttctcgtccttaaggttagtctccctagcttcgagattagcgatccgagtctgtaaagatgcgatttctgtcgtttgcgaaccagtcgtcttaagtaaagcactatgggctttccgaagagtctggatggggtcagatgcaaattgatgagcatgtttcgggcaagattgaaccataggttgtaagtcttcgcggatcaagatggaaaagacgtgtcaactgacctcgagatcagctctttcagctaacagaagttctccctctccttttgagcgatctgacctagcacgttctagatcctccaacgatgtctccaattgttctctgagactctgagcttcaagtcgcgtctcgtccaagaggaccaataatgcttcgtggtcctcctgatatatgcagacgcatatgttgtttaaattagttttcagataatggacaaagcaagggcgtcggcaataatttgttgacgaagagcttaccagctggagattgtgtgtggccaccagggaatctagctctctctcgagagaggtctctcttgccttgaaacgcgtcagcttatgatccctcatgactgagcagacatggaaagtgccgacggcccaatagaatcagatcaatgggcctcatggcaatcgaagaaaatatgctggatccgaatagatacacatacttgttacactttctgctttgttcagctggcctttaaatgataagaatttcaggtactgctcgtgaagagtaaggtcgctgcgtgatttgaggagagcctccgagatagcagactgaactcattgtttccaacgaggagtcgacatattattaggcaagttgacacagttagcataagattctgaaaggtcgaagaaggacagaagtgctttgctggtgttaagtgaggcggaagaaggtgattccatgacgcgtacctctgccttgactcgatcaacctcttgtcgataggatatcaactgcttggctcccccctcactcgccttgcatttgtccttccactcagcaatctcacccacagcgtcagctagttgtgttctcagcccagccaattcacctcgatgcttccgttctgtcgcggttttctgggagactaaatccctgatctgttgctccaagctgcccaagcgagctttctgaggagctggtgtcacaggaagatcgaccgatagcgatgtaggaccaagtggagtaggtgatgctggcagaggaactggtgggggaagcatgtcttgtatggagacaacaaccagtacgattagatggtcgtttgagtatagacaaggccgaattataagcggcaagttatcacgtcaaaacagacgcgtcgatctgattgatttctcgccctgcctcttgttcctttgcgagaaattgtacctttggccgagaagctctggctcgaaagtatgatctcaaacaagaagagccttactacataggtcgaaaagcgagaaagttgaaacattggagtacctaacgggttacctcctatcggagagaccgggtcatgtaaagaaaaaaatgaccgtagggtgaattgaacacccgtcgtccgcgactttgcgtttcggctgaagaaccacaagcggaagtactaaccactatactatacgatcctgacgaacttcgtatggcttgttgtaatatgtttcaaaatctgagaaaaaaatttgagctttggcagtcttcgacgaaatcttagtgatcttaacatcatttgggctgtactttatgatcttcccctcgaggcagcaccctcagatcttgcgcagagtctaaagatttctctccaaagagctgtaaaacctgctagctctcctctgcatttctggcttcccaatccaggtttaccgaaatatctgggaggtgtgtatatggttccgagaaacctgtgaggttttgattgagaacaactcaaaacagaaagtacacttttcacttttggatttttataaacctctacaacccatcgcaactcagttgttggacatgcaggatcttcatatcattcatcttacacccacatgaacttgataaaatcattctggacacgtatattatctcaactcaaccatacgacctcagctctgcgacatcacactttgctttttctgttccccgcttctcttaatccggtttaattcactggaaggatggataaatcgagatgcatgcatatggtacaaagggtattcaaaatcagaatctcatcgtccctcttctcttcttcatccactctttacgaatatggagcgagaccgttgtaatccacaccagccttgacggtgctatataaggatggtgcaaaaatatgatcagtccaaattcgttattttttatcatgacgcctcctttacggagaaatgacaaaaggtctcactagtttccatagcaggcgtggtcgtaatcgatctcgtcaattctagccttgagcgcggtcagcacggtatcgaatgagcaaaggccgtcggctgagtatccgcatccggcgtaggtgttgtggaggggcagcacagcatcgttgctatcattgatcggaaggtcacgagagcccatcttagtggcagaatctttaggggtttgaatgaatctgtttaaaccctaaacaaagagcttacaggatgaatctgatctgtttcgagggggttagatcagaacactccaagacttgaatgttgaggtgggtgctaaacggaacgacctggctagacttgaagtgctttccatctggccttttggtcaaaggcaaaggaccaccggggaatagggccgtcaggttgaaagcagtaacaatgtcgaggaagacgccatcgtgagtagcgtcggcgtaaatggactggtggagggggaaagtctccgggttgaggtcgagggtggtgttgatggcggtgttggctgtagcaagcgaggcagacgaggcttcaaatcgggcaacagtttcttgcaggtaacctaaaccctgagcggcagcaatgggggaaccagcaccgtcgtcgtaatagactagatgaaagcatttaagttctacttatcagtcatggtacattggctctagatttgcgaaagaaagttcgctcacaagacatatcgtagtaatagtcgtagtttttgaagtcctcaacagtgaagagcttgcagaactgagagtagcccagagcttgagtctcgtaggagcataatgataacatagagacgatatgggtaggcgtgacggccaagccggtgatcagtttctgaatccgggtagcggtggaggcgaaggcgatatcagcaaacttggcagcggcgttagttccaagatcgctgtacttgtcgatttgggcattcgggcaggcctagcgagtaaatattcagatgaacgttagcgatcaaagtttaggcagtatagtccgaagggattgaaacgactcacgtattttggagcgccagtattgttgaagccagaggcctcgacagcaatctcgatgttgacctgctttaggtactcgggaacaccgaaaaatccggcggcaaagctagcacagagtttcatgtcaacattccgttaccagcctgaatcctgtgatctgcggggatagatcttcaaactcacttgtttgcggtgttgaccatcctgtccttggactcggttctaaatacgggtaagacgccctgttcggtgaagttgttgagcagatgtccgtactgctgcctcatggcaacaccgagctcgaagccctgaagtcgaccgaagggggtaaggacttctgcaccaagcttgtaggtccaggtgttaaggaacccaagatcaccagtggcggagaaaccaccgtgagcggtcagattggccagagtagaggcgaaggtaggagagagggccttagaggttgggtacctggcaccgtgtcggtagagaaggtgaacctgagtgaccgagcagctctcgggcatcaacggattggcctctggaagaccgtatacgctggactggacagagtaccagggagagacgttgccccaagacttaaaaatgttaaactcggtcgcctcatccacatctgaaggcttatcagctacgagagggtagtactgggtctttccagtattataagcgtatgcagctgctgtctgaatggcggcgggttcgaccccagtagcagtagagccagggtagccgatgacaggttcagaagggaagagagtgggattgacagtggctgtttatatcaaaagaaggatctgtcagcggtgatgcatagaatccaacgaggttagttagaagacttcaccagaaggaggagggaagacatccgaggtgtgggaaccaacaaaggatgcagcgatagtggcactagcggccacggagccaggagcaacagacgccctctggcctaagggcccagcgacagcaaagataggaagcagagaagcgagaacgacggcgttcattgtctttttctctttttggtttcaaagacgattggcagtatatgtcaatgtatgttgaaagagaccaagtaggtcaggacaagacgacccgtcattaaagcatgcggctcaactgaaaaaatctaaagggtcaatattcgggtgtccgatgtgataatgcaagttaaacaacgttcgtcctggtgagcgtagaagatccagagaataagaccggtcagtcatcgaacagatggcgaggtgacgagatgacgaggcctaaaatggtaagatgcttcggagggacgatgagttggagagattttatgatccgagctaagcagcgaacgtgttcttgaaaccctcaaggactccccttctacgtttcatcgtagatcctgacgaaattgtataaccatgtcgctcggaagaagaagaaaaaagtaggagagaaagcagcacgttcgtattcgaagtcaaggtcggtagatttgtataagttgaaggtcatgatttgtcgcaaacgaatcagaagggtaagtagagatgacacgtgtcgttaagtgttagtccgtcaagactagtttttcagaccggcattttaggtaagtgttttagatacttccatctcggatgccaaacggaacaaaatatgaatactggaagcatcttatgaataaattgttctcatgtgaaacaaaaaagctgaactgaccgtagggtgaattgaacacccgtcgtccgcgactttgcgtttcggctgaagaaccacaagcggaagtactaaccactatactatacgatcctgatatcggtaatgtggcagatattgaaaaataacatcaacatactctcacacaatgaagataacttctgaagtacaagggtgaaacatgaacgtttcgttctggcacttgtttccaatcaagtcctcactggttttccaaaaccatatatacacaccacccagatgttttagtaaaatggattgagaaaccagtaaaacagaagggaacccgccagaaagtgtatagctcttcgcagagattcttggtctctttatctcttttatgcttgctctcagacctggtggaacagagatgtgaacacatcgcgcagcatgctgctcctaacccttcaccaggaggagaatgagcgagcaagaatgccggggttcaacgctgtcgctggtgatgttgaggctgccatgactgctacgctggccgctgaggctgacattgatgctggcagaaactaaacccatgaccaatgggatcttggcggtttgtgatctgaggacacccaagtctaaaaggaccatgtatcgaccaccatcggctgaggttattctcaccatgctttttgcagattggatataacatgggataaaatacataaacacaagtgttggaaactcggacagtggcttcctaactaccccaaacagaagatttcgtcatgaaagagaagatttgattcatctctacagttcctcgtccgttcttattcagatacttctgaacaacagccgagagtgtcttgaatgtatgcttgttttgagcagcgaatgcctggacctcttctgctcattgaatgcgcatatgtttgattagagaactgaactgtcagcagactgcatcatgtggtactaagcataacgtcaactcaccaaacttgtctgaggcctttacagcagcgactgctttatcggtatcaaacagagacttgtaatatagcagttggttgtataacgcggcatccgtgtacttgagatccgagtcaaagcgtccatgtttttgttagggtcccagcttttcttaaatcagacgatgtgacaaaaagaagctcacctccaagtgcatctgccctctacaattaggcatcagacactgcttcgcatacacgccgatcgcacgagtagatgccaagcaggcttgatcgtcgcagaccataacagcctggtagtatctactgatgtggtctcgaatttgtatctcgagctgaactgcaagcgatggaagagcgtagcgctttgagcattcactacagtggataccagtcgaccgaatatgagagttctaatgggaaaaaagaaaaagaaagaaaaccccacaaattgcgttaagattatcgcaaaactgagctgttggtgtaaaattgatcaacaaaaggaacttacgatgtcatcctgaagcccaccaaatttggcaacattttggcaatcgaaacaacggacttcaaaaggtaaagcactttgaaatctgtctttatcagagactttggagcccagggtataaaagtctcgctcgatgtcaccaacagtcttgacagcgaatcgctgagggtctaggcctgatggtattcaaaacagacggataatgatggaaagtaatgagtcagctttcagcttgaatggctatgatagctaaataagaccagctcacctaaacattcggctagacgagctcggtcggttccctctatcgattcacaaagacgttcgacaggaggtagaacttgtaatgataagtaataatcgaaatctatgtccgaaaggaaaagggaattagttgaaaaattaagtcagttctcaacaaggcctaagttttgatcaatacacgtatgtatatgttcatggatgtaagcactaaccaagcttgagatcggttgctttccgaagttcatccggatgataggctcggtctgcttgggcagatctagcagtcttgtcatctttgcctacgcaaaagacgtactgcatgacatcccccgcccgagcatttcctccacgcgccttcattcttaacgctacttgaacctgaggttggtttttggcgtcaggatagtcttcaggattctttccaagtcgctgtttgaacatacgaaagtcacatgtgtcaggccaattgtctcaatttgttaatgaaaatgacggttcgaaccttgttgatgacaaagtcctcgatatctactttgtcctctctgacatttcggccaacgctagtaagatagtcgtgaatcttgttgatacacacttcagtaggctctccagaaagaattcgatcaaggacatatctacgagataggatgtagacatcagcttatatacttgtaaggcagtataagaagtaagcggtaccgaggcttactgggaaacatcttttgaaagcttgcagaattctctacgtttcatatccagtcctttgacctcagtcgacacagatccatcggcctcgaccttgatagcggcatacttcttcttttgtagaagtagtaatctttggaagacgccatctaaatcaatttcgagaagcttatacttgtcgttcacttgctttttgaaaaggttcgcagttttcatcgcctcatcaaagtctgtgacgttggagttgacgaatacggaatctgtatctccgtagacaaccttagaagcagatataatcagaatgacaagtgaggttaagaagtcccgaaactatattgcttacttcaagctggatgctttcggcgagctcctttgtattggtcagaatctcacgacccttgaatgttgttagcgcagccaaaggccgagcatagaatcgggaatactcaaacccgagacaaccgtacatggagttggcggtgagctttagcgctttctgtcgaatatcatactacgaacgttgtgacgtgctagttaatatctagcctttagtgtcgaactgacgaaccgattgacttacctgcatcatcaacatgggtgaaatctttcctttcatcaagctcttgacctcccttcgccgattaaccagttgagcaatgagacggggcagcaccccctgccctaactcgctggagggcacttctggaatcttctcctcgccgtcctcctaagagttatttcaaggtttacagaagccgatgatcagtctgctatctagcgagcacagtgatgagtgaaaatgagatagtagacaagctcacgtcttcttcggtggtcacagacaccgttgtgaaatcgatgttgtactcttgaatgatactagggtacagactgttgaaatccatgaccaaaacgtatttgtcccatagacctctcttaggttcaaacaccaaacctcctttgaacttgtccctctttcctcctctcctactcgcgactgtggaagcagcttcatccccatcttcggcttcggccttgagaagagctgccttatttttgcctatgaacttgtctgggcaaatgtatttgagcttgtggaactcatggagaagaatgaactcgtttcgttcagctcggcctccgttcagggtacgattcctgtatgtcgtatacatagtaaagcgaaagttatttggtttataatctgtccttcagcgaatgcaacgagaagtcagatcactcaccaagagtttccggatagagtagtgagctgcctggtgagaggaagaatttgcaccttcgcggtgatggccatttggaagaaagcatcagcttcacaatggcggacaaagcgaagaagccgatcaggagaggccacggcatcgtcaaagaatgtgtgagtatcgtctgggtcgatgtcttcccgattaatcttaagctgggttgcacacatctctgtcagagaccaagttgtcgatgcaatcattgtctaccatacacagacggaaaatcatatcaagaaagcctagattaggtctgaaactgcctcggtcagagtatatttttcagatctcgcgaacatacctttgctccatcgcttgatagatcgcaaaccaaccgaccggctaacaagcctaaggtaaatttgttggtcgtagggggttgtcctctccgcttaaacctacccactcgagaccagtcgggagacttgtgcttgctcattcgctgcagcaggacctctaaagagacatttaagaaatcgtgccccacgataacatctgggtcatgtcgagagatattacctgtcatgaagaatagccaatatcattgacggtacgcagaaggaaggagaacaacatttagaaggattgtggtgataggggctgaagacaagaaatagactgactgaggaggttgttgaggagcaagctttcatctttcacaggaacgatctttgagccctcgctcctgcacttgttgacaaatccgggtgggaaatcgcccaaaggacggacgatagtgtgtattgagctgggctgcttctcaggaggggttggatcaccaatgttcgctattaaaaacaaatgcataaattaaggtagttttagagaagtgattagtgccatgttaggaatggaattctatgttgacgtctgattcttacccccattccatacccgagctgcaacgcagaccacctctcgggtgttttctttgtgattaacaatcgtcctggccgtcaaactcatgattgtcaaaggaggcatctctttaagatcgtctccatcagcgagaggtcggatgtccttgggatcagaagccgtcacctcaagtttgcaccaggatacctatgtgagaatgtgagaagggacgttaagaacagctacgatgagaacaggccatgtgcagtgcgttcaacgtacaccttttccgcttatttcagcgttcttgatttccagccagcaaggacccataattttgcgcttcagtacgaagatttcgaaagcactggtattcgttccaaggacgtgaccaaacgtgtttccactcaggttggtaggcaaagcgggctctgaggaaggggtcatataaagtgatgaacatttgtctccatcgtaatagcaaatcaagggaaagacataccgtcaaacccatatatcacttttaaccaatcgttttctccggatggaacgccctcgaccccaaaagaatagtttcttttgacccatttggccatgaatgatgtaataccatgttccctccttttttggtcaaactcccgttttacatcgtttttctccggcacaaggtctgtttcgttaccttgaactatatatcatggatacaacaaggaatgtttcttgtcagccaatgttgatagtagtccccagtagtgcgtagaagagattagcctagagagataactcacggaatgttcttctccgaggtgcgataaacaagtttctttccagaccgttgatctttagacaacaactaacccatttaccctgtcttccaagcgcagccttatcccatacttttccaaacaaatacaggtgtttgattgtacctgcatcagatcttacttcttgttcgtgaaaatctaaccagaacatgtggagtgtcgatccatcttgttcgaaagcctctaccgtggtctgaaaagtcttcttagcggatgaggctgaggccttagaccctttagtcttgggttcgggaacaaattctgcctgggccggagacgaaggtggctgatggtcggaagatggaacgacagtggtagtaagagattctgagagcgctagccactcgggctttgtaggttcttcgtctggatcgatgtgagttgggagaggtcgaaggacattgggcttcttgacagctaccgaagtagcattcacaaacttccgcgaagggatggagtttgctgctgctgctggaaggttgaccaatgttgacgatcctaaagctatatccggcttgacatttcgtctgactttgactgccagatcgtcttcatctcctgaaagatcaggtacttttccatccttcaaagtcacatccggatcctcatcgtcgtcttgatcagatccccattcgggagatcccatgaattgcatgccaaactctgggtcctccatatctatatcctcttctaccttgatcttcttctcgccaaaggcagactgagcgtctagcgactcccagtcgagcgatcctcgttcatcatctgctggagtgtgccccttggaggatcgtgttgtaccaggagataacatcttcctcttgcgagaggacatatgagaagcaggaatgggaggtcgaggagtgggtttgacgtcttctgcaaagctggagagcaagttggccatgaagcctgactctttggcttcagatatcaccggtcggtaggcgttcgcggaaggaggaggaaccggacgaggagcctgtttgggagcctttactttgttcttgatcttcgcagctcgcttggcatctaatcgagatagaacatagtgaatagaacgaaagcgaactgtcagcttgatactctaaacctgacgaggtagacatccggctaacaacagttccgtaccctttctttctcttctatcctcttcgtctgcctcttcatcatcatcgcttctaccccaaacttctcgaccatcatctatgtagccactaccatcgtcatcttcaatgaagtcattctcattgagcctgtctctgacaatctggtcatattcctccacatcgacttcatcgtatagtttgtttgagcttgctgatgcctggtagattgatgacgattgtaacagagtaaagttgatgtcagtgacaagccggatcaggaacaagcctaagactgaaaaggttgttcaatatctcattctatactcctgaggggctcaaagacaaatgatgacccaattgccatgctcttaatgaatctacagttagacagcaaaacagaagacggacctgccattgtttcgctctggatacacctgctctggccgccctcagatctgctagtttggcgtctcttgcctggcgggaggacatggttagaattcgatagctgtattagctgtgttaaggaggaacaatcgagcttctacaagtcagagaatggatggtagattgtttgaaggcagagacaacgatcactgaatgggttaattgttatgttggccgaatagaaaatcaagacgcgtcagaattgaatgacgcgacaagtgtggatccaatgtgatggtattaggtaagcacatgttccaaccctaacctgattcattctactacatgttcgccttcaatcagatctttcagggataagttcgcacgtccgtccagcaagcctcatccacttagaataaacaagatgtccgggttctctccagcgccttcaccagctgcctcgtcagcatacacctctccaacatccagttatattgctctaccaaacctgaccaaaccagctactggtaaaggctctcgaggtccgtacaagcgacgattaaaagagggaggtgacgtcaagcgaaacatcaccacggtccgtcaaggatctatcacttctcttaccggagatcatccatcaactggagtcagagcaactagcgtggcaagtagtagaggaacctcggtaaagcccggggcgagcttgattcctggcgaagacggagaagatgctgacggtgatgaggggacgtgggaagatgacttgcagattgacgtgggaggaggaggagagacagctgtggtgagaagacgactgaacagagtcaaggaagaacaaatgtatgtatgattggattagttctcagcaataataaacgcgaaattttgtctgatcagttcacctggtgtgaaagcaaataggttcttgactcagtatatggatgcagatcagagggaacggttcgatgcctggaagatggctagttttccgaaagcacagatgaaaaaggttggtccttctttcaacgttggttttcatatgtttgtatggtgtctgtcctgtggatggggttcaagtttatttataattaagtttgatcgctcagcttatacaacaatcgacaggaaacaccatgaacgacgacactattctcatcgtcggaggagtcagcaaagtttttgtcggattgatcatagccaaaggtaacattcaccgaatgctatccatcttttgcatctgaaaattttcgactcattcaaatttgccttggttcattacacaaaccagctcgacaggttcaggagcagtggggtcaaactggaccactatctccagcacatcttcgcgaggcacataggctgttcgtcaacgaatccaagtttggaggaaaacgaccgggagcagggaagaagacgagtttgtttgttcgctaatgaactacagactttgatccacaatcttctcaccatactcgtaatggaatgcctcgctgttgcaaccaacatttccttccgccactcgatgtggtcactttaaaaaggtcttccgactgatttggatcgctcatcagacggaacatgggacaactgtcctcatacaccccttcactttccatatcttagcagtacctggtttcacgacatagttacgtgaatggacatatttgcgatcgatgcactttgctctagtcgaacatgaccgacattcgattttgttcatctacatactgaatgctctcagatctcttctgattattgtatgttagcttctgtgggatacgttggtcagaccgggatgagtttgctgtatgtagtgttcggggcaagattataggcgcgacgattagtaagctaagcagccgatttctaatcttatctgctattgagatggagaacaaaccccttcttcgacacgcaacacctagcacccaccttcacgtctttccatatctagctcaacatgtattactctgttccaggatcttataatcagtgtaagaaattctgtctatcgttttcaggttttgtttacgtcaatctgaaagatatgagactgactgtcatcgttacctcgtgattatcagaccgatttagtgggtcgccatcttcgattggaagcagaggttctacctacgtcaacgatcttagtccaacctgctcaagaacataccaggctataccatcagatagaagaaatgatgttttgatgagaagagaatgtatgtgtcttgcttttcaacggtctctagcttgagatagtccgcttaatatgtcatcttgaacacaacagctggagaaactcaggtggctacccctcccaaggataggtattgcctcagcttccttgatgtatcttctgcttcatcatctcctacaatggatgtgttctatgatgcagcctccacagtatctgccagctcgattgactatgttcccgaccgcttctcgtttgcagatcaaagtatgtcactccaaacaaccgatttcaaaaggcatgattctaactgtgtcacgtcttctgcatcatagtacttttaaagcaaaatcatttagtcggatctgacctggaatcgaaaaggcaaccagaagccggccgaattcgactgaataatgaagtggttgaacaagacaccatccaatcgctatccgattctcaatcagacctcaagaggttcagggccactgtacaaagagaatcaagtcagccgaatcatcaccgtatattgtctcagctttgatatagatatatgatatatgtctctaacgaactatctgcttgattattagagccatcgtctatcacctcaagtttcgttttgcctatcactccagcaaaggctcgtcggcatcgatcgcacgacacccattcgatcatccccagtccagactcccagcctcattttatcttcagttcaacatcatcaacaccagacatctacgtttcgacaactactcctctgcttaacacgtccttatcgttcgacctcggactgtatgagccgatagcaggttatctctcctacgcaccttgcattcacccacctcttccttgcgtttctaagcaattgccttcctctggttcatccgataaggcattcagctcagcaacggcgatccggactgatctcaccgcaaaccaagccggaccgggcatctgtccgtctcagctaagcgtatcaagttcagcatcatcctcggtccgccgagtgacccatcacagactcaaaggccgctcccgacgaacgccagacagaaaggactgcccctctcgttcggtctcggtcgtcaacccttccgatgaacataccaatcatcacttagcaaaccttagcttaggtcttttatccgactcttcaggtatgtctcttcctataacatctaaatgtaatcgtgatgtcgagacagcaccaatttataactcaatcgtgaggacaccgctttttcatcagcatcgatgacccgcaaggcatcgatctccgcgtcttgttcttgctcgcctaggaaaccttacgcaactaaacgggacgagaagaaatggtctggaaagagatatcggtcgggcatatcgaagactctccgcgatcgactcaagaaacgagcaaggaggatgaaatcttccaaagcccagatccggtagagcaccgctctgtaaatgaaacacatatgatagcaagatcgagatttggtgattgtatacttgtatgatgagattcgtattgatgaattgtttatacttgagtcgatctttctccagacgtgctaaggctttctttcttaagcttcaggtttcatctacaaacactcatatacgttcatataaggaagcctgagaagcaagggcgaataatgttgttacataagaggttatgagatgggaataagagagttaagatgaaggcagaaaacgatcgaaagaaaaaactaaaagagggaaaagtcgaatagggggacaaacaaagaggaaagttctgttttcttttttttgttctttgggaatatgcaaaacgaaagaaacgaaattaaaagtgaaaagaaagaaaaagcagagtcaagactaacacgcctttttctatttgaagctgactatatatgtgtgattttgacagacaaaaacctcaacaaaacacgctagaacacagagaagcggaagaaggcgtcgaacaacgatctcccggaaaaggagttaacaaaggagggcagactatgatcaaactaaaagcaggacctagcaacggacggcctccaatcaagcacccctcgggaccaagagagaagcacacaaggagagagaggacacgatattagggttttctgttgatttaaatctgtcactgtcagtgatctagctctcaagaaaacatatcaaagatgcatgatgtacgaacctgaattcagccaacacagtatagatctggttgaacgcagtgtaaatctcgctcctaacttttgcaccagtcaagacgatttttccagaaacgaaaataagcaagacgactttcggcttgatcattctgtagatcaatccagggaacagctatgatcgaatcaagtcaaagaggcaatgtacaccgttctgtcaatataaaaatttcctgagacaacttgacagaaagctcggaaagacaagacgcgtacctcgggctcgtaagaactgaaagatccgtgggagtacgccagaccttccagtcgaataggaaatttgacatcacaagagccgacgatgttctggatcttgaattcttgaaactttgcgtcaaacccgagcttttggatgattcgagcgtatctgaacaaggattagagaaataaaatagaaaaaattcaagcatgaaagttagttgagtttgatcaagttggcatcgatcaagtatctataaaacaaaagcatacgcactttcgagaagccagcctagaatcatcctcagattttgcaccagtaaccaccatcttaccagaggcaaagattagagcggtcgttttgggatctcgaattctcatgatgacagccgcaaaacgcttttggttgatgacagaaggaactggcatgtgtcaggacgcgttcatccccgagtcctatttgtcagtcggtctttatggagaagaccaataacaaacctttggattgtattctgcattcctcgcgtgcaaagcaatcgtcttcaggtccagcctacaatcaagattcacagttgccacaatattcctagagtagagaacgggagggatgacagagaaaacagaggcacaaaaaaacagcaagcaaacgtgatgtcagtgaaatactttaggcaaatagacaatcaagatatatcaattggcgttgtcggcttccaatcgagttcttcgctatctgatctgttggtcatgagctgtcctcaggaaacgctgagccttgagaccggggggactgccagacgtttaatgtaactccttcttccatccgcattgcatacagagtggttcgctcctgatatatcgttgatatcggaccaatccctttggctgaaagtgacaggcttgagtgtatgaaaagcgatctacgtactgcaaggtaggcacgattcccgccacagctgtgatcctgccagatcggtccggtccagaaagcatcgtgggataatcaacacatgtataggtaagaagaaccgaagacgacagcggatcgttcgaaaggcagaccaagtaacgtgaatcattttttttggcaaagcaagaaccataaaatatcagaacatcgatctagccgcatgtacattcgaggcgaaagatagaaaacttccgctcgtgttgtgcacccaagaagccattgtggctttcggtcagcagagcggaaaaaaatcttaaaaacacaactcactcgggtactgagggcacactggtagttgctcctccaaccgcaggtgtcatcggtcctggtccaggagtcggagccgagatgggaagggagagtgccggattatgatgcggggtggcagatgcaaagggagaagggactgaagggtaaccagccggggtggcggcagagtagagacctcccgctgtgttcgggagcgggggcagtctcggcgtagccgatgaggatgatccggggaggttgagagacatctggatgggtggattgagttgattgagttgattgaaactgtgtatctgaccaagatcgaactggtaagagtattgaggagaaggagcggatgatggtctgagtgataaagagttgaaggtgaaaacgtggagagttttagacgattcgagaaatcaatagaaattttcttcaatttttgtaatgtttgatccaagaaatcattaggaaaagtgtattgagcttccaacctccgacctctaacttccaaccttcagccttcaaccccgactgtcctccgtcctttctctggtatccgtcgttaacatcaacacaagggttgcatctccgatggctcttgctcactggaggtccctttcgatgtctccatctcagctctcactggctcatgtcttgaaatctggtgcgcactccctgtgcttcttctatcttgtccaccgacgtcattcatatttactgatatctccaccacaggccaatccttcagatggaccctcacaagattggccccgccggagaaagtatctcaagatatcgacttggctaccgaagaatactctctctgtctttccgacagacttgttgttcttcggcagacggcaacccagctgtactatcaagcgatctttccggcctcctccgcatccgccgccttcactacagacccaaagctagaccggacgacgatcgagtggatcaaaaaatattttcaactcgacgtcgaccttgttcaacttgagtccgactgggctgctcgagatcaagtctacagtaaaggaaaacaggttgggactctcttgcccggtgtgagagttctgaaccaagacccgtgggaatgtctgtttggctttatctgttcatcgaacaacaatattgcccgaatcacatccatggttcaatcggccgcacatcatttctctccgcctctgctgacttatcaaccacctccatccagccaggtcacaggtggtgctattgctgctgctgccagtgatatgaccgtctccgctaacccaaaggcataccacccgtttccacctccttcttcatttactgatgcgtcgacggtgccaacgcttctgtcattaggatttggttaccgttcaaaattcattcatcaaactgcgcgccttcttgtagaatcccattcggacccacagaagtacctggagagtctccgagcgttacctacggataaagctcgggaggctcttctcgagttcacgggtgtcggcccgaaagtggcggattgtgtgctgttgatgagtttgggaaagaaagaggtggtcccgttggatgtccacgtagttgggtttgcggagagactatacggcttgcggacaggtggaaaagggaagggaatgacaaagtcggtctatggtatcacacaaagtaaacttcgagaagtttggggggattgggctggttggacacaggccgtaagtcaactcaccttaaatttcttctttcccatcgtctttctttgtctttttgctcttacttatgggatagatctctgtttctgtcttcgtcttaggtcctattcgcttctgatctcccgtttttgatgtcatccatcgcaaaccctacgacaagacctatcaaacctgtcaagattaaagtccttcctaaaatcgaatcatcggagagttctatcattacaagttttagcgttgaagccaagggagagctgactctggaaggagtgttggcatctgaacggatcaataaacgtgagaccgttgaaaggattggtcaaggagagagcaaaccgtcaagtctggagctcgaagcagagagtatgggtgatcgaatcaagcgaagacgaagaggggagctttgacgtccactttcgatcatttgtgtaatggaacaaacaatagaaaacaccatctatagatcatttgctagagctagcttgtattgtattatcattatcaacattgttatcattatcatcatcaccactgtcatcattgtcgtgttgtatggtatctgtttgccttctatgtatgtgtttttctccatccaggatgttcatggtgcacgtcctcacttccaactgggccccgaagtattttgaagctgacccgagtcggagaaactctgctggatttacgggttgtcttgtgttaggttccattgaaccgagattggatcccagagacaacctttaggcaaacacctcgggtgaataccccgagcaccaacttcgtagggcaatatgatcctgactgcacagtttatcgaggcagattggagtgcaggttggaaagactaaacaagaaaacgagaagaggccgcaggaaaagacaaggaagtggcaacaaggggaaggaagatgagagggtttgcctaagccttcatgattttagcccatgggtcttcaaagaaagattctttttttttaatttaaaataaataaaaaagccattgaagaagatggaggtttagcgaaacgctaaacacgacaagaaacagcagctgtggctaacctttgttgaagccctctgtctggaagttacctaagtttcctccggttcctcttctgcctcggcctcctcgagaaggaccagagtgatgcccaccgctgtgggcacctctgtgtccttgattactagggtgtccctccattcgttgtctcttatgagcaaatgtgtcagctgatcctcctaatggatgggaatttcctctgtgagcgcctcggccgcctctactagaaccaccggatggcccacctcgatgacctcgttggcctctgcctgctctaccgtcgaattgatgtgatgagaaaccaccaggaccagggttgaagccgttagaacctgtggcaaagccagtcggtctatttggcaggttggatgctggctgctgtgtagggttcgatacctttgagaacgacgagaaacccatcagggcttccatagcaggatccatctgagaagaatgatgttcaaacaatttggaggcgaggcgaatgagggaacagtgtctagagaaaggtaagtgatgtctgtggcggaaaccagatcatgtgatatcatgctgtaactcacgtgaattgaccaggctgtacattcaccgggtatcatcggatatggagagaaatcaccagagcaagggcgaccgggaaaacacgcggggaggaattttgtagtgaaaactagggtaagactatacgaatcgactagaaatatctctagtcaagcgaatcactacgaatgcgctgtagtattcatattagaaaattgtctaactgccatagacttttctctagacccgggttaagcctgtttctcatctttcctctacacgcacgctcacatcaacacccgacactcttctcatcaacatactcttgcaccgaccatcccgtcggacttccatcttctggtcctaattccacctcactagatcccttttcactctgtactatctgaccggccaagtatttgttccatctgttcattttatcctcgaaaataccacttgaaatatgactcaggattcagtccctgtgccctccgcgttggagtccatcaccacactttcggctaaattgttcgctccggacgaatccgagctcgcaaagtggaagcgattgttcgagagctacgcctcaatcgagaaggaaggagtcaagtgagagcaatccttcttttcttttcttttcttttcttttcttttcttttcttttcttttcttttctttgaatctttcatacaccttcctcttgccctgtgtcccgtttttggtttgggcgtggaatgggaaggaaaattaaagcgccccgggcaccttcgcaacgtcggcaaataaagccggacataattctttcctcatttgacccatctatcttggcctccttgcagttttgcttctttgtactttgctcatctcagaccaaactgttcctcgtcatttcagatacctcgatcaggaatcttttatatctgccatcgagccaagcgacaatgactcgggcaagatccgaagagaacagtacggagtttgttcgtatttgtttttactttgatatctttcactttctttcctcagtacaaggaatgagatcaaaacaagccaagactaacgttctgtgacgtcgtgtgcgcatacgcacttccttttccattctcagtgttcagagtggcagactccagcaagcggggtcttgtctcgtttgacgactttgtcgtttttgagagtttactcaaggttcgtccgtctgtttctttcgttcagacatgtccttgcctttgtgatactcagcaatttccgccttccgtgcattctggaattcaaatagcaacctgatgccgactacaaaatcgcgttcacctactttgatacgtccgtccattcttccatactctctatttgtcttacgtactgagtccttctgttgcttatgcatatccactgatacgctttctcactttgtcaatcccccaacagcgatggcaatggctccatcacattcgacgaattcaaggctgtgttctccgaaaacattggtccagacgctatccccttcaactttgatagcgactgggtcagactatacattggcaaggcaaatgtgctaggctgtaagtccatcaatcaagttacctgtattactctttatctactttcctatgtgctgacaagaaggctatcgccggatcgccggacagacaatgaatttactcaagtgcgtatattggctcttgaatgacgtagtatgttatcgctcaggtattgacttatatctggaacaaaagttgatgaaaggtctacagggagaacgattacggcaagcatttcgatactttgataaaggtggagacggccacatctctccagaagaattcaaacgaatcatcatcgtccgttccctctcttttgttcttcttgtgattggtcgtttgggtttcaatctaatcgcgtgtcaatcatatctttgtgctcggattcgctcttacatcaggaggttgcccgacacaagctttccgactcagttctcgatcgactccccactctctgcctgctctcccctggacaaaaaatctcctatgccgaagtcgtcgcatttcacaatgtgctccgggacatgacgctcatcgagaaaatcatccggaacgcagttagcaagagtaaggacggcaggatcaacgtcgacgatttccttgacacagcaggtatgtctgtttcgcgtctcttttcttattttgactttctccatagggctgacaggctcccaacctgtgatccaaagcggccgagagtaggtacaccatgttctcgcccttagaggctaacttggtctggcactttgcctccagaggtagaggtcctcagacacgcttggtcctggatgactttagggcactgcttgatgagaaggttaactccgtcttgactgtctgtgtgttctgtcttgattgtggaaacaatagttaactctcctttctcccctgttcctccccctccttttctccgcaatcctcatccggtttgaaaaccgcagtgggtaccccctacggcaatagaggagtcgactctgcttaaagagaatgcggcggcatcgacaaagtcggcgctttctcaattggcagagaaagtgtatgcatttattcaaggcggtattggaggtggcgcaggagcattcgttgtttagttagtcaagggtccttgttttcctcgcgcgcgttgtctcttgagactgcaaaagaaatcgactgacttgaaatcacgaacattgattttttcaaaaaatagcccaatgtaagacttaggtcctttcatcgctaatgcaggtcttgctggtatcataatttgacttccgatgatgttcgatagcgatatggttaaaactcgattgcagaaccaacgatctaccgtcgtaggcgaggttctttacaagaactggctcgactgtgtgcaaaagatcttccgaaacgaaggtggcgttagagggttttacaaagggcttttaccccagatgatcgttaggcgctctctctactcttttgaaactctatttatctgtatgtttctgcaatattgaacgctaacggactttggtttatcgtgcatgtttgaaatcagggagtcgcacctgaaaaagctatcaaggtctgccactagctccttctctcacgatcactcttacagccttcctaaactgacagagttattcgcttcgttcaaccacatcaatctatctctcagcttactgtgaacgacatcgtccgtagacgatttactgatccagagaccggtcgaatcagtgtttgggccgaggtcctcgccggtggatccgccggtggttgtcaggtcatcgtgacgaatcctctggagatcacaaaggtccgttcattccttactccctcgttttgtttttcttttcttcgatcaagcggaccgtgttttgaagcattttgagtcatttgatattttattcaactgtaaactctagatccgacttcaaatgcagggtgagatgctgaaggaaacaggagcggcttcgagaggagcgatgcacgtgatccgacagcttggcctcgtcggtctgtataaaggagcaggagcttgcgcattgagagatgtacctttctccatgatctacgtaagtttcctctacgaagttcgttttttgtctcccgtttgcatcagactaacttgtttcttgttttcttctcgttgccatagtttacgtcttatgctcatctcaaggtttgttgtcctttcaaagagatctttgcttttcagcaactggaaatagtagctgatccgaaatcaacgtaaatttcgctgtctatcatgttcaatagaaagacgtgtttggtgagggaaagaacggaaagcagcttacgaattttgagacattgcttgctgctggaatcggaggtatgccggcggcctatcttacgacccccgccgatgtggtgaaaactcgacgtacgtttttatcgtttgttctctcaattttgttcttaactaatcccggcgagcttgttcattgggcatggattggtgcttcgcagtacaaagcgaagccaaagcgggacatacccattaccgaggtttgatcgacgccttcgttacgattcaaaaggaagaaggggccaaggctttgttcaagggaggtgtagcccgaatgatccgaagttctcctcagtacgctccttctcagtctatggtcagctactcttaagaattaacatgtttatgacacttgtatttgaactttgttgactatgatctcaatagattcgctgttacattagcggtgtatgagtggttgaagaaatctttcccagtttgtctctttcttcttcctcagttaagttaggtttgcactgtttccctcagctgattggtctgcatctgctcctcctgtatagtacccttatgccgagaagccttatggcgcggcgtccatcccgtcacccattcgaggtggttcatcgttgtctcatggattcctgacctcgaggatggatgacttgacccgaatccgagcgagaaatgcactgaagatccttttggactgtcatgaagactttggacgaacagtttaccagccaaaaggcggtaagagtgtgtttgccgggctaccagtcggtaaatccgtctaagtcgttcggcttgcctgctagaaggcatgggtatatgtgttcctgattgggtctcttgggggaagaagatcctttgttttcttctacaactggtcgtgtctgtcttttttttcgctctctaatatctgtcacctctagtcattgttgttgtttttgttatagttcgttcttttgggaagattggattcttattcttattcttacatcgattcactgttgaatcacataccattcgttctatgtctcaacctggctacataccttttcttcttcaaaattccttcgtcatcgttctatcttttctatcacatgcaaggctttgagttcccttggactaacatattggaagaacccctttccttttgatgttatactgtcgtttgtttactcgcttgaaaaagctaagttcttgagtgcatgcctatcactcgctgatgtaacccgtacatacataaatacaaatctatttgcaccttcctcgaatttgtctactctcatccttctgctgaccattccccttgatgagcattgttgagtcatgtgtcttgatctcattatatctgaccaacctactgaatagtaaaaagccagatccatgcttctctgaaagtaaactatcaaaaggaagagataggaaaagaagaagccatggggaacttctggtgtattctcgatctatcctccagttcgttcggcaatgactcctttaccctgccgtcagacttgtctttctcttcttcgtttgctcatttatcgaactcgctaacttgaccttgaagacttactagcatcactatcacgaattttcagcgttttttttcctttctgatcatagcgcgccatgttccatcatagtcgtcccaaagaccctcaacaagaagtccaccggtcctcattgtcgcgtgttctacattcagatctatacctagctcggcatcgaccctgcccaacccggacatctaccgcgccggaatttttatctgcaccactgtcatcgctacgtggtggtgacacgactctggctgaaaccacatcggtttgtgagtatgatatcggtcagatcgagactgtcattctgaattcagatgataccccgattacatctgactacgctcaacaccaacaccatcatcagcgtcacccacctcaacatcatccacattctcaaccgcatcctaatcgtccagaaatttctagaagagcgactctcgctcatccattccgatggacaagacactcaaagacatcctcctcctcttcctcctcatctacttcttcctccgtcgatatcaacaggaaaccagcgaatggaggtctcaaaattaaacttaaattcaagaggatgaagggacatgggatgcatgccatatatgagcttttcggaggatccaagatacggacaatggttaacgtggattcagaggagactcagagtgagaatgtttgtcagttttgtattgaacctcggtcaattgtgacggcgcaagaacatgatcaggcggtgttccatcatcttgaacccggagtttcatccaagacgacagctgtagatcctatctgggctccaggaaaggatggttcagatgactctgaagggccgttcgaccctaatattatatgctgtccgcttcctatcgatgagctcgtaccgagttcccctctgctatgttcaagtcctatggttgaaattgatatgccggaactttggtcactggatggagagactatcgaggaagaggaagagaaggaaacggaaccggacgttatcgttgagtcaggcgattcaaaaacaggagtgtggacgattgatggtgttcaaagcatacaggaccatagtgtgggttctcctgaattcatcgctcttaggtttcgtgaactgatgttcaggttcaattgctcggaggtgtttagttgacttcaactcttcggccattcaatacaacaacactgcctggaggccttctttctctgatcaaacatgcaagttcttccgctcaaactatatgcgttgatgtaacattgacgtacgatcccggccgtttatataggacactctcaactggtacggacatctgtacctccaacatatcctttcgacagccgtcaatatcttcgccccttctccggctgcattcagatccaaaacggggttcgagcttactatctatctgagggaggtggcaaacttacctctgattggcatgggtccctccgtctcggctgaatttctgtcattatcggcacaggccgatatgcaaatgaaggaagagaaggaggacaccccatcatcaaaaaatctggattcatcaacggagatatcagatgaagcaacgccggttcaagaaccaatgagaggtcaactgcacggcaatctctgcaagaaatgttcgtggtatatgggatgttcttccgagaaaggatcgacttcggagtattcgtcaaaaacgttggtgatgacgtctgtcgagctctcagcccagagtggttcagaggaggaaaatgaaagtagtgtgagtctttactagccctcgcctctgctaaaatttgttcctatatctatttagtttctctcttctctccttttgacacatttcaagagcgactctaccgtcgagggaaggaacgactcagaaaaaataatcgctcgaaggcgcatgttttcccctgtccttctttatacacccttcaagctcttccaactgttacctcaccaaggtggcagtcgtcatcaaatgtatcatcccatcttagggcttttggccaaatccttgggaggtatggcaggcaacaagacgaagagatttttcgttgggaacgtcgggttgtggtctttgagagatctttgatgcagtgtgttgatgtattacgggcgatgcttccatcttctttcttatgcccaccactgtattttcatatgctcttttgacttcgttcttttgtatgtatatatccctttgtatgatcttttggctacgtgtccgagacgaatattttccaattttcctgtgctggtatcaggtctgagtttgatcgacgagggattcaatcacgatttttaaacttgatacattccaatgaaactacgcctatgtatttcttcattcagctcgccaatcggatggatgcccgacatggccttacgtgcggacccatccgaccagaacttatgttcccggcgacatgtgttttaggcaccaagagctcttgttgtttttgaaaatgggaccgggcgatcggctgagtgtccgttcggaaggagtccatgagaattcgttgtttagataaacaggacatgaaccctcattggttatcagattaatgagccgatcttggcacgggatttatttgccggattcgcttgcttcaattctatcaatcatttcttttatttgatcatttgagctccctccggtccctttgatgggctgtatctgtcaccgccttctctctgttccgctgtctagacggcttcatgatggtctcgctttgttgagccgccgtctatccggtccggtacatcgtttgtgttcttgtttgcaaattcttcattcttgattaaccacgcgtgtgcgagtgcgtttactcgaggcctctcattggagatattctctccggaaagccagccagaagcatcggacatttcatgtctgtagatcggaagagagaagtggcttctccttctttctcctcccatgagttccctctgttgtgcttatttcggtttgtcaactgattcttcttgtcccgaatttttttccttatgctatcaccattttgttgatcttaaaaggatagactcttctcttatggatgaacatctttcttctcttttgctgttgatctgaggaggtattgaacaaacttgtatgaagttcaccatgcacttcttctcttctgtttttcttggggtcgctatcttttactcggcagtaaatgccgcgcccaatttgaatgctcttcgactgcttcaaactgactctcgatttgtaggaattatctcgtaagtagttctgctctgcttgcgtcgactgtaacaacaaagctcatgagctatcgcttgatttgggtctatggacagtccttgcacagccggtggttcgtctagaacaacggctgctgaatggttgagatcagttagttccataaattaggcctttttcttttggctcaagttctgactgatgcctttcgcaacattcagtcttttcatgatgctggatcttatgacgccgcttcaggcactggaggaatcgatgggtctctggcatatgagacagatcggtttgtctttataatcaccactctcattgtgtctcaagcgctcctttctgaaagatcctcttcacttaatcacagagctgagaatggaggaacattcgacgcggccactatcactcagtaccgatcgtttcaggtcagagaaacattgtattatgaggttttctatacaaatctgacaaacgctctatggcctgataaatatccgattagcaaccaggcgtgacgatagcagacttgatagttctcggcgcggtaacagctgtcggagtatgtgcaatctcatcctcttgttccgtgtacaaaaaaaacaatcatctagacttcttacgtgttgctcttcggtcccctgatatgtcaggcatgcgggggtcctactattcctttcagagcaggacgcatcgatgcctcagctgctggtatagaaggtgctctgcctctaccggaggaaaccctggaaacacaccagcaaaagtttgccaggatgggattctcaaagtaagtattattactcaatacgcgtctgactaattcgttattgatagacatctttgtttttggtgttgtgtacatagccgagatatgatttctttggtcgcttgtggacacacgatcggtggagtacataaggtgaacatctaaatttcaacaatttcgatccgattgattgacctgctttcaaaacggggacgaaaaggtcaatagcccaacgattaccagcgcagccaatgccgcgtaagtaatgtagtcaatgttccgctaagcctcaacgaattgatgtaaactgaatagatgagctctcaattgctgctccgctcatataccatagctttgattcaacaaggactacgttcgataactatgtagcccgggaatacatcaacggaagtttgatcaacccattggcacaacctgtggatatgaatcttttagcgacgagttcagatacaaggatctttcaaagtgatggaaatgcgaccataaagagctactctgattctagcaatttcttcatgcaggattgtgctacctcgttttcaaagatgttcgatgaaggtatggtcttctgaacttcaatatttcgatccttttcttgcgatgttagtttttgatatcaactagcttgttaaactgcgtacacatctacgtagctattcccaattcggttacattgacagacgccctcactccctatccggttgccatcggcggcctggtcgcctaccgaaacgacgctttctccgtaaccatcggaagtgtccgaatatacaacatggttggtaaatggaagtcggttgcaattaagtacaattatagagatggtacccaaggtacagctgcgattaccgcgggcaaggtcaggacgatctcgaacggtctcccaatcgagatttctgattttactgctgtgagtagatctcagtatctgatgaaagcatagaaacccccgaacttcgtagtcatcaattcacgtattgttactttcttgggcttctccgaatggtattcagcaatttgaagctatcaaagggtgtgtccgaggggcctttcatccttgctggcatgtggtatatgctaatagtcttctcgttgacttgatgatggttcagtgtctcatccctatccgccgtcttgaccctcaatgacggcacgatctattcaagcgccgaggaagccgagaagatggttatcgaggaccgaatcaatatcgttggtcgcgcactccttcgatcccatcaattctgggcgctcttcactgaaccttccgttaacttttctttctttattttcatatgtatgatagaactacggtgcggcatactcgtgccgatatacttcgccaagcggtgtcgctggattgaatgtgacgatgcaagtgcttggaccttacaacgcagctgataaggttgagttgctctatgatcttgactcggacgctactagaacgacttatggagagccaattctcgccacctacagaggatcaagagcaggtacggcgtacaatgtgagtcttccaacccctctgtgtgtgtgtgtgtgtgtgtgtgtgtagttctgatggtttgattgtttgccaaaatgggattcgcgacggatactctagttttacaacgtgtacatccttctcttgaacacttgtgcctcggggtgttgcttactgatgtcatatcttctcttgtccttcagtttcattgaggacgtagccaagagaaacatcggtagtgtcgctgctcgagtcacacgagctgatggttctgttcagaccgatactcgtcaaggtcggtgttcttctgctatttacgtgcttcactcaggacgacttgagagcctgactagaatatcgtttttcacgattctatacgctttttgatgataggtgtctggtggaagaaagcgaactttgtcgtgtgtcctgctgatgcaacagtccccacaacgacgacgccgtcgtcgtcatcggcatcatcaatactgatgcctacggctggcctgggtcgtcgagtggcccatgtagctagaaagtgtatccagaaaggatacacgaactgttttggtctatgtgtagacacaatggctgatatcgaaagctgtggaggttgtgttggtaaaggcggagtcgattgcacgacgcttgaagggatcgtagcttgtgagcaaggggtttgtgtagtcaaagatcagtttgcattgtaaataacatctagaggatctcgcttttacgttgctattgcttctctcttattcggttctttttagctactcttttatgggatccatgcctttcgctatcaacggatcatatacttgactcgtacatgatgagatacatgggatgggctaagaacttgagaatctttcgttatttcacatagccaagctggcgggtgatgaacaggaggaaggcgcagttgcaatcagtcgcgatgagcagtgccgcaaggaaggcatgtttgtttgttgttgtcgtttcggacgcgtcacgtcgcgtacgaaaaacgagtgggctttgtgatttttcttggacatcccaatctgctaaaaaaatatggaagcacctataaagagctcagcccccctctttttcttccttgttcttactccttcaccaccaccaccaccgatagtagaaactttcgctccctctcctgtatatctccaaatctctttcttcacgcaaaaagttcgattcaaccatgctcggattcactacactcctttctgctgcctcccttttggccatcggcgccaacgctgtcatcaacaccccctctagtttggtcacttgccagcctactcttctcgtgagttcatgtcttgggccttcttcggttttttcttagtttcttcacagagtccgacgcaatatagatgaccttcgcatgctgatgaacgtgcccctttccttcctcacgatttcttcattgcgcccttgatatctagtcctgggacgctaccaccgtgagttccatatccctggatttcctgcccttctaacatacaacgacctgacctgtctgacattccttttttccatcgtgaacaggccccctactacttgactgtcattcccaatggagacactaccaccactcttgccagtctcgtctctgggactgatgccctcagctacacttggaccgtaagtcttcaacttattttctctttcattttagagatgaacggcagttgctcacctgcttgactcctcaatgtatgtataattaggttaacatcgcctctggcaccgagattgcctttgccctcaagggttcgtcttattttttttttcttctcgctctttaatcggccatctgaccattcgctatcattgcttttgcagatggaactggagcgtccctgtacacttctggtgtaacgatcggcgccggaactaatacctcctgcttgaactctactaggtgagtcataggagcgaagcgattgtctcaatcgagataagtctatggctgtacgcgtgtgatgaagtttcgattgacgttcgtgtttatactcgaatcacgtagttcctctaccgctgccgttgccgcaacttccagcactgccgcaacttccagcactgccgcaacttccagcgctgccgcaactacaagtgctgcctccaccaccggagctgtggccagtgcttcatccaagggtaagcatcaactttacagctgtgcccgcggtgaggttctcttgaacaaacttagggagttcaaattgaccgttgatgtcccttctctgttctgtcgcatagctgtctctgctgcttcttctgcttgtaagtctgatagttttgctgctgagatagatctttcaaaaattaacagtttgatttgatatttcctcttgacttctcagccaccaaggccgccactgtctccgctgctgtgtcctccgcgtcagctgctgctacttctgctaagtccgctggagcgcctccggtgtctgcctctgtcgctttgagcgctcttggtttgattacctttggcttcttcgctttagcctaaggaacccgtcgacgttggcctttgagtctgtgtcaatccaacaggccagctgctctcttttattctttctcttttctctatcttcaactctacagactttctacaaggaaagcttgcattcccaggaaaacacgctcacgcgcacgcatactctcatctgcatctctttccttccctctgagccgatgtcaatggactcttctttcttcctttttgcattcgcatctgcatctttcccacaacttgtcttttacgatgttttcttcctctctttctgtctttacggtgatgctacttttccctactttacgctcctgtgtttatacttgcctaaaaggcggttgtgaacgttttatcgatcagttctcgatgaacaattttgcaacggacgtttagaagagagataaaaatgtgacaagaaagacatagacacatgcgcacgcacacacacgcacgaagagctgtgctcgaagtgtgacattattcgagccggcccgaccggaccgaggaaaagagaggcacgcgcagccggtcaagtggaaaaaaccggaacgatccggtagaagagagaagggactaaatggatacccgtgatcactgggcgtgtgtgtgtgtgtgactgggctgttttgcatcgaaataatttccgtttccgtctccagcccggcgtcgggtttgattatacttgacgaccct

SEQ ID NO: 797 - DNA, 1320 bp, Xanthophyllomyces dendrorhous
ccgttcccgttcctgttcctgttccttgttccttgttccttgttccttgttccttgttcctgtccctgccccgcttctcacacccacccacaagcacgctcgtattccaacaaacaatcacactttcactcctcccccggaaaagatcgcctctatcgcttccgtcctcctcctcccccacaagcacgcaaccacacaaccacacagacacactcgcatccacgcacacccacgcgtacacacacacacacgcacactctcgcacaaagacaccacgttcaaacggcgtattcttcgatacgctcgctcgtacgtttgctcgcttattcgttcgtttcgcttcattcccagaacgaagatcgctcatcggcagatccgtcactcctctcatccttttttattgtttattcttctttcgtttttaacgccgtcgccccttttgctttttgtcgattcctacctgactacatctctcttccttccccttcatcgtgtctgtctccagaaaatcaaggtagtctgatctccaattttaaaggaaacaggataggctgaaaaagaaaagcaacatacacgacaacaagtaggagaagaaacgaccgattggaatctcgggttaccaatatctctcgtacattcatctcttgtccatcgcccagctcggagcaagtcagcttggacgagcccagtggaacaagaggactcgggaaacagggaaaaaaaccataaagaggtcttctaaatcatccgaagaggaggaaaacaaaatccaaaattccagacaactccatccgagtggaagcagtctttctttgggtaccatccagttgtgaagatcaaggacgatcgtcagcaaaagatccaggacaaagacattcttgatcagtccggaccagatactcacgcacgcacacctacagattgtcctactacatccttttcttcctcttctctagtctgccctgataatctgaaccgaaacagcaacttccatacacttatacacttatacacgcaatacaaaccacatctatttaattaacagtacagcagtcacccaccctcataaacatcccacactcatgctctcgccctcgccgcttcttcagccggtactctccctcgccttgccggcaatccaggatgtcaaaggcggagaaggcttgtcctcgctgtggaacgtgtttaccaaatgcaaggataatatcgaacagggtgaccggttggagaacatttcctggaggttcgtaccaagccttttttaattcgttttttcatagcgagactgttttccttctgccttcaccgttactgtagtct

SEQ ID NO: 798 - DNA, 511 bp, Xanthophyllomyces dendrorhous
attgtcatgctgttagtgggctgcaggtacacatatttatccttacaacagccactcttataatgaagtcaacacgcatcacaagtactgactctatttcagtgagaattgagaccccgacgatcagccagatcgcataactcagctgcgattctaaaaaagcgctcttgtggcaaacagatggactgacccagtaccaactgctgtcagcaaccatcagacgtacgagtctgatggacgagatgtacagtaaaggctgaaaactttcgagccatccaggctttcagtgtgtgattgatagacaagatatcagcaactggcttgaatgacccattcttcatgttcagacatgctgctgacggcgacgactacgactgctctaaccgccgtcacgactatccgctcactttgccttcatcatacgttgtgatatatacaccagctggagcggcgtgtgcatcatatgcgtcagctggtccacagccagagatcactggaaaagtgtgaagca

SEQ ID NO: 799 - DNA, 1602 bp, Xanthophyllomyces dendrorhous
accaacagacttggaggcccatcctcgagaggcaattgtctcacaccacctcagtcaagacagcagggatcactttcccatatatttggaatacaccatctgtcagccttagggagcaactcaagtctagggtaaccaaagactcagcgttctgttcctcacgaggaccctcacatcatttctcaaagcctcctctccttcctggcttggccagctacactggacgcaggattggcttcaatgacaacaggatggaactgtggaaacagatccatcaggagtacacaggatgcacgctcgacgtacactacgagaacaaaggatggacttgcgcatgccacggagatgtctgcagagacgattgcctctgtgactgcggtccttgtcagaatcgagccgcaatgggatgcgtctgtcgtcttcaagagcgttgcgattgttggatctttgacgtctgtcgatgtccgatctgtaacccggaaatacgacgacggaaagagaaagcagagcagaggagaacaagctgaaggcggagcagaaggcggaggagtggaggctgaaggcagataaatggaatcttgaggtagagaggatgcggagggaactaaaaaagcagtctcaggcgcaaaagtattccggggtccaacaaccgatggcggctgcaaagctagccgaccgacaacaggtagcggcagatatagatgcagtcgtcacggaagctgcaggtaaagtatcggccatagtgggacgcaatgaaatatacaatgcggtctatcagaggacggccatagtcgcacggcagaagatctacgagggaatatcttgtcggataaagactttcgcagagagggctgcccaacgaacgtcggatccggtcgtgcgacggcaagggattgcagtcgtgcgggacaggacgatcttagagactcccatgcggctgagtctggaggctctgaagcaggagacattggagcgaaagagactgtggagtgagatgggatggatggagaaacatatgacgtcagatgagctggatggaaaatggacagagggacaacgactgaccagactggtagcttgtgtacagatcaagcagttgctggacgaggagaagggatggagggtcgaagagacgcagttgagagagatacgtgactttttgggtgcagccgacgcaaagtcggaggcggattcggccagtgtgatgctgaaagagaaagggcgagagatgcacttgatgtcgatcaagtacagggaggaagaagaggaacggactagggagagacggcagagagaagagtacgtccaggtcgcttcattccttctactgacttggcggctgtctttttctcacttttcctacgtaggttggatgagcagctgcgtgagtcaccttggtggcggtctatccgacagaagaccacagcgaaatgtcttgagcctgaattgtaaagtctattggagattggattcgatgagtgataaagtctatgaacgagacagactgggatcagcaagaatcgagtcagtcatgatatgtttcagggataacgagacatccagccgagcgttttgggtcaggggaagcagaagctcaaatcg

SEQ ID NO: 800 - DNA, 17146 bp, Xanthophyllomyces dendrorhous
  misc_feature (578)..(587): n is a, c, g, or t
tgtgtgttgtgcggtgctgatgtgacgacgtaaagacagtgcatacagatcgacgttcgccagaggcgatggacaaggatgtagatccagatgcagatgcggacgcagtgtagcgaggactgctctgcttgtggcatggtctgtgcttactcaaggtcagtcgatcatgttctgttgtgtgcacctcgtttcctctccctcctcccctgcccctctactctcctccccctctgttcaaagatgcaaccaaagttttccaacttcgcagtttcctccctacggtcctcctgcccgcaagctagagttccttccgttgtgaaggaccaccccgtgctcgcctctggcacccgagctctctcctcgttgtaacctgttcgcggcgattggtttcgaacccctttgccgcttgagcgggccgcctcggcctttcgccccttaccgggcttgatcggtcttgatggcgcggacgggtcgatgggggctcttcaggagggtcggtctgcccccttgtggggtgtgtgccgacgggtgggaacgaatgagggtatttttcttccttggatgtctgagacccttcnnnnnnnnnntcaaagatgcaaccaaagttttccaacttcgcagtttcctccctacggtcctcctgcccgcaagctagagttccttccgttgtgaaggaccaccccgtgctcgcctctggcacccgagctctctcctcgttgtaacctgttcgcggcgattggtttcgaacccctttgccgcttgagcgggccgcctcggcctttcgccccttaccgggcttgatcggtcttgatggcgcggacgggtcgatgggggctcttcaggagggtcggtctgcccccttgtggggtgtgtgccgacgggtgggaacgaatgagggtatttttcttccttggatgtctgagacccttctacctgatatgcttccgtatggagcatactctttctttatcgttggtgaatctgatggtgtgagcaaggactgagctgactgtgcgttgtgtcttttcttgctggctggttttgcaggtctgtctgtgtttgtctacgtgtctgcctctgtgtgtgtgtatgtgtgtgtgtatgtgttgtatacatatgtctgttgttccgcatgatgccccaagaaacagacaagacacaacggatacaaagattagaagccacaccagacgttcatcgcgttgaatatgtgcagagttgattctgaaaatttacatgtgtgtcaagtatgtaaaggccaaagcggcgtttagtctgtcaaatggaaactgatcttatcagctagggttatgacgcatgatgaatcacatcggactgcctacaccatttcatttaacgtcgcgtcaaccttctgttccctccccttctcattctcccctggttcggatatctggatacattctagggcaccatgtcaagcaaggagcagtctgcgatggctagtgcaggctcgtcgtcatcatcaacagaaatctcagattctatgctccgtcgaatggcaggtaagcgtacatcgggatttccttgttcacgacgcgtcgatctaatttaatggaccatctatctcatcgatatttctaggccagtctgtcaacaaagccggcctcaagaaagaccagtccgagataaataagattatagcagaggcttccaaagttcgtttctatcttgcctatgccactcgagaacagaaaattctggtaggctttctttggagccagttccacttactgcttgtttgaacgcgttgaaatctgatcagggttccaaattctatgagaacgagagagaaaaggacgagaagctagggatacagattatgaagctgctcgataagagagatagattgctgaaagaaggagtggaccttcgacgactagagagggaatgtgacactttcgttcgtttttcttagctttatcattctgttcatacgcgtgtacgttacttacaagtacggttctaccttgcggaaacaactggatgatcaaagcagattcagagaattgaatctcagagagacttgtcacaaacgatcgtgcacgtcgatatggatggttagcgcttaatatcctacgaattacgtgaccaagccaagaagctgatcctcttgatgcactcttagcgttttatgccaatgtagaactgttggcggatccaacgctagaaggtattgcctttggtgtcggaacgggttcgtcacacacgctcaacaatgttctcttcatgagatctgagcagagggtctaaggttttgatttcttctcgcttgagttctgcaggtgtcttgacgacagctagctacgaggcaagggcatacggagtccggagtggaatgcccgtttttgtaggtaaagccccattttatcgtcgttgctctcctttacttcttgctccaatacagaatggcggtaacgactggtgtgtttgctcaaacctatgaaaatagcgaagaagctgtgtccacatctgagaatggtgccggctacattcaactcatatggagaatactctgggaaagtgatggaggttagtgatgttgttgttcctgacccggttcatgtcatgattaagactgtcatttcattccctctgtcaacttgatgaataaccaaacaggtcttccggcgcttcgacccgaatatggccaaagtaggaatggacgaagcgttcttgaatctaacgacatacatccaagaggaacgcgagaaggatggaaccggtcaggagagtgaaaatgctatgcacaagaggagagagcgcattgttagaacgataagagagacttgtaagaaagtcacagggttgactgtctctgctgggtaagtataatgttcttttctttttttcttgatctgatcatgatgagaggtttctatgagtatctgatttcttcgtatgtctttcaaactctgacgtctttcatacagtattgcgccaaacaaggtaagaaaacagtcatctcttcccgccgacttataactgacttcaagacacattaaccatggaccgttatcaacaagatgttggcaaagatatgttctgatatcaacaagcctaataaccaatatattctccctttcacccgtcaagccgtattagacttcacccggacgcttcctatccgaaagtaagttggtttcttataacactccaagatgaccttcttggctgatataacagttcgaaaatacatagaatccctggaattggacgagtttctgagagatgtttggaagcactcggggtcatcacatgtggagatattattactaagcgtgctgagcttcatctcctaaattatggagtcatcgaattgctcaaagctggcttaggagcaacctctaatgtggtcgaagctggacggagagaggacaggaagtctgttggctgcgagaggttcgtttgagtctacactcttgctttcaatcatatctacgtatatatgctgagatgtaggtggcttccttgccgatcgattgatataattttggaacgaataaacaggacattcagagaaaagtcgaaaagagaagagttgatcgccattgtcgaagacgtggccgaggaattgactgagactcttcagaaactagaatacaccgggaagactcgtacgttctgcgttcctttcgtgttagaatgcctaagtactatcacaccgttgaaagacatttatttgagagctttctagtaagcttgaaatacaagacccacgacttcaagctccatacaaagtcgcatacattgcaacatggcgaatatgtatgttcaagcttgcgcaaatagatgacgatagtgatctacagatgaagccattactaacatttgttcaacaaacacagaaaacgagagattccattcagacttgggctctcaaagctttagaagaatctctgcctctaaaactaagacttttaggtcttagagtcaaccaactaagagatttgagaaagaaagggggattggaacaggtctgttaatctcttcacctcgcggttgacagtcattgtcccgaattaccgatgaaaggtgcatcttcttcccctccgtctctcttatagtatttcacaaatccgtctcactctagaaagcttcatgaggacgatgaagaggccgaaggagcggatttcaataatgctatcattctcgattcggatgaggacctcgaagacagtgaagcggctgaaacagaacaagtcgagcgggccataaatggttccccgttcaacgatgccattaccaacgcagcttcttctacggctgttcccttcgcatccaaacaagaaacagagacaacacatcatccgatgatatcatgccctatatgctcggttagtgggacttgatcagaaacaaatgtatctgactttcacttacgccgcttgataacctcaatctgctccttcttgacagcgaaccttcccgagctcgacgacgaaccaagacctgaatgcacacatcgatgtttgtctctctaaagacacgattcaacaactatcttctcggcgctctagtcctatccttggttcaagcgaatcagtatcttctaccggcgagaaatctgttggttctaagagcgcgaacaagagatccagaagagatataccgacgaacaaggaagacgaggaggattacgactttctaagacctcctacttcaagaaaccattcaacaacttctagttcagcttcagtttcgccaaccgtgacttcatcgggcggaagctcgaacaaaaagagtaagaacgtcctaatgggcacgaaggaggctcctcgaaatccgtaagttcttcttttcatcctctttgttaacttctccgcagtattccgggggtgtcttgcgcgcttcgtatcgatgatatctctatatgtgtctaagactgatcaaaaatggtggtattgttttcaggtttgcatttatgaagagataacatgatttcacatgctttccttagaaggcaagcacctgtcaaggccattagggtttgcttatttctcattctcacacgtcactcacgagcgtgcatctattcagatctggccaagactcagagatatacattacaatccaagtggacaaagacagttgagtaaggaagaagaggttgaaaagctaaagaaaaatgtgcaaaaacacagaaaaggcccctttcctactccctcctcgaccacttcgaaaccggtccaatttcatctaagccgacttgttgatttttaaaaaggatagaggagttgagaatggttaggtttggtgcgatggaagagagcttgaagttgttctgtagatgcacgatacgttccaatagtagtcccaatgcatacgagaggagtctgatcagttgtcattcagacgtatcaacacgtcaccaagactaacaagatctcgtcaataagaggaagatgctaacctccactctcctatcctccgcttttctaatcgaattttctatcaagccgataatgttgatactgatgttactgagtttcctcggataacctgagaaaacgattaacatgtgatacgtgatgttagcagtggactgtttgcttactgagaaaattcagatgggaatttttagaatctaggcctcaaaacagatgcttcaaatcaaccactctaggagtgggttgaaaagtgaggcagatgaagatctgatgttgtcacacaacgccgccgtctttctcgacatcccgcccttctacagtcatggcatgtcaatccatacagaaagcagatgtgattgctccttgaagatccaagccaacgagaccgatataagaaagctaacaagaagaaagatgcatgacactcacaaccatgccaatcgaatgcttctcggccggaacggtctcctcgaacgcgtcgtcgacaacgaggttaaggaagatatcaaatcctcgaaggacaccagtcacctttcgtccaccctggatcagaatgaaaattcgcttatccatgaactagtgtttatacaaagatagagatgaacaagcaagcacaagaagcgagtgaagccacgattgaaaggttgaaaaggccagtcagtaagatgaatttgatagcatctttctcgacaaccttcgaatccattgaagatatagtaaagcacgataaaccttacctttttcaactcgggagatgaaactcgagacattatgggcaaatagagatgagataaaagtgaatgtgagcgaaaaggaaaaagaagggctatgtgttgggtggtggtaaagatttagaatgatcgagcaagcaaaaaaacctaatagaacattttctgcggctcgattagaaaaagtcaagaaatctcctaatcagctttccacttttttccttccctccgtgccttttcctcatctttctcatcaatccatcaatccttcatcccactggctgcttattctcaatttttgcttcgtttttagtacacaaccacgcactgtcatacaaagcatgggtgagtgctatacagatatgtccaaaatagtatattttattcatgactgaattgagtcctccacgaggcgacttcttagccggaatctgcagaacacgtctcggggaagaacgtaagcaatggcgaaaggaccatccttttgtaagtatattatgaacgagtttatttctgtttttattcttttcttgttcttttacagaatatgctcatcaatctttgcctatctctgtttatatcgtttgctaccattgattgccagggcttctatgcgcgtccggcaaagaacacggatggaaccatggatctcatgaagtgggaggtcggaattccaggaaaagctggagtacgtttgttcacaggttctcatcgaaaccaacgtatcagtcactgatgtctctcaacgtttggtctttactttatcagaccaactgggagggaggtatttttaagcttcagatgatctttcctgaaggtgtgtttcttctggcttgttgtcctctgttgaattcattaattatctggttatgatgctaaatcgaatcaaccttcagattatccgtcaaagcctccaaaatgtaggttccactgagtcttatgtcttgttttttgatccaacttccgttcgccttaacaagtactgtgctcaacttatctctcgccacaaaggcaaattcactcctcccctttttcaccccaatgtctatccttcggggacggtctgcctctcgattttggacgaggagaagagctggaagccggctattacgatcaaacaggtgagagtacttgttcttctcgcgtatcttctggtttcattggctcacctagattcttcgtttcgatcattctgcttggacgtagattgtgattggcattcaaaatctgttgaacgatccaaatgcttcggatccagctcaagtagaggcctacacgcttttccagtaggttcagcctttatgggcttcgacacatctcagatccgtcttgcgactcgccatgtcgtgcgatcagattcactgactgttctctttgttcatcaggaacgataagaacgcttatgagaaaagaatacgaagtcaggcgcgtggtatgtactctcattcgccaatggctataattcgtgatcttctatgtaactgaatgtagcaacaatcttttttttacagaaaatattccacgatagaagcaaatagttacgctcagatccttatagatgtcaagggatcacccttcatcatcagagagaagggcttcttctgatggatgtcagattctgtcttgctttctctattctcctcatagtttgattgttcgtttcatcgctctccatagttaggcctgaaggacttgggagttatgaatcatctctcgatgcgtcttaacgttttcccatgaatctatcatctaatacggttatcggtttctgtatgatatgtacctctcatgtgagctcccaacatcactcgccattgttgatcctcgaaagtgtacatgattgccagttaagatgtcagaccttgtgattaagaagcctttcgattgcctgacatagaggatgcgagtcacgcatcagatggttgacttgaacgcgtcgtttttatcgtcaaaacgcgtctgaattgagaccgtcattaataaagaacgaacgaccaacatctaccatgagaatccgtatcgagatcccgccttcgctcctgagccctctggcattgtccaatccctcagagagtgctcctgtacttgcaaaactagatggacgaacggtgttgatcgaattacagggggctatcgagacggacggagatacagacggtcagttgatcggaaagcttggactcgaggcggtacgcttcccttgaaatcttcacatcttccaatgcttccctccattctagtagactgatatctttccttttatttctccttgtaatacaaaaatggtttgtctgaaataaagggtcgaccaacactcaccatttctcaccatttactccacgggacgtttgtcaacttgcccaaaccgttagccgttcttcggaaagcaccgattatcattgacgatgaagagctagagggaattgacgagaagaattcaatgcctccaagtagctcagaatttaatgttatgagcagtccgatgccttctgctcctcggcctgtatgtattctatttccgcacatagctcgtataggcgtcagagtttgtgaactgatatatgctttgtttggggttcgttcattctgtacgctgcagccgattgactactcgtctgatctggagcctgcttcatctccttatcgcccttctgtcactccttcgtccaaaccagcactcgcttctgacatactcaagagaaaacgtcaacaggtcattgatggcgcgttcaagaagcaaaagaatgagctggaggaaaagagagcgacgaggtatgaatgtgtcggtgtaatcaagactaaggtcgtttttgggaaaaggttcgtcatcaggagcattttctcgctctgtccgttgttgaataactttgaagtctagagcgatcgtatgttgacgagaaaaaaatcgctgtctccgccgtgggctattttctcttcgatagacctcagttcatcgttcatctagatgttgatgcagacgagacgtcgtaacaaagaggtctcgggaaagccgaatatcatatatccttgtagaactagtgcatatacccattcattttctctatctctataatgattaagacagaccaagctaaacgttcgagccgagtgctgaccttcgggaaatacagaaactaccctattacttttatccgctgacctcgcttcggctactgatcggatcaggactgtatcttgtctatatttttacctcttcctgttggctgttgatctcactcttgtcctcggactgttcatgttcgcgtcttgagtcgtttgctgtagagactcgtctttagtcaacgacgcgttgttatccattttagtcgtacaggcacatattttatcaggttcgtcctcgtatgttgtcggttcctttgattatagatgttgactgatacataagagacacatagatgacgtccacagttccttgtgagctacgcgatgtggacgaaggcgctctcgtttgtgagtatttcgtccgctcaaatgttggtcatttcttcagcccatttccgttctcccctcttcttcttcttcttcttctatctcatcctcccttttcgttctacttgtgcaatccctcttgccacttgttgaatcaagtcgccacccactgtcttttcgtgtctttcttcgttgtttccttccagtgagtttgttgcgttctcattgttaagtagtcttgttgtctcacctgcttattgattggtttgtctctcctcgatctgggaaggcctctaaatacacaaccctctcctttgtcaggaactttctctctgctctttcgttaatcgtcgagcttccttctttacccttccttccctttacacgcgccaccctctcttctacttcgccatgtactctcttcgatgtgtactggttgccatcaccgccctgttcctgagcgtgtctgcctcgcccattcctctacgtgcctcttcatctgctccctccggagggcccttacttgcgcggtcttcgcaggtctctttctcgaatgaaacttacagctcggccgagcaacaaactaccgtagcgactggaattgagataagctctggtattttgagccaaatgagacaggacaacccggctctaagtagcgtgtttgttttgcctcctggtgaagacagtattgctcgaatccgaatcccatttcacgtgagtaatgactcgcgttgttttcttaatcgctaatgctatacctggagcattgggctgatttgttgaattgaacacatgttgcctttcttgttcatgtttccattcatcgtcctatagtggtcgttctctatcgccttcaactcttctacgttcaaattcccttcgtcttcccgattcttctctgcgtccttggccgatggttcccctatcccttcctggttgaagttctcgaactccacggtcgagtttcatgggtatactcccggtcctgaggaccgttcatctgcttgtcacgtcaagctttgcggaggctccaaagaaggcgaagcagacatctgtgattccttccgactgatggttgccgatcatactctctcgtctagcacccaattcggaacgaacgacacccaatcaatcgtcgttcaacgaataaatttcactgtggatgctcactcacagtcgaccattgtcccgtgggatatgttttccgatcttaacagcgcaggattggaattggacggaagagctctggacagagttaacatatcgacaataaatgtcgatactatgtcaactccttggctgagctggaacgaaacgtacgtctgattaaatccgtcttgctctttttcttgaatgttctgacaggatgcttttggacaaatcaggaccatgtcattcttggttgatgaccatgggttgaatttgaccgatctagtatatccctcttctgctgaagctcaatcggcctctactctcttcctccctgtcactatctcggatatattcaacgatacggccgctcttcgtcttcccgtgtctgtgtatccttcgttgtttcccagcgggacacccgataagatctacgccactcccggcaaagctttatcggtcgatatgtcgtattacctcgattcagctgccctcgaccggaatctcacgttctcggtcttgtacgagcctgaggaagcaagcaaatggcttgcgttctcgaacacatctaacacgctttcctcaaatgccacaatcccaaacgacctatcattcgatactgtcaacgtcacttatgaagtagaggatagcataactcatgcagtgtctcgtgaagtcatctctctctccatcgcccctgataacatcccgactcattctggcactaacacgcccgctaaccttggtactctcactcacaaacgaaaagcgattgtcgctggagtgattggtactgtatttggagtagtgatactcgttcttctcttccactactgtcgttctcaagagcgagacaaacaccaggtggacgatcgaaagactgcgttggagaacggatatgcatacgacgatgataaagctgagattgaagtcaaagatggcttcgagctggaggcaagggcgtttgagccagaacgtatggcggatatcgctttaggagaagatgtgtatggttcagtaaaatccaagtctagtcaaaaagatgcggaggctatggattatcttcctttcctcacaggcttttttaagagggtaattacacctcctcaggtatgtggtcaatctttgtcgtcaatatcaaggtgtaatttaatttgttaaagattgcctctccttttgaatggatagcgcgctactacgattgccgctggaaagttcaagatgttgtcaaagaagactcgattcgagcctagcaagagcatcacctccatcgacccggcttctatctcttaccctatccccgtctacactcaaggtggctctcaagtacagcagtctcgtcaatcccaagcaagcgctttcaatggtttggtgtcccggtcttcatcgcaggctacgtctatttctgccaatgacagccaattttacccagcccatcaacgacctcaatccaagtttggattcctcagtgaccaggactcataccaaggacaaagcttccgttatagtcaagggagtcaatcgcctgcttcctgggaaagtagtcgagattcatatgtttgggacgcctctgttgttcaagacggtcgatccgaccggaagacacgaggtcaaactgaattcgatctaggaccttattctgacgccgactgcgatgaggacgatgacatgccttcttcgatgtcgggaggatcgctcgcttcagatccgaccaattctgctgtgatcaccacagccaaccggttgacacaaacctctcttcaagcccaaagggttattggaagcccttccttgcttgtgaccgctccttctagacctgaagtcaagatcggagcgtcccctcttccttttatgaccggtaccggaacgaactctgagcttgcttcttacacgacatacatcgccggattagatgccgcccactcagaaacgtcctattctttggtagagcctaacacgtcgatcgttgaggcaccctctcggtcatttgcttccgagctgtcgtttccctccaacccatcattgactgctccccctcgagtcaaacttcctcctcttcccagtggagactctcatacctcaacttcctatcacgtctccaaaccctctgcgagtgattctgagaagaccaatcgatcgttctacgacgacgaaacgctagttttctatgcgcacacgacagaagctttctcattcaggccaacgatcgacttggattccaatagacccctcaaaggtgtattgagggcaacgattgccggattagaacaagacggctcggaaacgttgcctcggtggttaagatttaacaacgggctgttcgatggtgtgcccagagtgggggatgaaggacggatggaagtcatcgtcgtatgttgatttcgtttgatctgtgttccttcaaacaaacttcttaatcaacctaacatcctcttctatgactacgaacaggtcgaaaccttctctgcgctctccaaccagcatgacagaatcgtagccaggtttgtgcttgaagtccggcccggttcccagatccctcgccgatctgcaggattaaggaccggacagagctacaagtctataagcggccagatctcggacatgtcaagtcagggatccggatctagcggctggtgataatagatgaagaaacccccggatgggagggtattatgaacggcgggttccgtttggttgactttcctgttctctcttctcttctttcgccttctctccctcccctcctcctttcccctcttctctctctctctctcttgtttcctcttttggtttctttgacggtgctgtttctcttcccccttccttcttccccggatttgccttttcaagcacctttatccgcatctacaccccatttatcttatccacgtgctatattgtatcgtaatctatacctctcactttccttcggcttttttttctttcttgtttctcgtcctatcgctgtatcttgcgacgttcgtttctcttggtcctattaaaaaaaacaaatctcttctccgtgattcgttcattctctctctctctctttcttttcctttcagccgttgtctctctccttgctccttcgttgtctctctagaaatttgctcaaagcggaagaaggagaagacgagcatcattgggagacatggataaagaggaaggcgagacaaggaaacaagggtatagatctatcgtattcgatcagggtctcggtttagaacctgtcaagaacgtcaacgtgaaccagggcccggcgtgaagtatcagtaaatgagtttgacgttcacaaaggaatgaaggaaaagatttaaaaaaataaaataaaaaacaagaaccctccatgaactcgtaggtaaaggggagggaaagaacgaaagaaagaaagaaagaacgaaagaaagaacgtaaactcacatggcaacaaagttcgagggaaagacgttccttcctggccttctcctcgtctcgtccaataactcaccggaccaccaaccgtcgtcgggcatgtcggtgacggcgatgatgtcgccggtctggaagtcaaactcctcgtcgatggtggcttggtagtcatagagcgctttgacgtagaggatcactggtttcccttcgtctgtcatctgttcgaacgagcctcctacgggcgaagggttaccgttgttgatcgccggactaggagctcgctgctgttgctgctgctgttgttgttgaagaagagaagaagaagaaggctgttgttgttgttgttgttgttgttgttggtatgaaggctgaccagaggggttgtagccagcttgagtggaagatccaacggatccataagtcgattgtccgacaggataccctccgttctgaccttgctgttgttgcagttgcagctgaggttgagatggttggcctacggccgaaccgtacatctgaggttgtggagcgccgtacggctggttagcagcggggtaatatccctggaacggaggcgcgccgtacatctgttgaggagcggcagcagcagcggcggcggcggcggcgggagtagatccggtggttgtgggatatccaccgtaggtgggatacccatacgcgttgttcgtcggaggatgtgctacagcaggtggctgagtggacagaggaggagggatcgaactcgtcgagttcattgtgcttgttcgagtaggttgtgaatacgatggttgctgctgctgctgctgatgttgaacggacgtcctcgatggggcgggtgaaggttgtctgggtggagccatcgagaggtgcgaaggagcaggcgacggttgcctagctggtggctgctgttgttgttgttgttgttgttgttgttgttgttgttgttgactgtagagttggctgggcgcgggagaaggctgtctggcagagaccgctccttgttggtgatacgtcggttgctggtacgattgtctcgaaggagcaggcgagggttgtctatgaggaggttgtccgtatgccggttgttgttgatggtacgactgctgttgccacccggtttggttctgactgaaagcaggggaaggagctctagggtccaaagaagacaacgtcacggccggtgcaccgataccggcgaacccctctcttgccggactgggactcctgaccgaaccatcgccggcgccgaagaccggtctggacatggtggaggtcctcgatttctgggaggaaaccgagcctgctctggacctcgaacggggttgctgggcgccctcgccggggaacgactgggagtatcttgacaggacttcttccaccggcatggttgagtttgacgtcgtcgacggcgcttgcatcagcgctggcgagggcgctcgtccttgggaagccatgtcgttgggcgacgacggtcgggaagacggatgggcaccgacgatggaggaagcggcctgggagtagtctctcgactgtcgtctgtttgcccgcgcttcgaactctgcttgcgactgagccagcgcggccgaggtcgagcccggttggggtgggatcaggcttggagtctgtcggtgggtctgatgggaaggtgcgtagctcgaactggtggaaccttgtcgatgagcggtcgtcgtcgtcgatgatgggtgtccatcggtggacgcagaagccaacgtctggtgttgagcggatataggggatgcaacggcggaatgtctcgatcggtaacttccggctcgagacatccgtttggcttgcagatctgccagcgcttttgcgatcggatcttcatccaagttcaccgagctttcctccttggctggcggttgattctgggtgggtgattggagttgagcagggatcaaaggagcggcaacaggagcaccatattggtttccgtagtggttgctgctgctgctgtcgtcattgttgttactattaccgatcgagagattttgcaaagcagtggtaggaggttgagaaggagccgatggttttgggatctcgttggaatacgactgggtaggttgagaggcagcgaacgatttctgagcgaccacctgaggattaggagaaggagctcgagcggaaggagcggaaggctgtcgaacagcctcctgttgctgctgctgctgatgctggtaagatggttgctgctgctgctgttgttgttgttgtcgagtggcaagaggagcgaccggaggcgcccacgagtcgggcaggttcgactcatcaacaccccgatcggcctcctcatcagcctcgacaggcggcggcgggaggggggattccgtccggtcgcccccaacaggggcgatcggccgggcggactgtcgagtaaagctggcgagtctgtacgtccgttctgtcggatcgagttctccggccgagtagtcgatgtaccgcgaggggtctgttggttgaaaggagggaagaacggcaggaacggtcagtctccgataggtatcgaacgaagagcgcacgtcaaggggaagggggggggaggacgaacctgggatgaatggtccggtggcataattcctgaggaatgtctcggtctctagctgaggatccaccgcttctaaagcgactcttaatctctcacaagcctaataaggatggaaagaagtatcgaaggcgatctatcagtccccatgccatgccatgatctacacagaaagagaatatgcagagcaagggaggatcagaccgaacgaaagagaaacgaacctcatcatccgtgacgcaaacggaggacacagcattcgcatacgaccaaacgacgtctttcaagaattctatgcgttcttcctctagatcttgggcttgctgcgagtcccgatggagacgggggagagaagcagccgtccggatcaacacacacaagctctagctctcgcgaggcaaatcaaggcaaagagaggaaaaaaagggggggggggg

SEQ ID NO: 801 - DNA, 923 bp, Xanthophyllomyces dendrorhous
cccccagcccaggggcccctgggttagggcgaggcggaggagtctgcgaggcgcgtagcggtgaggagacgacgactcttgcccgtcttctttctcctctctccggagggaggtcttatcgctgtgacggagagaggccagaaaggaggcccaggggacatagggctgccagggagggaagtctaagaggcttctgttctttccctttcggagagaacggagttctgggaagaaagagagagactgcaccgtcgagcgcggctttagcgagacggtaaaggcctctctttcgtaaacctctctttcgtggaacaaagagaggtggtcccagaatgaacgggcgacaagaagtgggaaagaacagaaggaaccatgattcggcctctcgccggaggtgagagagaagaaaaggagccgacctgagggaaccgaaggtagggttcttttctgtcccctcctccttttcttttccgagcgggcgtagcgaggaaagggaaaggcaaggagggggactctcgagactccaggagagaggagttctcatttcggggacaggtcccctaaatgaggatgtccgaatcaccctctttgctcgaggaccctcgagcaggattcccccccttgatctcgttcttccccctgagtccatgagacgaggaagcggggtacgagatgacggggggatgacctgctcgatcgcccgcgagcaaagaggaccgccgatgggcggaaaggcgcctcttcttggcacccgtcggggtcgacctgcggccccagataggggtgcaaagaagcacgccattccgagaatgaaacagggtttcccgagttgtccccgacaacgacgggaattgaacccgtatttcattctcgacaagaatgcgtgcttccattgcaccacgttatctgggtgcgccgcaggg

SEQ ID NO: 802 - DNA, 391 bp, Xanthophyllomyces dendrorhous
tatctggggccgcagggaatcgaaccccgataactactgccaagaagtagcgcctttccattaggcgacggcgcaagaacaaaggaggagtcgaacctctaggagattgctttgcaagcaatcgacgcctacccgacgacgatactttgttctttgctaagttgagaaagaatcgaactttcagtgagatgatttctcgacggcgctacaagccgttacctgcccatcaggtggtcaacttcaatggctccagctgcgattcgaacgcagccaactccctccacaagagagtgctctacccctgagctactggaacagtagtgatttcttagcactctctcaagagggagtggatcggagaatcacagttatagagagagaaatgagatgc

SEQ ID NO: 803 - DNA, 958 bp, Xanthophyllomyces dendrorhous
aagaagagcctcaacagcaaaccccttctgaggctctgatgagttcttttctcgcacgaggcgacacagcctcttgcccacactttttcaatagccctttaaggcaataaaacctttcaagggctattgaaatcctcttctctccaagccaaaggcaggagagcttaaaggaaagcagaaggaggtgaaaccgagtgatgcttctataagtgccgaaggcacagagagaagcagagggagcgtagcgaatgatgcggatctctgaaggaaggctaaagccccgaaaacaaaactctgctttagcctgacgacccctacggagaggcaactgcctctcttataaaaatataagagaaaaagaagactcaagcggaggagtgctaaggaagctctgcttctgaggcacgaaagaccttgagtcaaatgaaaagacaaaagaaacgaggacgacgaggctcagcgaagctagagtcgagtagacgagacaaacagcctgtaaggctcctcctccttcttagctcaagacagagacaaagcttgagctaagaagaaaaagagatacgaggcacgaggtagagagctacgagtaagtagacagggtctgcttacgaagaggagctcgaggctcgagccgagacaaacactcccgtcaaggggagtgaggcagtaatgccgaacctaaaggctactgccaaaggtagtagccaaataagctctcgctcagagcgagacgagctccattgcccaaagcaacagaggagcgagtataaaaatactctctccgagctatagctcgagaacaatgattcttcgcaaacaaacaggcgactagcgtagctcagcacttctcttgcgagagagagtgctcaaaggagcctatgaagaatcataagttctctgagcaatagctcactgctcgcagagcagtccatgaatacatgccacttggaacaagtgc

SEQ ID NO: 804 - DNA, 349 bp, Xanthophyllomyces dendrorhous
  misc_feature (85)..(94): n is a, c, g, or t
tcaacgagagaaacaccattgaggcattcggaaactggaagtacattgttgtctgtatgactccaccattagaatatcacaaagnnnnnnnnnnctcacttctgtctcgtttcatttccgttctactttctttctatcttgcttccatctcgtttctctttcgtttgcatcttggtgatcttgtatatacagtagctagtttattttctttttccttcttctttctggttctctcaatcaacttgctcactttgtgtgtgtatcagtttgagggaatcagtttgagagaactagtaatcgggtctatctattgagaaaacctttctagttcaacgagagaaacaccatt

SEQ ID NO: 805 - DNA, 3074 bp, Xanthophyllomyces dendrorhous
  misc_feature (947)..(956): n is a, c, g, or t
  misc_feature (2966)..(2975): n is a, c, g, or t
tatgccttttgggagacgagatcgataacccagtacctgtatatcctgatgcggaatatgtgagtggctttctgataggccgggtgtgttgcatgtgacaaagccttgcctgtgcaccgactgaatcgttgcaacgtgtactatttgtgttcatctaggctgtctctgctcatggaagctactcttgggagagtgccgagaagccaagcgatgagcctgttagggtgactccaggaaagggcgggccgatgggaaagggcaagccaccaaagaagtcaaagaaagaaaaggcggcagagaaggaggagcgaaagagaaagaggctggagcgattgaatgcaccccctgtcgttccattcgcattgaaggacatcgatcttgatatccctcgaggcagctttgtcgtggtctgcggtcgggtcgggtctggcaagtctagtttgatgcaggcgctgctcggagagatgaagcttgtgtcgggtgaagctgtaagtagaccgattctttatgtcccttttttgtgactgtgtgactgacttagtggggatacacatgggtctgcctgtctactgcacgtagtatctcggaggcacttccgcttactgtacgtctgcactgttatcgttcaacgtgtcgagatgacattcctggtctgtcttacccctggcgagtgcttgagacagccactgacaagagacgcttcttccggggtatgttctgtttcattctgttgtatcttcggatactgtcatactatctgaacgggcgcaactagttcctcaatcgccttggatattgtgagtgatgtgtctacccagtggtcagactgagtgaaacggatacgtctggtcgctgtagaaactgtccatgcagactcaccacctcttttttcttgcactttctcgttggatattgccatggccgttttccacctgtttctggtctgnnnnnnnnnngcgactctcaaagagaacatcctttttggctcagagatggacgataagcgtttcgacgctgctgtcaaggcctgtgcctgtgagtacagttcatcaggaacgatgtcggctcgatggcagatttaacagctctgatcgttggttctgtacgtttctgttacgtggtcatcattctcaccatgtgttccatctgcgcacggtcaaaagtggagagagatattgcgatgctcaaccatgggatctacaccgagatcggaggtaactcatgctcttgggggcacgctagtgtactagaccggcagtgtgctgacgtccatcttgtttggatcggttgtgtcatgtatgttgctggtggacatcacgattgaatcttgtagaaaaaggaatcaacatatccggtggacagaaggtgagtctgagcgataggcgcagaggatgatatctcatcgacagattcctagttatttcgatacagttggtgggttgatttgcttacaagaccaatgcactctctatcttatcttcttcctaaatcgcatcgactcatccgctcaggcccgagtgtgtctagcccgagctgtgtactgtggcaacgagatcaatttcttcgatgatccggtacgtgcttccttctcaagtcatctgtttgctcaatgtaggcgagagatgttgactgagacgtatcatggggggtctttgccttatctcattttttcggtgatgttcgaacgtgctcgccatatatccggctttgctctgatacaaacaaccttcccgcctgcagctatctgccggtgagtccaatgctgatggcctatactccgtccaagcgattgcagaccgtccttctctggctgaaactcgctgcctttgcatacgttttatcatacgtttccgtgtgtcacagttgatgctcatgtaagcaagtcgctagttgacggcctcgtcaacggaccgttgcggactaaaactcggatcttgatcacccatcacctggaggtgctttcgaaagctgatcttatcatcacggtgagtatattgcctgtctctatgtatgaccaggagtgaggccgagttacggaatgagcgtttctgacgatgacgatgtctttcggtctcgcgtttttgcttactccctctcttatcggcgtccgtttggctcgaatgctgctctggaagatggtcgatggtaaaatcgctgagaaagggacgtatcaagagctactcgcaacaagcggggcgcttgcaaaactcatggcagagcacatgtcggttgcgcatgatggtagttctgagaccgtgactgatccggatttagacatagattctgcagggctcatcgagacgcaagaggatatcgagctcaagaaggttgcgatagaggacgagctcgagaaacaaaccggtgaaggtcgaacgaacgagggtacggctgatgagttggcgaaatcacaggctcctggtgcgcttgtgacgatgaaggaagagcgtgcggtcggagcggtatcttcgaaagtttatacgaggtacataaacagtatgggatctgtctggtgggcgctcgcttgtgagtctgtgagattctgtgtagcacgtagctggcgtgttcttgaccatccgaatctgttactgatgatggctatcttcgatggctgattgatgaagtcatgtcatgcttcatattagctcaggtctgtagagtcctgttctcttgaggtgttttgtgtcggcttcctctctttttctcgtctgactgttctctcgacgatctctcgtcgcgaccactcaggcttccatcgttgggaacaccattttcctcggaaagtggtctgatagctctatcgttggatggtctcagagtgattgtacgtcaagctgtgtcgggattgtacatgtgaagacatcatactgatcaggaaatgcctcttcttaatccttctctctgcgcctgatcctcctctcagatatggggttgtatgctggggttcgcgttctatctttctttcagcnnnnnnnnnnaagtcctcatatcgacctcttcatccatggtttctacccacagctcggtctggcatacactatcttgacttgtaagcattattcatcgggacttgatct

SEQ ID NO: 806 - DNA, 402 bp, Xanthophyllomyces dendrorhous
aaatatgctcacatccaagctggaagattcggaagtgacccgagtgacccagtacacgacgtcgttcgaccggttgcgcgcccttcgctcggtccacttgctcgaaggacccggcggcgagctcaagctgttccagaagctgatggtcactcggatcgatgtcacgaaggatatccagccccagcttgacgtgtttgtcaagatcgtcagcgacatcagaaggatcggtggcgagctcaagcagtttgaccagatcggcggcttcatgcttctccaggcactacctagcacacaaaacgcacagaacatcgtcagcaacatcctcggccaggtcggcaaagatgaactcggaagggacagaccgttgacgctggactatgtcgtcagctccatcagcaaaca

SEQ ID NO: 807 - DNA, 4351 bp, Xanthophyllomyces dendrorhous
  misc_feature (591)..(600): n is a, c, g, or t
gttttgtttgattattatgtttgttttgttctggttatgttttggttttgtttggttcaagttcgttggtgcagaggggaaaagataggaggacggaaggattgcgcgagcaatgccaggtgaacaaagggtgttcagcggttccggtgagggtctacaagggtggagaaagtgggaggatccggggagccaggaggagaattggaggtgaatggagatgtccgatgatggatgggtccttgggcaggatgaggtttgggaatgatgtttccgacaatagaggtggatgtgatggaagatacggaagagtggttcttcagagagtggatcttcggagagtggttcttcggacagagtttggtccagaacgagagagtgagaattcttgcagccgcggagttcgaccaagagcagatgccgtctccttgaccggaagtttagtcaagcgagaggagaagggaggagagcctcaagctggaagcttggaagatattaggggcgcaggcaaggaggctgagtggggacggtactcagtgcgcttgagctctcaagagggaagagatcatgcaatattgcagagggatatgaagnnnnnnnnnngggagccaggaggagaattggaggtgaatggagatgtccgatgatggatgggtccttgggcaggatgaggtttgggaatgatgtttccgacaatagaggtggatgtgatggaagatacggaagagtggttcttcagagagtggatcttcggagagtggttcttcggacagagtttggtccagaacgagagagtgagaattcttgcagccgcggagttcgaccaagagcagatgccgtctccttgaccggaagtttagtcaagcgagaggagaagggaggagagcctcaagctggaagcttggaagatattaggggcgcaggcaaggaggctgagtggggacggtactcagtgcgcttgagctctcaagagggaagagatcatgcaatattgcagagggatatgaagaggttattgaagggaactatgaggatttaacgaggttccaagcttgggggagaaaaggggagatagctaacgactatatggtatatatgtcattcgagatgttagaccaaggaaacacaagcgaacacaagcgaacacaaggaaacacaagcaaccacaagcaagagcgaagagataccaaggaggagctgagagatatcaaggaagaatcaagatataaccaagagagagttaagatgtaccaagagcgagttaagcagtaccaagaggctgttgtaagaatcggtctacattgtgcaaggtcaccctgcgcagatcaaaccaggtcagatcatcacaaacagtttgaaagggtgtttgatcaggagtggctcacatcatatatattgagtatatgttttgtgctgactatcatcgaatcatattactaaatatttgttgtcacaacatcttactcatttcatttactcaaagtttatcagaaaagtattgctaataattagctcaattcagataaagcgcaaaaaaataaatcggtatgaggtctaaaaaacagaacttcccgtgatggcgatacatgaccgaactttggcgcttcagattttcgatgacctatcaacaaccatcatttcataacgccacatatcagttgtgaaaaaaaaattattttgcgaaaacctaggatgattatggtttgataaccttgacgagggtcagacataatctcaattaaaagattgacaaacggttatattgagtgaatatagttgacattccaatgtttggcctcacgaatcatatatattcagctctgtcatactatttttcttcttcaattttattttaaaaactttgatcacaacttgttcgaactcaattgatataacgcaggattttcattctattatcagaaaatgaacatgctctcgtctatatacgtacttctggtcccctatatacaatccttaataagtcatcttctggctagcaattctgtacgagaatagtattgaaaagttcagcgaggtattgcccattgacaagttttgtaactgaacagcattttctcttgaccgctataaatcagcaattttgatatgttcgtgatctatacgagttttgatgcgaaactcattagtatgaatatcatgctctttgtttacgatgttctgctacaaataagaatctctatcgttctcaatttcatacaaacactggatttgtttcatttacgtcatgaataaacaagattgtcatgatttacgtttcaacctctcggaaaagtgtcaagaaatatatagctttgcatgtcactctgattgaagaaggttggtattgttgcgatgatagcctcgtgacgtatgagtgacgatacggctatattctccaatcaagacaatgttctttcgagtaaagataaaaatcgtctgacctcagcgactcctggtctaaagcaaggcttcattttgacgtacgtccggtcttagctcgaagtcaaaaattgagagaatgaaatgacaacataaacttatatccatcgtggaacttgtctctgaggtatctgaactttactcttgcgttgaaatgtcatttgttacgacatatcgtttttgttgaaccattcggcattgtaaaatgaaacatgtttgagcgccgctctcgtgattcgtcattaataacattgtgaaattgaccacattttatggttgacagtttgtcttcgatcgaacattgacattaagtgaaaaacaactacagtcagcacgatagttactgattcctgctcacaactagttatgaagattactatccttatcgagaaatgaacttcatatactttctaggtataaagctgatcgcaaatctttaacgttttctactcaactgcacgaccaatgttcttcgagaagtttcacatcaagctatagacattgcgttattttcattaaatcatgtattcgaggaatgatgattattgaaattttggttgcaaccaaagtttgagtgatgatggatatcgtacgattcatgaatagatttatcaggtcaaactgtacttgtgttgttgacttgttggaaatataaaatctctgacgatcgtgaacattgttattcacaagaaagtcgatagtgaatgtatatggaagaattgtatccttatcatttgttgatggaatgcaaacaggcaagtcaacgagagtacgaagcttcaagtaccatgatgacgggagcaaaaggaatttgacttacaaaagacgtgggcgaagaactacgaattaggacgaattcaaaaatacttttactgcaatagactgtcatttatgcaattgagaaagctaagggcttttaagctttcaatgtatctaaaatgttgagaatgtatgaatcttgtatactgaaaaggaagaaccgttatcaggtgacgaggtaatgagattctattcatggttatcaccgcgtgtgaaaaccaacgttcaacgtcacgacataagagcaggccttatttattcgaagtagagatatgctcatctttgaaacagtatggagtcagtgatgtgtgtcataattcaggcgtcaaagcaaaatgccacgttggaacgttcaaggcaaagtagtagaataaaattagtgattgacaaaaaaaaaaaaaactgtcacgacaggaacgtcaataaaagcaaaaatgaggtaattgggagtacggattgcgtccaacttataagcacagtactctcattctttgttgtgcttcatgcaaagattgaagaacgaaacgggttggagcgtatatagagttgaaagttgaaaacaacataaaaaaaagagattatatataagtcgccggtttaatttatagattacaaaatttcctgttctttatgcagaacagagcaagtcagctatcgataagcacgggatacgaggaaaaaagagaacaaaaaaggaacagataaaaaccagtctcagcacacaaggagttgatgtacaagctgaggaaaagtaaaggaaaaaaagaagaaaagaaaagaaaagagatgataaaacgcatatggatgagaacgccgatagacgatcacaaacacgaagcagaacacaagtacgatgatgagagaaagaataaaaaaacaatgaagagaaaaaccaaaagagaaaatcgaaaaaaaatatataaaaaaacatatagagagaaacagtcacgacggaagaagatgtatgccaatttgtcgactgagacaggataaatcgagtatgaaagaaagcaagtgtaagaaacaagatgacagaattgattcgagaagatggtgccaagaacaccttcaataagggctccgttcgagagagcta

SEQ ID NO: 808 - DNA, 698 bp, Xanthophyllomyces dendrorhous
tgtgcagctgcaacgtgcattgtattacaatgaaagtattcctcgccgtaatgtgaagagccatgagatgattgttcccatatcatggtttttgtccaaagtgttatgtcgttatcatcaagttcagttaactatgctactggatagacttacatcattctatacagcatataacccgtacccttcgatgaacctcgatgtcttttgaagtgcatatattcaatttgaaagttggaaggagattatgaagcccgtaacgtcagtcgtcattcttcttttcaaaaactagttttgctaatagtcggttatcaaccaaaaatatcctggttcatggttcgaattcttgagcaacgttgaaaaacacataatgagttgatttaaatgaattgctcagaaatagaaagcgtgtcgatgttttcaatctgatgaatttcgctcccagattcggtaccggctctccttttccatataaagtaaataaactgatttttggaggctattagatttcggaatgtttcttgtactgttgatcttcaacatggtagagatgaatgatgctgtttgctgccgcgctgaaaagatttgcgatgatatgcactataatgaacgtgctacaagaaatgggctcaaagattgccccatatatgttaagagacctcagaatatttgatcaaatacaggagaggtcatttgttcac

SEQ ID NO: 809 - DNA, 3291 bp, Xanthophyllomyces dendrorhous
  misc_feature (527)..(536): n is a, c, g, or t
  misc_feature (987)..(996): n is a, c, g, or t
  misc_feature (1426)..(1435): n is a, c, g, or t
  misc_feature (1782)..(1795): n is a, c, g, or t
  misc_feature (2537)..(2546): n is a, c, g, or t
  misc_feature (2732)..(2741): n is a, c, g, or t
ctggtgctgttgatgctggtactggtgctggtgcttctcttgctgtcaccgttgctgcttgctgcttgctgcttgctgttcccttttttctgtgcccgtgtcatttttcctttgttccctgttccctgttccctgttccctgttccctgttccctgttccctgttccctgttccctgttccctgttccctgttccctgttccctgttgtacacggctgcactctgtgctcgttccactctgttctggtcgtaccgttctgtcatgctatgtactctcataccgtgtgctctcatgtcgtgttctgtcgtgctatgttgtactctgtgtcacatcatggggtgcaccggtctgtcgggctgcatcgagtgcgctcgcatcgtgctctgttctgcgttgtcatctcgacaccgcctgtctctcgacaccgtcttctcgcacgactcggcccatcgctcatcgcccatctcggtcttccctcggcccatctcgacatgttcaccctcggcctgcttgctgtctctctccnnnnnnnnnnactggtgctggtgcttctcttgctgtcaccgttgctgcttgctgcttgctgttcccttttttctgtgcccgtgtcatttttcctttgttccctgttccctgttccctgttccctgttccctgttccctgttgtacacggctgcactctgtgctcgttccactctgttctggtcgtaccgttctgtcatgctatgtactctcataccgtgtgctctcatgtcgtgttctgtcgtgctatgttgtactctgtgtcacatcatggggtgcaccggtctgtcgggctgcatcgagtgcgctcgcatcgtgctctgttctgcgttgtcatctcgacaccgcctgtctctcgacaccgtcttctcgcacgactcggcccatcgctcatcgcccatctcggtcttccctcggcccatctcgacatgttcaccctcggcctgcttgctgtctctctccnnnnnnnnnntgttccctgttccctgttccctgttgtacacggctgcactctgtgctcgttccactctgttctggtcgtaccgttctgtcatgctatgtactctcataccgtgtgctctcatgtcgtgttctgtcgtgctatgttgtactctgtgtcacatcatggggtgcaccggtctgtcgggctgcatcgagtgcgctcgcatcgtgctctgttctgcgttgtcatctcgacaccgcctgtctctcgacaccgtcttctcgcacgactcggcccatcgctcatcgcccatctcggtcttccctcggcccatctcgacatgttcaccctcggcctgcttgctgtctctctccaggtgtccccaagcggtcagcgcgatagagtatacatcatatctagtacagggtgtgttacagtatatacagtccagtccagctcnnnnnnnnnngggtgtccccaagcggtcagcgcgatagagtatacatcatatctagtacagggtgtgttacagtatatacagtccagtccagctcagcccagctcagcccagctcagcccagctcagcccagctcagcccagctcagcccagcccagtccacagacgactctgctctgtccatctatcctctgccctgctctgctcttctctgccctgctctgctcttctctgccctgctctgctcttctctgccctgctctgctcttctctgctctgtccgtctagttgccaaagccatacagcgttcggccctgtcgcttgagtgcgtacaccacgtccagtgctgtcaccgtcnnnnnnnnnnnnnntcagcccagctcagctcagcccagtccacagacgactctgctctgtccatctatcctctgccctgctctgctcttctctgccctgctctgctcttctctgccctgctctgctcttctctgccctgctctgctcttctctgccctgctctgccctgctctgctctgtccgtctagttgccaaagccatacagcgttcggccctgtcgcttgagtgcgtacaccacgtccagtgctgtcaccgtctttcgcttcgagtgctcggtgtaggtgaccgagtctcggatgacatctggcaaggatgaggcaaggatgaggcaacagatcgaggggtagtcagcatcagcagtactactagcagcagcaacagcaacagcagccacgacggcaacagcaacaacaacagcgacgaccagcagaccaagaaaaagagaacaagaccactcactctcaaggaacagcttgagcacaccccgggtctcctcgtagatgagcccagagatccgcttgactcctcctcgtcgggcaagtcgtcggatcgccggcttggtgatcccctggatgttgtcacggaggatcttgcggtgtcgcttggcgccgccctttccgagtccctgtacgtcagacggccagacaacggcgtcagtctgctgagcgcatcacacaaggcggaagagagagcgggaaagagaagagagcgagggagagagcgagagagcggggaagaaagcgagggagcgcgagnnnnnnnnnnggaggatcttgcggtgtcgcttggcgccgccctttccgagtccctgtacgtcagacggccagacaacggcgtcagtctgctgagcgcatcacacaaggcggaagagagagcgggaaagagaagagagcgagggagagagcgagagagcggggaagaaagcgagggagcgcgagaacagagcgagannnnnnnnnnagagcgagggagagagcgagagagcggggaagaaagcgagggagcgcgagaagcgcgagaacagagcgagatcactgacctttcctccttttcctcgtccggacatgtctgcttgtgtgtgtggtggtgggggtggctgggaagtagagagtaggtggtggagagtaggtggtggagagtaggtggtggagagtgagtggtggagagtgggcgttggtgatgtgcttgatggtgatagagagaaggaaagaacgctgccaccccagactcggtgtcttcttataccgctcagagcatggacacggcgaacagagcaagccggaagaggccgaagaggcaggcgaggcgggcgaggcgaaaagccacgacgcgacttgctcacacgcgtcggcccggagcgcgttcgtctggggctcgtctccgccggacgcgcctgccctggacggtgcctgccctggacgcgtccgaccgatgacgtagcctgcccagacgcgtcgcctcgcctcgtctcgcctcgcgttgcctcgcgttgccttgccctaccctgccc

SEQ ID NO: 810 - DNA, 73007 bp, Xanthophyllomyces dendrorhous
  misc_feature (10723)..(10732): n is a, c, g, or t
  misc_feature (12208)..(12217): n is a, c, g, or t
tgtgtgtgtgtgtgcacagatatgtgttcgcgtactgtgatttattgtgtgatagacaagaacagtctgccgaaaagatcacgtgtgccggaataacctcggacggaagttattcgcccatcaagtatcgaccgatgtttaaaaggcagatcaggcaaacttcatcttatctcgcacttatatccagatagctatcgcttacacttctcttcagtctcgccctccgttgtacgacatacatacagttcgttatgcctctcaacatccatccgcttgataaaggctggtcattcgctcaactccgagagggttcagcttcggacttggccggtgatggtgatctcaagtcaaaaatcgtcggagaatttctagaggtggacagcgtgccgacgtctgttcaggccgagttaatcaggatggggaggctattggatccttacaagtttgtgttcccttcttgaatttacaaatggtctcctttgtatgttggtgagactgataggtcgctgtgattcttgaaacgcaatactagaggaatggcagaatggaacgcgcaatgtacgcatcctttggatggctcatatgatctctcacgtccccttgaccaaacctgatgtgtctcatttcctcatatttcgaagggatcggagaagccgaatgggtgttcaaaacaacgttccaactaacagctgtggatctggcagtagataatttagatcttgtgctcaaaggtctcgatacgttttgtcaagtcttcctcgttcgttccctctttaactactttccctggaacttaatgcttccgtgcgctccaggattttctcttacttgaaacggccttattcattcgagcttatcagaaccacacatcaatccttaaatccactaacatgtttatctcccaccgaatccctgtgaaatccttacttcgcaaaggatccaacgagatttctctcgtattcgataacgcctggtcccgagggaaagtcgaagaagctgcccatggcggaaagagagcagtctggaatggtgattcatctagactatatgttcgaaaggctggctaccactacgagtgggactggggacccaggttgatgaccgttggaccttggaaaccgatcttcttggagagttatggagagaggatcgaggacgtcagagtagactcccatgtcggagagggcttggatgtttcggttgatattaccgtcaagtatgtcttcttgttctctttctctatacaaaatcattcgggttgaaacaacaatattaacttaattttttctcattgcgcacttatcatcatttttttgcccgctggtcgatgtggaattaggacggaaggcaacaaaccagagctactcattattctcttaagaaacgaccagggcaagattgtcaaatctgaacaggtccctgtcggaactgacaaaatctcatggaagtttagaaaaggcgagattgaactttggtgaggtcattctatcctctttgcatcgtaatttcttcgcgtttcattcttcgatacaaacattaaacgagattgctcgttggactggtcatatgaatgatcaggtaccctgtcggatatggaaaacaaactaggtataccgtagaggtcaacctcatcggatcagtgcggttcttgttactttttgaccctaccaacatacagcgtaagactgagcgggttccaaactttggtttcaaaagaaaacttctgtaccctcggatactcgaatcactagaatcggatttaggaggagcttgcttgttgaagaaccacttgaaggtcaacctgggacttcattcttgttcgaagtgaacaacgtccggatctttatcggcggtcagtctctataattttatctcgattcaggcagtgggtcattgggagggttaaataacgaaatacaaaattgtgtcactcataatcaggtgcaaactggatcccggccgacaacttcttgacaaacatctcggatgagaggtaccggcaatggctacaactcttggtagacgcgaacatgaatatgatccgagtttggggaggggggatttatggtaggcgcttcattcttcttgtaaaagccttctgggattgcctaacgaaataagtctttctcatttgtagagcccgatgtattctacgatacgtgtgatgatcttggaattcttgtttggcaagacttcctgtttggttgtgggttgtaccctgcgcacgatgagttcgcggagagcgtcagagtcgaagcggagcaagcagtgatccggctaagagaccatccctctctcattgtttgggtaagaatagttttcctgaaaccacatgaggaaacccctagccaggtctcacgagctcttctcttggctgttccattgttgtcatataggctggtaacaacgaggactacgcgattgcggaggagaaaggaatctcgtatgccgaagaacctgaagatcttcggaaagacactctcttcccggctcgatacctttatgaacgtgttctcccaaaagctgtcagccggttctcatccaatacggcttacagaagaggttgcccttggggaggcgctttacagtccgatcagactgtaggtgatactcatatgtggaacatgtggcatgggaagcaggagcccttctctaaattggaaggtcttgcgagtaggtttgtttcagaatttggaatggaaggtaagttcgatcagggtcttctctttatctgggtgatagtagcatttacgacaaaagaaagatcgtgagaactgatcatcgacgagggaacctccatgcatatctcaggcgctcctaacatccgtaggttgcattccgaacagtggcttggacctagcgcagagatctagaccttacttacttcgtcgtacttgtgctaattatctttcagggacggtcgactactggttggatggccgtaccgatcaacgattcccccaatcaaggtctgttgttctttatcaccacaaaatataagaaatcttgcctacatctgttgatctctaattcatgttgtgttggggtttcttttagaattaacgatcagcacaacaaagcagacggctttgagcgccgaattgcttgttatctgattgagaactacaggatgaacacatacgacatggaagagtacgttgctcggtcctctcttattgtcctctatttcttacgtataagcatctgactcacttcaatattaatttcttggttgcattagttacgtgtattatacccaagtgatgcagtcagaggcgcttgcaaccgcctatcgtgtctggagaagaaattggaaagggtacatctaatcatattttctgtgacttggccactacccaggtgatctgacttcgatcccccttttgttgattgtagacgaggcaaggagtatacctctggggctctagtttggcagctaaatgattgctggtttgtgtctaatttcttcttgtttttattcttcgtctttattcttcagttgatatgatcgttctaataatacacattgattgtgctctcgtgaataggccgacaacatcgtgggccatcgtcgactatttcctccggcctaaacccgcttacttcacaatcaagcgagagttggcgccttacagtgagccattcttatccttttctccctcaagagagtacttagtttgatctgttttctcgtcaattgactctttgatgatgcgttgcagctgtggggactgctagagaggagattactacgtttgcagacaaaatcactagcgcaaaccgggagattaagcaacatactgagatatgtatgtcttctcctgaattatgttctctcgttatctctttgaagtgatcatttactcatctatcaatcttggttggatattcctaaggggggaccaactcaacgcttgagtccaagaacataacactcgaaatccaagcgttcgacttaacaggaaatcttatccattcctcaactcaatcagccactctgtcgcccaactcttcaaccgagctttatcgaggggttgttcctggccagaaaatccgaagatctcagggtgaagaagctgaggtcatcattgtcggcgccaagatatttgatgacgacaagaatgtgctggctcggttctgtcagttgatcctttcccaaaaaaacatttcttattcttctgcgattgctgaccagactgacccggattttttcttctttgtttcattcttgggcgcctttgacccaaataggtgactggccggtaccgtataaatacatcgtctacccagacagttataacccggttcagataaagtcccatgaatcctctatctccgtatccacctccttgcctgtcaaaggagtcgtgttcgatgttgattctgagaaggagggtgaagctgaagtcagttggggtgatcaagcgcttgatttgcttcctggagatgagatcactgttgaggctaagggattgaacggaagaaaggtaaacgtcagattcatcggtgaccgatcttgaattcttatttgtccgccatattcttgtggtctgtaattccgcttcttaaatctactgttcgttgtatgtatctgtgtaaaattcttgttcctagttcgtttgtctctgattgttattcaaaacacatgctatgctttcgttctacgggtctttttatctcgattcaactgattcagacgaaaagcaatcatgatcctcacacaaatgtacaaaccaacatgaaaaatcgcaagccaagatcaaatctagtgagaggtataaggctcgaccttgtacatgccacctgctgaagagtcaaccttgatatcctcctctccactgtaaaataataaaggagaaaggcgcttgcagttaggcaccagaagattaaagattgagatgagagataagaagatactagatggaaaacgtactaaatcctcttggtctcgaacatctacggttgtgcaaggaagaaagaacataactggtcagacctcttccctgaaacagagagagaagtcagtgttgatttgaaaaaagacttacggtcgtcgatacggggatctcgaacccagaagtagcgtccgataggttgatcttgattcccttctctccagctacaggcgtcttagtgggagcagcagccttcttcaccttcttctcgccttcggcggcggcagcggcagccttcttagcagcctccttagccttctttccagatccagcggctcctcctccagaaacaaccttggtggttttgtccttggccgccttagccaataccgccttgttctccacactagccgctcttccatcaggaatcaagatgaacgacctgggggaaccatcagagccgtcggaatcacagatgtagtatccctttcgctcgaactgaatcgtatctcccttccggacgttgtcgaccacgtttcgatcggccaaggcggattctttaaactcggtgatagtcgaaacaaagtcgtcgaccttgtcgtcctcctcaagcttcttcttgttaatcaggtaatcgtagtcgatcaatgtgacgggcaaaagctcgttggtggaagacgaggcagagagccaagtcaccttcttcttggtcttcttgaaatcaccctcgagatggagctccatcttgagaccggtgacgacaccctcgggagagacggtcttcgatcggacaaaggcatttccccagtccatcaaggtcacctcctcgttgtcatcgaaggaggcggcatcagtctgctcgactaaaatgctggaagagtagacggtgctcttgtttccaagatcagcattcttcttatgctttgggacaggcttgacctgctcctcagcaggtccaccaacgatctcaaccttgacgaggtccttctcaaccagagcccagtatcgaggaacaacagggtcgatcgtcttcttgttaattgtccagattccgtcccattcgagagtcatgttggactgggaagcaccctgggagatgatgtactctttgagggcatcaacggtcaaccctcttcgtcgaattcctcgaacagtggggaaccgaggatcatcccatcctccgacgtgcccctcgttgacgaaccagtgaagctttcgcttagagagaagggtgtacacaaagttcagccgagagaaatcccagatgtggggctttcgcagcttgagagcgtcaatgaaccagaagtattgcgggtttcggtctcggtactcgtttgttcggagcgcgtgggttacaccctccaaagaatcgactacaggacaggcaaaatcgtacgtcgggtaagacaggtacttggttccagttcggtgatggggctgaacaacacatcggtagatgacggtatctctcatagccttattcgggtcatccacactcatcttggctcggaggcaccacttctgaccctcctcagtacccttagtcatctcgtcgaacttggccaagttctcctcgacagaaaggtttcgtcgggcagaggcaattccgtgcattcgctcgtctcgcatctaaagaacaagacaccaaacaaccatgggaaacatggcgcgcaatcataacatgatttagattgagacagaaaacatcgctggtaaagacccgaagaatgttgaaagaggaagaaaactctcctcacctgaagctgaggcgtatcatcacagtaggcattgccttctttgatcaactggatagcgagactgtgaagcaaatcgaagtgatcggatgtgtgggaaacggagtcgaacttgatgcctagaagctcaagatcaaccttaatggagtcttcgaactctgactagagacgtcagccgaccagataacgagattacagactagtcagttcatgatcggatgtctagaacagaatctgttttttgcatatcttagtcgagagagacaaaccttctccttcatgggattagtatcgtcaaatcggagaatcatctttccgttgtacttgtcagcgaagaatcgattaaggagagcagccttggagtgtccaatgtggaggtagccactgggctcaggagctatgatgaaccaaacattggcgttttagataaacataaagaccgcaagaagtgatgtatcatgaagtgacctccaatgacttgataagaagttacggagaagattggaggaatgactcacggaatcgagtaacgacctgtccgtcgaacgcatcgggcaaatccaacgagatatctgccttcttagccgtaccctgtgttttcgtgatacatgtacccatttccgatcgaatgtgaagatgtcaagatgtcagctaaggatcttcactctgcttgaattcttaagagatacatcgagacgaaccttatcagccttggcctccgacaatgctcccacgcccgacaacgttgaaggcaactgatcaacgtagttgaaccacctgccaaggtggacgtggaggttcttcctgatgattccaatagcgggcaagttggacttgatagatccgtagacttcgaagtcttttgcgcttaattgagcccctccgaagaaggtcctgtacgtcatttaggcgcagatatattcggttcaatttcactcaagacgaaagagataacgacaagacgaatgtgtgagactaacctgagagcaagccagtcatcgagggtatcgaaaatcttggtgacttgaacaaatggaacggtagatgtcaaaggggtaggaaggacagggaaagcagtctaccaagaggaatatgatgataggaaagagcccagtccatagaaaaaaggatggaagaaaacagaagaacgatttcaagttgagttcgcttttagcaagtgtttttttacctgctagtctccattttcaccggcttccgtcgaaagcgtaatgatagaacgaacctcctttccagcaaaagctccagccagggcatcgagcacctgagcggaaccttcgacctgctttccgtcaaacgagagctttccatctcgctcccattcgatcttgacgtctccttgaaggtccttctgggtgttcaagtagaatgctccagccagagcgccaaacgggaaaggagaggcggtctgcgagagtgtgagagaatgtgtgctcataatagttgtatgcagatcgtgtaaagacaacggagggggtggtaggtgtaggaatggtgaggtcgtgaggtcgtgagccggtaaaaaggcgccaatcttttttgctctgtcgttaccatgacaacgctttttcttgcagcactcttcaccaatcgatcagagataatgatgtttctagaggagcttctgcgctgtatttagactgaacaacttccgtctgatcgtatgtagtatgatgagaaggaagaggaaatactatctacgagatgatgtctacaatccgcccatagcgcctccagacaaatcagcgctcatgaatcagagtgctcgtctgtccctcctgatcattccgccagtcatctgtgacgaccggcgtcggccgagttctgaatcaatcaagctcatccctatgatgaactcttgcctgttgagagatccttgcttattcaggtcggttgattccctgttttatgcaagcgcaaacacgtagaattgtccttagctaatgcgacgattacgagaacgtggaaggagaaaagagagaagtacacttaccagattctctgcagtgtttctttttctaatcggctcttttcccatatacccttgactaccgcacctactagtctcccttctctttctctctccgccagtttctcatcttccgtcttttggtctgtattgaccacctcaggccgcctccacccttgttgttcgctattcctcctttccagttgtgctctcattttcccaaccttttggagagcaatcagcttagtgaacagcttgttgtacctctcctttgacacttcttctcttcctctttcttcctttgagcttggcacactcatatcggtagttgaaaacggggtcgaggatttatagtaggtggctcgaggcccacgctgtgtcttgtcgggagaactacaaggtgacgacaagatcgatgggagggctcctgattgtgatgagtcttgcttgggagaggaggacaaaggaaggggtggtggtggtggggcgcgtctgctaacggatgacgatgtactagttgacgaagtcgaaacagattccgaaggtttcaacggaagagccgtcggcagtgtcggcttccgagcaggtagtggcggcggctgagacaaattcgatattacggatctcacagaagatggggaactaacaggggattgtatcggtggcggtggcttcctgtaggaagatgggacaggacggaatgtaggttgttcatctcggagctttatcgactggagctcagctgtcggtggctccttgaagctatctgtcgtggaagatcgaggtgggagagatggtttcctgtccggcaaggaaggaggagaatctttgacaacgggacgtgcaacgagcggtggctggacagcacgcgagatgaaagattcagaagtgaccctctcgacctgaacagaaggtcgtgttatcgtagacgtagcacttttgaggttgacaggcttaggagctaaagccggtggtttcgggcggcttatacctgatactggtagcggaacactggatttagacgtctcgggcgaagatttggagggaagtggaattgaactgccggaaggcgaggcaggtagattgaaacgctgagccaaaggcgacagctgatcagccgagtatagtgagaggacttctgagggccctagtcgaggcgacgattttgtacttaaccgagcaccgacttgctgcccatttaatgtcatcttgacaggcgacctcgacctgtctgatgcgttgtcttgagggtttgaagaagtcgcgctagtggttcgtttgataggagaaggtttttctcgaccgttcaaactgtctgttggccgatcgtttgacttcccaaaaatgtccgcaccaggttgtagggctgtagcatttgagctggcgaaggaaccagtgctggaagcccgatggcgagctgcggcctggacagatccttgtgtcaacgcctgtagagagatattcggctgacttgatgtaggagctggagaagaaggcaaactagaagacggagtagcctgagcagctggttggttggactcaaaagctgctattcgatttttgattgatcccatggagaagattgaagatcccgagagagagagagaagagaaagagtagccagagctcgtaggaaaacagtgatcagggtggtattttggagatgtacaagatatcaagctagtttgagatgatatatccatattcacacacgggtaagatatgaagaacagacatcagccaagtctgtatacgaccatgaggaaggagagaggacaactaggtatgagaagagaaaggcgagcaaggaagagaccgctcaaacgcttacttgcttgcaagcccacggcgcaaagaggtaaactatcctactagccggtaaacacacccagatgcaaagatttatctgacagaccagagaatctatgctaaacaactacacgagtcgagaccggacgactgtccagagaaaggaatacaagaggatgtgatggtcggaggtgggtggtgtgttgtgcgttcgcgtcgtcagttacaaacgggtaaccccgtacgcgtgttccttctgatcagaaaccatcatcatnnnnnnnnnnctgcaacctcgtctgtacgggtagcccatgagtgtcatcaaccagaacccctctctttcgtctcctccacaaatgcctaagcatacaccaagacctaaacagaccccgaagatccggaaacctaatcagagcaagacccttcgtggccgaccgacggatccaccgcatactcggctatcaaagactttggcttacttacttcgacatggtgccgagaaggaaggcctaggaattagaccggacggttatctcccggtcaatgaacttgtttgtctctccgtatttctagcttggctcggctccagatagccgtgtgtgtagataagctaatatatagatatctatttgggtcttaccttcttggccggtcttacttatggtccaaaccaaagggtagattgcgcatcctgcgctcgccttgaacggtgttacgttcgagtccatccgacagattgtcttggacgacgtgaagactcgatatgctctaatcttcgctaaaatctatcctcatcggcggaggcgacgacgccggtaccactagaggagagggatccattggccgacgggcaggatgggcgttggtggatccgagcgaaccaaggatattcattagaaatgaaagagttagagaaagacatgcgaattgtcactactgtcgaccaggccggactagccgttcatgggacggacgagaaactctggaatgctatctgtgcgtctgttccgttttgacgtcgacatgtttggaatgcacgtatgtgtggatattgagcttatatgcgtcgaatgttttggataatcagacgaacaaggtctttccaagataacccggcagcatattcacttggcgctcgccttgccttcccaaagtctccttcgacgatttcatcagaggcaggttcgaatcaggagagctcggatcccggcttaggatctggtccagtgcaaaagatcacttctggaattcgtccttcggcaaatctttacatctatatagatgtacctcttctcctatctggtgagctttcttgttcttgtaattaaccttggtagaagagtgtgacgcaaagaattggtcaaatggactgattgtcttggattgaccgcttccagaaaacgttcctctattcctttcggacaacaatgtcttgctaactcctggagaccctgtcacaccagggattctacctagaaaatattttctccgggccgtccggaggaatggggaaattgtatgggaacgacctaaatgataatgatttgtgtttgtgtagattctttcaagcagaggagtttgtccaggtcagctgtatctcgacctgatggcaaagcaaccaaacggctgagatatgaacgaaattaagatgtacagcgtcacgagttctttgcttatatgttttcatagtcttaacgtaatcgagattgaaatatagtaagaaaatcattgaatagaaatacatcattaagcctatgatnnnnnnnnnntgtgatggtcggaggtgggtggtgtgttgtgcgttcgcgtcgtcagttacaaacgggtaaccccgtacgcgttccttttgatcagaaaccatcatcatctgcaacctcgtctacacggatagctcatgagtgtcatcaatcaaaacccctcccctttgtctcctccgcagaatcctaagcagacaccaagacctaaacacactccgaaggtccggaaacctaatcagagcaagacccttcgtggccgaccgacggatccaccgcatactcggctatcaaagaccttggcttacttacttcgacatggtgccgagaaggaaggcctaggaattagaccggacggttacctcccggtcaatgagcttgtttgtctcttcgtatttctagcttggcccggttccagatggctgtacgtgtagataagctgatatatggatatctatttgggccttacctttttggccggttctacatatggttcaaaccaaagggtagattgcgcatcctgcgctcgccttgaatagtgttacgttcgagtccatccgacagattgtcttggacgatgtgaagactcgatatgctctaatcttcgctcaagacatatcctcatcagcggaggcgacgacgctggtaccactggaggagagggacccaatggccgacgagcaggatgggcgttggtggatccgagcgaaccaaggacattcattagaaatgaaagagttagagaaagacatgcgaattgtcactactgtcgaccaggccggactagccgttcatgggacggacgagaaactctggaatgctatctgtgcgtctgttccgttttgacgtcgacatgtttggaatgcacgtatgtgtggatattgagcttatatgcgtcgaatgttttggataaacagacgaacaaggtctttccaagatgacccggcagcatattcacttggcgctcgccttgccttcccaaaagtctccttcgacgatttcatcagaggcaggttcgaatcaggagagctcggatcccggcttaggatctggtccagtgcaaaagatcacttctggaattcgtccttcggcaaatctttacatctatatagatgtacctcttctcctatctggtgagctttcttgttcttgtaattaaccttggtagaagagtgtgacgcaaagaattggtcaaatggactgattgtcttggattgaccgcttccagaaaacgttcctctattcctttcggacaacaatgtcttgctaactccgggagaccctgtcacaccagggattctacctaggaaatactttctccgggccatccggaagaacggggagatcgtatgggaacgacctaaatgataatgatttgtgtttgtgtagattctttcatgcggagagaagtttgtccaaatcagctgtatctcgacctgatggtaaagcaaccaaacggctgagatgtgaacgaaattaagatgtacagcgtcacaagttctttgcctttttattttcgtagtctccacataataaagattgaaatatagtaagaaagtcattgaataggaacacaacattgagcctatgattgttcacaacacaacataacaaggaaaacatgtcagtattgtttctaaaccaagcaggattcgacattgttgagagcgaggatagggtaggtgaatcagaaaagtcgaatatcgtcaacgctccgcccaatctataaaccagagacccctttcggagcaactggagaccgaacggaactcgaagaagaggtgccagagagcaggtcgcagaagagcaacactcgtcatttaaaacggaggtgatttagagatgttgggcttgaaaattgaagacttacgtcaagacacagcgagagaactgatagggatgggtgtgcgatagaacgaaaagacatgaagttgtgggctgaatttatatacgtgcttatataatcaatcagggccggtttgcaatacgtacgagcctcaggactggtgagaataaccctaaccgatggtgatcgacatgtggcccttctggatttaaataccctcagaccatagacaaccagatcccatgtactacggatttggtttgtgttaggcgcgtgagctgtacaggtgattagctagctatagggtgtgcactatgctatggatgagaaaggatgcccaggttgtgtatgactctcaaactacagaggtactgagcaaaggcagtatgcccacgatacaacccacaccgaatagccacaaggaagaagagatcactggatgtattaggagcgcatgcgctgtgtgactatgagttgtggcagaggatctgtgagtccctggttacagacgtgtaacgccatagttacatccaaatacctataagaagtcgccctgcctccgacagggaaaccttatttttcttcaactgttcagcaacacgtaataaccctgctcgccggctttcctttcaacgggggagaactcaatggtggcgtcgggtcgctagtggatgcgagaaggagaccaacgttcatcatcaccaaatcgacgattttcttcttgaagaacgaacgccgaggcggtaaagaatgttgggatatctcttgaattatccaagtttgtttcgagtgtgggacattttatatgatgcgacaaggatatcaagaacgttgacaaaggatccaagctcacgagactatgctatggatgagaaaggatgcctaggttgtgtacgactttcaaactacagagatactgaacaaagacagtgtgcccatgatgcagaccacacggaagggccacaagcaagaacagatcactggatgtgttaggagcatcgacaggaacgagcgttgataggtgttcagctgtcaaagggaggttcgcagacacagccggttgagttcagggcggaactcgagcaggcacacaagcgatcgacatcttgccctgatgacgttctctcaagcatctccagccaccacgagagaggaagtatctgagttcacagacagagagaggaagctgacggtgcctcgctgttcctatatctctttgcctctttggtgcttgctctcagacttggtgaaacagagatgtaaatgcgccgcgcaacatactgcacttgtcccttcaccgggaagagaacccgggaagagaatgctggtacttgacaatcctatcgccgctgctctgatcactgaagctgaggctggtgacgttgaggtgatttgtgctctaagagcactccagtccaaaagggccatgtatcgaccaccatcggtggagatcactctcaccatgccttaggggcataggaaataagacaatcgaaataaagtcacgtgaccctcgacgcaaaccgaccctgacgaagacgcacggacccttgctcctcgaccgcttgggcgaaaattcctggacatttttcctcctttttctccttttctctttttcccaccaagccgtcaagatgtccgcctcccacgccgcctccatctccaagaagcgaaagttcgttgccgacggagttttccaggccgagatcaacgagttcttcactcgagagctcgccgaggaaggttactctggatgtgaggtccgagttacccacgccaggactgaggtttgtgctcttgagttttttttcttctctgtatgtgacccaactgacaacctgtattctttttctgtttttctctcttcgatacagatcatcatccgagccacccacacccaggaggtcctcggagagaagggacgacgaatccgagagcttactgctcttgtccagaagcgattcaaggtgggaatttttccctctcttttcgcccgatcgatcggcgtgtagtactagaatacgagaacagtggaaagtttgacaataagaaaacgtacttacgattcttcctctgttgaattctacttagttccccgagaactctctcgagctttacgccgagaaggttcaggctcgaggactttccgccgtcgctcaggccgagtccctccgatacaagcttcttggaggacttgccgtccgacgagcctgctacggagtccttcgattcgttatggagtctggagctaagggttgcgaggttgttgtctccggtaagctgcgagctgcccgagccaagtccatgaaggttagtctttaccttagcttcttttgtattgcgggcgtcacacgagcagcttcttaccgattggctttctttcctttgctcctgctcttcatagttcaccgatggtttcatgatccactctggtcagcccgctcgagacttcgttgactctgccgtccgacacgtcctcctccgacagggagttttgggtatcaaggtcaagatcatgaaggcttgggatcccgaaggcaagctcggacccaagaagccccttcctgatgcggttcacatcctcgagcccaaggaggaggcccccgtcaacatctcttccgagtcccgaaacgctccccccgcccctgccgcacaggaggccgcccctgctgctgaggctgctgaggagccctcccccgctgaggctgctgagcagaccgctgagcccgctggcgagtggtaaattactctttagtagagtgatttattgatttttctgtgcaccactaccatctctcagagcttctttatttctatagtgttcgagaatttcatggtctcccacgacacaacacacatttcacataacgttattctcttttgattttcaaaccttcacgatgtctacggtcttttccactcttccgtgttattcttttccgttaacaaaagcgaactctgcagtaaacacatcgtaagaaagccagatgtatccaacataagacccaggaaagacacgtcaaacggaactggcaaaagaactttggaaacgccctatggatgagatgcaggaacgcgaaacaaagctctcttctcctgttcattccttactcttgtattgatagacactggcgagcccagcgaggaaggccaagagagatcgacagagtgaaagatccagatcttgctcttcttcttctcctttaatatccgactttctcactttcgcctgttcgtctatccggagaagtctctctcacaaacggattgtacggaccagaaaacgaatgaacgaacgaatgaatgagtggatttagctttcaatagacatacttcgatcaaacgctcagatgtttgcgcaacaagtcacctctcatgtgtgctccatttgtacgtgttttctgttcctttctttctcttcaaagtagacgacgaggaaggatatgcagaaccgacaaagtttaccaatacattaaagaagagaccaaacaaacaaaacgaactctccttcctcttctttctcctcgcctccaagcaaagaggaagtcaaaaagaaagacctagagggatggaggtctctaaagatgaaggatttagtattctccgagcttgatatcgtgcacaccgtccttgtctaccaggcgaactctcacttctcccaggtccaccacaagtcctattgtgttccgtttcgttttgttttgccatcatcagccaagccacaatcattagctttccagacatatccttagaagcggagatcagaatgaaagagggagggcgagaagaatgacatacgcttcttgacctcgttcaaacacatcttgagaacttccacgcctctctccctctccatctcttcttcccaatgagcatctagcgtagcgagcgcaaagtatgcaccatatccatgagcggcatagggcacagtggcaagcgtgcctagataatcaatccaatgaagatgaggcttcccgcttgggacgtcgaatccaccaagaaggagattgacagagtatgggtttcgagatcggagagattgagcaagagaccgacgaatccatgaggcggctgatgccggtcggagttcggcgtgggttcttaattgtgatcaaaaggatagcgtgtagaggaacgttctttcagatgtcagtatgacaaagacaaatgcatcaggtcaaatatgcaacagaaaccagacgaaccgcatatgatgaagtcgaatattcctctcaacaaactctgcgaattgaattgtatcacctaacaaaaccaccaacagagaaaaatcgcgatccaacatgagagcagagtgtaaatatttagccatgagaacactaatcgtgattcctcccaatcaaccaagtacgaatgaaattcaaagtggataggacccgaaagagaaagggatatgtgagacatacctggctctccactgtatgccatcagtagatgcggactgagcgtcttgatcttgtcctcatcagatttcatcttgacgactgattcgatcgttcagatttcgtacgttccccaaagtgcaagagatagatgatcaaagagatcatcagctagccgtcttgatgaaggaacagaggagatcttcttttgaggttcatcagaagagaggaggacgaaatagaaacttgaacgaacttgatctggaagctgtcgagtccgaagcgatgagaacatagtcttttccaatgataccaaacgagcactcttcattcaggaaagatccgtgtcacatatcgaccgttcatttatttacccatccatcaattggacgcacacacgagaaattgagaagacacacaattgtcagttcaacagaccatcgaaaccaggaaagatgtcgcaaaactctgtagatttgataggcaacgtacccatgatgatgtataggttgagttaaagagggtatctttcgagtcagagtgatgtatacctcgagatgatggtcggtaagtaggaaagcgagcggcagagatgggatggaaagaatgtgagtgtagagaagacgtggagatttaaccctaacaattcttaattctgccacagtgttttccatccgtcgacgcttcatcctgggcgtatcgaagaggacggaacctcagcatttgtttggtttgattcgaagtttcttgtgtatgatataaacagggaagttctcagtgacaaataagagcaggtttccgtctggagcaatatggttgcatgtatgatcttctcatgacgaaatgaaagtatcaggttcaggtttttgccagggaaatcaagaaaagggagaagagcatgatcatctgtcttgcttctgcctctttcatctacaaagataccaagctcctctctcaaagacatatgacgaaacctatccagccgttcctccacacatccatggcttgagtctcttttttcagtttctacttagtggtggagtatttgaaagagattttaaagagtctgttttagtggttcttcttcctctccgtccttgggtttctcttcggtcgactcggtgttgttcaaaggaggtttcttgtccgaatctgaggaggatgcagaggaggggtctggagtcgtatgtagtcagaggcaaagatcacccgacaggagagatacaacgaaagaaagacaaaagagaaagaacgaacgtgagtggaggttgtcttggggtttcttgcaatgaagacagagaaataaagaggtgccagagtagagagaggacaggaaaagaaaatggaaaggggaatgatctctcagggagtcgggtatgaatgtagaaagcgatgaaggagagacagagaagagggaggagaatgtcgaaaagagaaaggaagcgctctgggttttctctatttctttccctccaaccaatcggccactcgacctgctacctttcctacccatccggaagattcttcagctgtcttctgagaagatgaagattgatccctagctgacgatccactcgatccagcgtttgctgaagaagacgacggtgatgatgacgagccgcgagacgaaggggaagaagtcgacgagaaaggctcggattgaggctgagaatacttacctgtggaagatgaagacgaagttgaagtagttgggttgggcgtaggagatggggtgggtttcgaagagttgtatgacgccttagtagaagaaggtaatgtctcggcgtatgcttccaagatcgctcgttggttggcggtgagagacctgaaagagaaagagaacacaaacccggttagttggttagttatctatataatctcaaggagaaacaagagcgggctctgcttacctaggaacctcaaggtgataactgacgacgagatcacctcgctttccacttctcgacaaagcgctgactacacctttgttgctcaagacaacttcctctccatgttgtgttccactatgcaccctaagctcgacatctccctcaagcgtcgggaccttggctcgaccacctagcaaagcgacgtggactggaatctttgcgacgtgatgaaggtggttaccctgtcgacggaaaatgtttgatggtcggacggaaactcggatgataagatcaccggcagggccgctaccagaaagaggaaggtcaccggcagcggtcattcgaagttgcatgtcgttctcaacacctgccagagaaagagaagaagatattggtaagaattcttcgatagaaacatacaagatatccaaagagaaacaaaagaattgtcaactgaccagctgggacagacacgttctggacctttttgactctcatctttccggttcctccacagcctccacaacccttaccaggtggaatgaccgaaccagcgccaccacaatctgggcaagtgctcttcattgcgaagccactctggataacaaacgtctttgcacccgttcctccgcaacctccgcactgcgttctctttgccccggccttcattccgtttcctttgcacgttccacattctaccaccgggttggtcgtcaccgtctttgtcgttccctgacaggactccataaagtcgatcacaatcgaagtctcgagatcgtctcctttgattggtcgaccgctgggtccacctcgtcctccaccggaacctccgcctccaaagttaccgaatagagattcgaacaagtcggcagttccacctctacccataccggcaccgaaggaaccgctgaagtcttggaaacctccgaacccaccgaatgggttacctccggctccaccagatggatcgaacgaaggatcctgagaggcagaaccgtaggtatcgaacgccgcacgtttcttgtcatccgagagaagctttagaatgacgaacgatgtcaaactttgtcagtatagaaagcaaggcttacacgaaagaaaaatgaggatgagaaaagaacctacatcgtacgccgcctgaatttctacaaacttctccttggcgcccttctctttgttttggtcgggatggtactttttggcaagctggaagaaagtatatcattgatcattgaatgagagagaaagcaacgatgggtgagttgactttccttaccctgtgaaaagagtgaacagcaagagagtcgggagaagtcccgatagaaaagaacgcacttggtagtagctcttcttaatatctcctacacttgctttcttatcaaccccaagaacgtcataagggttcttggctgccagttgaggtctcgacgaatggaaagacctctaaaagacataaagaaaaaaatgggaaggggaacaaggagcaaacaccatggtcagtatttgtgatcgaaaagaaaagattgatgcatgtgagaaacggactttgaaggatggtcctctgacagaggagctagatcgagctttgttggaaatcggccggaaagaagagtgaatggaggaaggaccggaggtgtacgaccgagtggatgagtaggcgcgaatggaattagcggcaacgaccgaggacggcttgaagagccgggcgtaaggcgccaaacaaatggaggccatcgcgaataagcaaaactaagcaacaaaggagtaagagagctgagagagtggtgagctagaagcagtgaacgctgagttgctatgaatgcgagcgtgcgtatacgagtagagaggtgttgctcctgatgaatgcgatagaaggtgttggctgcctgatgggctttggagaaaaatctagaaaaatcaaggtatttgaaaatcaattatgtattcaaattacttgtcctccttcttaaccagacctctccttctcacaatcgtccatcatcgccttggatgttttctgcgctattcgttcgttcgtacgcatctggaagggctttcttctggaggagatcttcaagttgtcgcagtgcggttcatccactgacggaagagagtagacagcgagacagaaagaaggaatatagctggtcatgaactctagtccagccgattcaaataatattcaaatacccaggcggcctcgttcaaacgggatttcctgttcggctgcctccgtcttttccggcctatctttttttccttgctcttttcttacgctgaacatacacacacacacactctccctcttaaagaccgctctcttcccctcataatcttggatcaatcatgtcgacctctgagtctacgaagaagactacgttcgttcttgggtccagacggtctccactcgcgctcgcccagacggatcttgttaaggaggctctacagaaattatatccggattattcatttcccattgtcaagatggagacagcaggagatctaaaccagtgagtattttagtgtgtagagatttctgtagatcaactctcacaaaaattatctgttgctccaatatccgtatcgtcaaaatttgctctcgaatcacccaggactcaggcgctgtctacgttggcgacgttgcccggaggaaaaggtctctggacggaggatcttgaagcaaagcttatccgagacgaaattgatatcgtggttcactctttgaaggatatccctacggttctcgctcccgagtttgagctggcggcagtgatggatcgagcaagtccgtttgacgcgttgattgtcaaaaaaggatctccttacaagtcgctgggtgatctgccagatggcgcggtggtaggaactagctcgatcagaagggtcgctcagttgagcagaaacttcccgaagctgaagttcagggatttggtacgttcttttctttgttcattttctatgccctttcttctcttttctttgtttgttgtcttgttcggaaacttatacggacttgcccttgttcaattcctattggctataattctcagaggggaaacctgtcagtcgtgtcatttccatgtttcacttgttttacaccttgagactaatttttttttgtctgtctttcaatatatgcacagtggaacgcggttccgaaagttggatgagcctgaatccttcgcagatcaaccggcgtacgccgatttgactgtcaaccctttagacgccatgatcctcgctcaagctggtctcgatcgactagatctgtccgcccgatccacctcgttgatcactcctcccgaactctattacgcggtcggacaaggcgcgcttggaatcgagatacggtcgaacgactcagtcactagagagatcttgtcggatgtttgccattggcagacctggtacagaattgcttccgagcgaggatgtcttcgaacgctggaagggggttgctccgttcctgtcggtgtggaatccttcctgatggagactgacggtggagagggaaagcagggtaaattaacgctgacgggaacagtgacgagcgtagacggttcgaagcatgtgtcattcaagttggccgatcaggtggttagctcatttgaacaggccgaacaggtcggtgtgaaggtggccgagggtctgattgagcgaggtgccggtggaattctgaaggaaatcgaggcaaacaagcaggctagcttggcttcaaagtgattcaagcggcttaaaagatcgaatatgtatatatatagagagagaaggaaaagaatagataacttcatggaataaaacagactctttctcgtgctgagggcttaactcatagagatgtttatatcttattgtctcgagcgtgaatctgttggcaactgtgtagtagtactgcaagaccaactaatctttaaagctagggttaacgtcgaaaggcaagctgttatgtcttcctctatatcgtttatcttctcactccttgcgacacccaatcggatgagatcgtccgagagaggaaagaacggatgggcaagcaacccagccgaatcccgatgtccaaccgatgagagacacaatgacgtttgtgttttgggttgagtgtgtgttctcaccaaactgtgtatcaagaggcagagcattcaaggctgatgagggtctaaagactctcgatctgcttagtcagctcatcggccgcccatcgatcggcatctgtttaatgaccaacgcgtcatatatggcgcgtcaacacgcgcccacacgcgccgcgggacgtgttttcacgcgatctgacgcgtctcgacgcgttcgtaaatgagcatgcacgcgtgtaaatgagcgacacgcgtgcgcacaggcctcgtgccgcgcccacacggcttttttttttctctcctcctccctctcgttcttgttccggtcttgtttctctttctgtcctcttcctcttctttctcccaacatccatctctctctgtgtcttatcgaacaccttcctctctttcatttccctactttcaagcacccatacacacctacacacatacccacgctcattcaatcgatcatgcctaccgctatccctgctatcgacaacgccatcagcgctgtggccgaaaagtttgacctcgcctcgttgaacgtggtcggtggaggaaagccatcgagagaggacctcgctaagcggttcgtcggtgatctcgactgtgaggagaaggacgagcctctgttgcaggctacgtgagttttactctttggtttcttgattttccttccaaatcttctgttttctcgtgttgttgtggcatttttcccacggtccgcagaaacaacagatgctgatacattcgttttcccttccttttcgttttcacttgttgatcgttttcttccttggctttccttctcttcttttcccgtaaattcctctgtcacttatctttctcacgctatcttcttctgtcctctccacccctttctcctccttcgttatgtcttggtctccctcagcgagagacgattcgtgctcttccccatccagtacaaagaggttagctccacctttcgttcgatcatgtacacgttcattcattcctccttaagtagccatcctaacttgtttcttcttcaccttgtttctgttatcagatatggcaagcttacaagaaggctgaggcctcattctggactgccgagggtaagttctaatcctgttttaccttttctttattgcttcacggaccgtcgttgttctttgcggcctagtctcgccgagcttagtagttcgataaatacctctgctgacgtttcattccatgctgtttggttgtaacaaccgtagagatggatctgtcaaaggattccaacgactgggagaacaagctcaacgataacgaggtttgtctcgttttgtctcttccaacacccaatttcattaacttgtctcaccgactctatttctatcgactctacagcgacactttatctctcacgtcttggccttcttcagtagcagtgatggagtcgtgaacgagaatctgctcgagcgattctcccaggaagtacagtctgccgaggcccgatgcttttacggattccagatcatgatgtacgtcacagtgtcttctctacatacaagccacttgtctatcgatcgatcgatctgacgcctaggtacatggattctgaaaacagggagaacatccactcggagacttactctttgctcattgatacctacatcaaagacaacgatcagcgagactacctcttcaacgctcttgacaacagttcgtccttctctcttctaggcgcatacgcttgcaaagacgctttgattgaccattctcttctcttgtatcggtcgcttccgctcacagttccctgcatccgaaaaaaaggtgactgggctctaaagtggatttcgtccaagacctcgacctttgccgagcgactggtcgccttcgctgccgttgagggtatcttcttttctggatcgttcgcctcgatcttctggctcaagaagcgaggactcatgcctggattgacgttttcgaatgagttgatctcgagggacgagggtcttcacaccgactgtatgtttctttctttcgtcaggcttgttgttgcatcttcatgaagtgctaattctgttttgatctgacgatcagtcgcctgcttgttgttccaccatcttcgacgacgatgccacccggacgttattgaggctatcatccgagaggccgttgagattgagcaagaatttttgagcgatgctttgccggtatcccttattggtgtacgtaaccccttgacgatctgcttgttccttactttgctccctctttggcttcttaactaattcttcctttcgatgtatcacagatgaactgcacgctcatgtgccagtacattgagtttgtggccgacaggttgctcgtcgcacttggaaaccccaagttctaccactctaagaaccctttcgacttcatggagatgatctcgcttaccggaaagaccaatttcgtcagtttctctttctcttgtttttgaccttcttacatcccatatgtataacgaactaacgccattcatctcttgcggttcttgaaatcacagttcgagaagaaggtctcggattacgcaaagtctggtgtgaaccagtctgtgggagacgggaaagtacacgacccttcggccgccaagacgtttaccatcgacgaggatttctaaatcacgaaaaaactcgacaacaaaacacgtccatcccttctccttcttgcctttgcttcttctcataactcttcttcgtcaaatcgatctgcagagtcgacatccgttctgaacggaatcgtacatctatctacccagtttagattcggacctgttcttttcattctgcattctacctttctgtcatatatgtttccttcctcaaccagtttatagtgctaccttcctacacattcacctatctcgttaaaccatcattcccatctcaatctgtcttatttcttttcatttgattcgtttgaccttgacgataacttcttttggtgggaataaaatcccctcctcctttgcttcgtttctttctttctgacgtttgtccgttcggtctcgtcttctgtattaaatataaaaagaaaattaattataacggacgatgtgaacccggattgagagtgcaaactatccatattgacggaggatgggacagaggaaagacgcaaatggaagatcatgaaggatcaggtcaacgttggctcatgattctttcgattctctgcttgttcatcctcaacttcgtctcaagatcatcatagctgtctcgtaagagaaacgagagtatgaaaccgtgctccgagcgcttcatccttctcaaccttcagcttgtcttgagaaagactgtgaaaacgacaatgacgatggtgatgatgacaacagccaagagaaagaaaaaagttcgaacataatatctgtacgacgatcaaaaaaaagaagaaaaagatcttttcatatccccgtctacgccaaggggagagatgacaaaagaacgacgtttatctagaggaaactaaaccaaaacggaaagaagcgctctactttccgtcggtaccggccgaaccgccagggacgacgacaggagtggcctgttcgttgttgactggcttcatcgcggggaacaactgaacaagacaaaaggtcgcgaacggagggaatggggtatgagaaaacgccgcaaggacaaagagaaactctcttacgaggaatgaaaaagaaagaaaatgggaaaggaaggaatacgtacgaggacctccttgatgttggaagaatcagtgaggaacatgaccaatcggtcgatacccattccccaaccggccgtcggaggcaaaccatgctcaagacttatgtcaagaagcaacataaagcgtagagaggtatcagatccaccgttcaagtattgcgaaaaagaagagagaaaagaaagaacattcacttacgcgttgatgaaagtctcgtcgacaccctgagcttcgtcatcaccctgatccttctgtctggtctgctcctcgaatcgctccctctggtcgaacggatcgttcaactcggtgtaggcgttgcagatctccttggtggcgacgaaagcctcgaatcgctcacagagtcccggtctggatcggtgcttcttggcgaggggagacatcacctgggggtgaccgacgatgaaggacggattgatacactgaacctcgatgtactctccgacaagcttgtccaaaagtcgagcgtttgtcctgggttcgctgcagtcaacgttgtgcttggtgcagagttccctgaggaacttgttggcctcctcggtgtgaagggtctctccgggagggaacttgacgtccaacttggcctccaactctttgatcatatcgaatcgcttccaaggagccttgaaatcaatcgtgtactccttcttgccctcaccctgtccctctgggtggaaaacaaccttagtctctcccttgttgaggtacttgaccataccctcgaccaacgtctcggtcatctccatcaggtcaaacatgtcggcgtaggccatgtagaactcacagatcgagaactcggggttgtgagtcaaatcgatctgctcgtttcggaagactcgtccgatctcgtacactcggtcaagacctccgacgacgagctgcttgaggtagagctcaggggcgattcgcatgaagaggtcgagcttaagatcgttgtggtgagtgacgaacggcttggcggtagctcctcctgcggtcatggacatcatcggggtctcgacctgaataacgaacaaaaacgatgtgagaaacgtgttcaatcgcggcacatgagaacgaaaagtcacagtttcaaagacgaacctccataaagccgagagagtccaagtactttcggatgtagttgaccaccttggctcgagtggtgaagatgtctcggacgttctggttgagcatcaagtcaaggtatcgctttcggtacctaatctcgacgtccttaagaccgtaatgggcagtgggaagctggtgcaagttaggggtcaagagagtcatgctggagggagagatagagatggcaccggtcttggttcggataggggatccagtgacaccaacgatgtctcctcgtcggaagaggtcgtgagtcttgatgaactcctcaggggaaggagcgtacctgaaatgagagtaaggtaagaaggagttgccgttagcaacgccaaatccttttgaatcctgacaaagttttcccatttggcgaaaatgattgagctcggtgcccggaaggaaagattcaactcactcagcctgggcgcagatttggagctattcagtcaagagagaaaaatgcaacaggggatcatggtagattagcgccaaattcctcgtatacatcttcttccttcctcgtcctcgggacaacaaacaaccaaccttctgtccttcggcgtggagatcgtagaatcgaagaccctttccggcatctcgcatgttgtggattcgtccagccaacgagacctgaacgagttgcacgaagaagaaagagaacacatagtcagaacacgtctctaaacatcgttctcgagggctcaacgaataacacgtaccgtgatatcgtctaatcgaacgttcttctcagtgatcttggggtcgtaagtctcaatgaacgaaggcacagagatcgacacatggaacttgtgagggtaagggttggggtcctgagactctcgaagggccttgatggttcgggttcgtaggtcgtaatattgctgtcggatgtatccagatacatgacccaaatattagatatagtgtgcgcgatgtaggatagagcatggaaagcgaaagaaagacgaacagtaggatcgagctcggcctcgtcgttcttcttagccttggtgttggcaggcttgggaggagcagcggaggcagcagcctccttcttggcggccttttctcgctccttgataagctgcttgagcttactgtgaatgtttcatattggtagaaaagaaacaagccggtagggcaagcagtaaagaagatagagcatcaaggagtctctgtcagccgttgatcatcatgttgtgcgaacgaccatgagacgagtcatcttgctcccgataggagaagggcagcatctatcggtctcgctcttgagaagaaatactggacaggagttttgacctcgtaggccgaggagagttccaccagtatctctctctggattgcaagaacactggcttctcacaaaacaagacaaatagaaagaacccatcggtcatacgatgctcttacctcttggagaccatctctcccgtaacggggtccttctggaggttcggtgccgcagcggtggatgcaggctcagacatatgaaacgttcttgtggtagataggactacgggacggagggatctgttggttgcgagctttgtgaatagatgaagagcacggaaaggggctagattcatccaatgtcgatggagggctgactgtgtgagtggttggatttgaggcaagagtaaaaaaagaagtaggaaaaaaagaagcaagacccttagatagaaattccgtataatccagataacattcaagtgttattcaagtatcctccttcctcttgctcccttcacacacaatcctacacgacctacaactcactcagacacacaacgatggccttccttcttgcacctagagcggttgcttcggcttccaggtcgttctcgaccagcctgccagtctcggtcacgaacattcatgcgcctttccgaaggatgggaaaccctagaaagtctcagacgatggaaaagatgaacccagtcgatcgttcgtcttttaccgcttttttcctttctcgacttcttctctcctttgtgtttcttcactggcttgtcagcatggattcagtctgacatatgtcctgctgttttggattctgttcttttacagaggctaccattggagcagatgtttccgccaatctgaggagtttcgatcgaggaaacgtccgtcctttgtcctttttttgttcctttctcttgataaactgaagactagctcttactgacctccttgtattatcttccttcttgccctttctatcctcctctctcttcatccatctccagatcatgtctcccgaagatttctctcagcaaggccgagccgctctgaaacctatcaagcgagtcaaacaggccctcggcccaccccgagcgatagccgagctgattgatccgttccatcgactggacattgatcctcggaaagaatacctcaatgcccgactgctttccactttccagacagagatcggaaggatcaaaggaagggcagagaccggactgacgatattggctcagaggaggctcggaaaggccttaaagcgagctaagaacatgggtttggtctgtaagtctgaacaaagtttgattctgataagggcatctgtacatgcacccgtacacatatcatatacaacatcccactaacagtatttgtctctccttttctttcgctacttcacagctcgatggaccagaaacgactcgtttgcgccaatggtcgagcgaccgcgtcgttgatcattcccatcctcccttgtaacaaaatgaaaccctcctctctagaggaaaatctcccctttctcaaaactatatcaatgaattgatttataatgattgacccgtcttgacgtgtttcgttcaagagagagaaaaaatatgtttcttattatattcatacgcatcggaggagggaaaagggaggggtggagagagatgtgtatgagagcaaaagtctgggtgctctgttatcaaatccaatagttacatgtccaaatagtctacaggggtttaaacagaggtcgtgtcagcgccaacaatgttcaccgttgtttttttctttctttttaatgtaagagaagaagaaagaacgaacccttgatctctcgctctgttaactttctaaacacctgcttgatcctctctccgtttcgaacctcgagatcctccgccttaggcacagttaccacacccacctcaatcgtcttttccgtcatctcgccctcgaacccttctttcagcgtcaagagcgctgtgtggatagcgtcctccaacgagatgtcatcgttataactggttcgtttggccaagatcaaataagagagacgtcacacgatttagaatagatcctagcgatcagatgagtacaagggaaaaaactgagaagacgacgcaccgtttctccaagaacgtctttgcgttcaccatgttcttgcccattgcacttgccttccaggcccagaacgaaccagacggatcaacctgatagagcgacggccctcggtgggcgtcccatcctgccacaagtagagaaactccgaacggtcggactccactgtatgatttgagaatttccatatcagtttagcccgttccctctgacctgactaagccgcctgttcaattaagagtgagggggaaatctcggacgtacccagactgagtagccttctgcatgatcgttgcaacctcctggacgagcacctttgtgggtgggtactcgttgtaaatcttccagtaagcctgggcggcctgtctagcttttgtaacaagtactctgaagtccggtcccatcccagagtagacgattccaatgtttgggcagatgactgagatcttttccaaggcagagtcatcgacaaggattgagggtgatttcttctcggttaatagcacaattccattggtggctgagataaatattagaagaaaaaagcaagttgagcatagaaataacagaccgtccgttggaacgaatcgagacaaacctttgacacccagagaggttccaccgccgttaacgaccgccaaagcatgctcaatttggacgagctacgaataaacgacatgatgtgttgttcgcttgctgtcagtgtttgtgaacgatagacttcttatgacgtgacgataaagatgaagcaacctcaaacgaaacgtacctttcctgacggactgaaagtagtcagcgagaaactatttcgcaggaagcagaggacgaacaaggaacggtcagtgagactgtacgatacagagagtctaagctcgaattccaagcattccgagggcgaaacaactccttcgcgtcgtcggagacctccagcaagacgatctagtcgattgatgatcggtagacgaccagaccaactggattctttctgtcgacgtgatctggatgaaaacaagaaccggactgacctgtactgtcctcctcctcctggtgcagccattgtcaagtaagagtgagtgagtgcgtgtgtaagagcgtgtgtgtgccggaagagagagagatcgttggatctatagcaagggtggacgtttggatggaacggctggaagagatgaaagatggaaatgacaggtgtcgtggatgtaaccatgggcgataatggttacgtttacttcgtgtgaacaggggagtgactaaccatctatttaaccctaacctgcagctttagcacttcccggcccatcctccatcctccattctcacacattggacctcaacctcgagtagtatgtcttcaaggtagatgatctgaaggcagctcttgctctcggcagctccttggttattgtgttcttgagaatctcttttattgctgctctaattgcaccatgtggtctatcctttggggttcttgttcgcctctttgtgaatatgattgagcttcaaagccatgctccttcttctatcacaaaccttgatctgaattctgtacaagtatcttcccaataaaatcggagtgcagctcgcttggatctggcttcgattcctgaatcaccctcttgcgctgagtgaagaattccagcggttcccatctgggtcttctcaacagtccggagttggccggtcggttcggactgggcgtaaccaattcacagccaaagatttcagaacatttcgtgctttccttccattctcatcatcagtctttgccatcctttctctcaaacaaacgtatacacacttcctcgacattacttatcggacaaggacatccgtagaatccctcctcaatgacacatctgtccggaaaagccgaaaagacgacaaatgagcttgtagagcagcttcagcggatcgctgcagaatcaaaattaatcaaaggcacgccttacacctaccctgccttaccttcctctacccttctctcttctaccccagtcctagtcccatcttcctctagtacgcctccatcatcggaaactcctgtctctcaggcagaagacctgtcgacgtctggctcagaatgctccaggcaacaccatctggtctcgtggaaagttcaagaagaggtctacagaaaccctccgttcgaattgcccactatggctagaggtctcttcacagaacggcacgaaggccaacatcgcatcgtcgctagaggatacgaaaagtttttcaatgtcggagagatgagttatacaaatgtgagtgattagttgttgggttgatggtcggatttctcatataccgtatacttgggcatggctcgaatgtcctttctgacgacaacttttggactgctctcctcaaacattcagtgggattctttagaggaaaccacccaggcgccatactacctaacgctaaagtccaacggatgtctcatccttctctctgccatcgaagaagaagtactgttggtgacgagtaagcatgccttgggtgacatgctcgacggcgagcgagtcagccataaccgaatggggttcgtttcatctagctttttcttcttaccatgagagctcatgtgtgtatgagtgtgcgcgcgtacacatgtttcctctcaaccgcttcttcatgttctccacaccatttttggatgaaacttactgattcagcagttcggttctctccttttaaataacttgtcctcaggcgtatatgggtcgaaaagcatctgagtagagtcggcaagaccgagaaagagctggccaaggttttatgggagaagcaattaacaggtgtagctgaggtgagatttgcctcgtgtttatttccccaatgatcctttctatcctcttctccttactctatctaacgcccatctaaatcttttaaatcgtgccatcagctatgcgatgactcattcgaagaacatgttctctcctacccatcccatttgactgggctccaccttcacggtctgaaccacaacactccttcattctccaccttatcaccctatgaggtggcctcattcgctcgtgaatgggggtttatcgaaacaaaaatagtagagaaggcaacgttacgagaggctagagagtttgcgcaggacatagagacaaaagaagagtttgatggggaaaagattgaaggattcgtcgttaggtgtacggtgaaacccggaccagaaccgaaaactgccatacaacagggcatggaaaagttggctgtcgttgattcatccgacgatcagtcggctctttcttccgctgccgcccaagatgccaaacgtcgcaccatctccccgccttatccccctggatcgacattctttttcaaaatcaaattcgatcaaccgtacctactataccgaaacttccgagaaatcaccaagatcctccttcccctcttatctcctgccacgccgaaaactgcgaacgattcgtcctccgtgacttctatcaaaccgacgaaacaaccaaaggtttcctcctccagactttcttccccagaagcagtcgtttatgaagcttggtgtcgacgaacgatgcgctccgatccgaacctgttctccgggattgcagtaggaagaggaatcatcgatgtccgaaaccgattcttggattggattacgtcggatgatgaaggtaaagagacgttgagaagggaaaaaggtaatccaaaatggctaaaaatcgggaggaacgctggcggcgagaaggccggcgatggaaagaggaagggaaagggaaagggagaggaagacatcgacaaggacggcgcacaggcagagtggaaggagaggggaaagaacggatggggaaagacaatgctggttccagtggcggttcctgggtgtggtaagatccgtctcgcatgccttaaaaatcatcattagcacactctttccctctctttaactgatcatattcgccgtccgtttctttcatctttcttttcatctcgcacgataggcaaaacgactcttgctgttgcgctgcgtgaattgtttggattcgcacatacacagagcgataacatcgcagctaaaaagacaggaccactcttcaacaaggcggtaggcgatctgctgaataccaagggctgtcaagtcgtgatcgctgatcggtgagtgactggactgtctattgttcgagtttggcattcgatcggcttcaattgaccaagttgatcgacgctgtttctatatactgtgattggcttcgtcatgcgtctgaattcatatattgcagtaacaaccacctatctcaacatcgaaaagaactcgctaccactgcgctcaaagcggaccacaaagatcaacgatcgcttcctaccagactcatcggcttgtactggcccatcaaaggatttcaagcaccggcttcgaccaacgaggtaaccagattatgttcctcccgaatcacctctcgaggagataatcacccatgtctccgtccagatccaaacaatcttgccgcgcacgaggtaatcctgaagactcatttcttactcacagccgatccactgttggaccaagagctggacgacatcatccggcttgacgttcggtcttcgccggaagaaacgctcgacattgctctcaacgggttgaccaagctgttaggtctggagaggcctgacgaaccagccatcaagcacgccctcaaaatggctagagagtatagcgcagaaattagcctaccaccggttgtgccagcaaagatcataccccctagatattacgcaattgcacctgaagttgacatccgacagatcgtccaacaaatcctagacgaccatctcgttcagagcccacaaacgagtatagagtttccaaccgatcctcgaacgttcttgttcaatctggtgaatgattatcggatcaccgtccgaccgcatatcactctttgccatgaaacagaggtcgctgctgagcgggaggggattcctgaaacagattggaagaccaaggctgggccgatggcaatttgttggaaccaatgtcgagggatctctcagatcccaactttacccctcttctcattcgaaatcacccatctggtttgggacgatagggtcatggcactcgctgtggatcagatcgaaccaccggtggagataccgaatttgagactgaagatcccagaggaagagatggagggttctcatttcactgttggaacaagagacccggaagtcaatgcgtacgaggccagaggactcgtgaaggattttaagagaggtacttataggaaagaaatgggagtcattgagttaaagaaaaggattgagggtcacggtagagtgcttggcttatcgtgatatcagaatttgggggttgtgcgtctgtatctaattttccttgggatgaattgggatgatactttcacaagtaacaatcatgaatatatctgggggaacagacgaaacagtcagtatgagcgcaaagaaagcgagaaagaaaggaagaggggcgaaaaagatgaacgtcatattggaggcgcaaaagatagaaaggttaaaatatcgaataatctgccggtcatcatcttcaaaccatccatcacccaagtcgacctcgttgtgattgatctgtacccgaacgatatcctctaccaactatggccgcccttcgtatgccatgccctcgcctttctgtccttctcaaccgatccctagttcaatccaaacatctccgatcgtttcacatctctccggccgctcggtcaagtcttcctccttcgtctacaccagtgaccgatccctcccggccgacagctcggtcggggcctatcccgataccttccgccagtcaagctcagccaaaaagaccccggtggatgggtgggaagatagagatgaggatatttggggcctgcttcggagtcttgatagtcgttggtacctacacattgtacgtcctttgtttgtctcgtctatgttcggatcagacggtcgatcgtgaggatagagcatagctgagcatctctctttgtctttatttcttctctccttcgtgcgcatcgctcgtatgtttcgttcttgtagatacacttatgtccagatgtacaagacatggccaaaagagatcagagaatatctccgtcaggccatcaaatcaggcgaggcagaagattgggttcggtctgaacgtgcctttggaaagtacggtccagtatgattgacttgaccttccttcctagctgcttttgcttgcttacttgctcacgatcgatttaactccgatgatacttgttgtacatttctagagccttgaacgcggcccgttcgatggatcctccgctaccactacttcataccacaggaatagcagtcgcacaaacccatctgctactcacccgactttatgcacctcaacgagcgtaccccgttcttcggaccgcattgtccgacttggatgaggcgactgagagactaacgggcgccgaacgacagcgactcgtcggcgtgctctacaagttggccgaggtggccgaaaagctgggcaaagtagaggatgaagagatgtatctgacgagagctgtggaggagggtttaaggggcgtgatggaacgacggaaggagatcaagaagacgctcgacgaggtgaatcagcagagtggaggaggtagggaggaagagttggaacccgttccgatgccctcttggttgagccggaccgatctaggagcttgtctggacaaattaggagagttctacatgaaacaaggaaactccgagtcagtccttttttcttgctggtctttccagaacctgtcgttcatgaagctttgcttttcggttcgaaaactgagccgtctcttggctttgcctttactaatcatcattattgccaaccttctaatgttgtagctacgccgccccactctatctacatgcgattaacacgatcctccctcctacaccggatgaaccgagtaagaacgacggcatccctactgaagaccgttgccgaggtgagaccttttcacattatttccatctcatcagttacacatctcttccctctacaatatgcacttgtgttgatcatgtttgatatggtttcgtcttcatctgaaacttgacagctgccatggtaggactttgcttttctttgcccatctcacaactaccaactctcaaccctaacgttgatgccgagactgagattaaagctaacatcgacatcaacccgttctgatgaaacacagatgatgaacaatttgtcgaacgtccttacactcaagccgacgagcgagaatctccaagcggctctcacatgggccgaccgatcgctctccactgtccggactgctcggaaggtctcacccgaatttaatactctgatatccggcgaggacagagttggagacggcgggaaagatgaaaaggagagcgccaagtcgagggagtggagagagagaagaaggatgtgtgaaggtgtggaaggcgtcgctttgttcaacctgggcgtcttgcaggaggtgagttccttatctccttttgtgatctggttgagctgtcgttgttcttcccgtgaggagaagggagacttgcgcagcaccgcactgacttgagctcgatacccgatgggggggggtttcccgtatgatgaacatatgcacacagatgaacaaggaatacacctcatcgatcgaaacacttcaaaaggcccttgccttctcaagatctgtcggattcgctaagggagtccaagaggcgcaagacgcgttgaacagagtcaagactctgcgggccaaggcaagctcaaaggagaaggataccaagaagggaaaagggttctggtgaaatagatagatgtgtcttttctgcatctcattgtgtctatgtcattgtcaaacgaattgaaatgtatcgaatttcaagcaagcgcccaagtttattcatgcatcgaaggaagatcgaccgagcaaacaccttatagacacatatacacgttcaggctacgcttatgcgaccaaggcggaagcggtggcggactcgtacttgaaggtaggagcgatgacctgtcgggacttgtagtacctcgccaatcggtggattcgggactcgatgagaatcaatcggaacttggcgtccttgtcctttcggaactgggaaagatgagttcggacggcgacggccttcttgatcactgcagaagggtatatgcaaaggcaggaaagaaagagagcggaacgaaatgagtatctaaagtgaagggcaaaggggacagagactagggtcaagacgtacagcagtaaaggtcctcagggagctcaggagccataccggcagacttgaggattcggagaatcttgtttccggtgacgaatcggacctgggggactccgtgggagtctcggaggatgacaccgatctgggaaggggagagaccctatgaagtagcgaggaaagagacagaagtcagtcgacctggttcaccgaagttctgcttcgatacagacaacttacctttcgggcaagcttgatgatgttctcgcagatctcctcaggggtggacttcaaccaggagggagcggacctcttgtagggaagagccgaggaggcaattccttttccgggagcgtgcattctgaagtgttaaagtggaagcataaaggaaaaacagaaaaacagaaagacaaaagaaaaggaccgcaaacgagcaacacacacaggaagggtgataagtactctggtagcctatagaccagacaaggaaattcgagcagagtcgagcaacaggagcagctttgggtttctttggaggaacgaaaagtctgatctgtcctccttcccctctctttttctttctttttctttttaaaagtcttttgacgatccttccccaagccggtagcccttcggttcgacttttgagcgggataggagagcgaagaagcagtagaagagggaaaagtagtccacagaccaaacgagacaaagacaggacaaacactcataacacgatcttctttttttgagcttctgtctgccatggaatcacccgaggcagaacaaaagaaagagaaccagatagaggccgctctgcctctgactgttgaccgtttgacccgacggactcttttgagttttgcgtctcgttcttttgccttgacactctccatggtctgttcgcaatctactttgataggacccagcttttcgagtggggcaggatcgggtcttttcttttctcttcgtgatcggaaagagcggaaaagagataccaagaaaaggagaaggaaaagggaaaaaaggagtagagcaagataggaggaaaaccaggtcgcctctgatcgttcctttcttgccgctgctgctgctgctcgaactgcaaactctaaggaaaggaatgatcaagagactctgactgaccgacccattttgacggattaatcggcttgaagaagaagggcgaagtgagcgagggcgagcttgaagactgactggataggaagggacagcagcaaagaaagaatttttccttctcaaaggtattcatgagggtgggttcaagtgggctgaagtcagtcacgtgatgaattgcaaccctagatgtcaggaaccagagttaggtaacatatacacgacagcgtgaccatgctcacattccattattcatcatgccttccatttcgttatgctccttctcctcaccttatgcgcttgataatccttcttagctacgttcccttgattagtgataggattagtgatatggattagtgatatggattagtgatctgttgcttgataatctctagttgataatcctgtagtttagtaatcgagtggcaaccaggtggccacttcatcgtagctagaacacataaaaggatcgcgtgcgcgctccttcaagatgtggttcttcaagttaggatccttgttaaataacctagtagctaccagtgctattcaatcacgattcatcctctcttccctgagcctggaagcctaaacctccacgcctcgagcatccctagtcaactacagtcaccttgcgtaaccctgtaacccggccccttacactagaggtttgtcagcctttaaaatcgcatatgcctctcattatcttatcgcggccctttgcatcgtctattccttgggtttattctctctttcttattcatcctggtccagaagacttccctgacggatatctctgtatggactatactctgagctactgtccaacggattctacttgacgatgctatgacacaattgaagctacaaccttttcttttgattcaacgtcctgacattgatgtagtttccttgatcgatgcgatgaggtctttgtccaccgtggtttctgaatgcttgcctctgggtttagcatccagacttttctttcttttcctttggaaagagtgacgaaatgcaaaacaagaagaatgtaagcgcggtgcagatccaggctccacgagatttcagctatgttgcaatatattcttggacgggcaatcatcacagaagcacaggtatttgtccaagtgaaaaaaaagacagatataaaaagcaaaggaaaatagaaaaaccgaaagatatgcagaaagagaaacgtgggacctgatgaaattaaatggggagtgggggttaggccacccggtataaacgctgatgtcaagaaaagctgtccaactagaagacagatgaccttgcggttaaagcgggaaggaaatacagatgggggaatgaccttgaagcacagagagaaagattgtggaagaatgagattcattcatgccttttcggatagctgatgtagagctgagaggcgaatacgacggaaagaaacgacgaggaacgaaaggcaaaaaaaaagagcacgaagaaaccgaggggccagagggaacgaaaaaagaagcaagaatgagacgagacgagacgagaagagaagagaagagaagaaagcagagcgtccatgggacaaaaaagaaaataaaaaaagaaccatttacaccggcggctggagcgggagagtccgaaggagaagacgaccgagaccatacacatagaggccacaaacgaagagagatcacacgcatcgcacagaggaacccaaatagccaaggctaacccaggcaccccaggcacttccatacccacacagttactcaccaactgccgaaaggaaccgggtttggatcgtgcgatcaccccggagtccatatccgggtcggctgaccgtgatcgggcttgggtaatgaatgattctcgaatttgaccggccagttatttcaaaacgggtcgatcgtcccgcgtcatcaacttccggacccaggccacatggagggcatctatcatccagctatccaatgtttagcacccaacacgcacgtctcctcgctcacaccagcttgtacttgctccaacaacacagcaaacgtacccgggacagacgccgagtgaatcgcttaatatccctcttttgtgtctctttctctttcctcctctgcgcaaagagcgcagtgttcgttttgttctcatttgccatttttccacgtcgtccgtgttcgatcggccttcagtgggtgtgtttaggatgtgtgttgggtcgtctcatctaaagcataataacgcatttcagcgcacagacatacattgcaaaaatataaacaatctcctcagttctcggtggtccgatcctcgaaccccgttcgtcacatagcagcttcatgaggtttgttcccttctggcctctgtacaaaaggagagttggcctgttcactggtcatccttcttcttcccctcccacacacctaaccacctacctggacaagcactcttaccgatgatcgcaccactgctcaagacgctgccctttttggcagccgcgtacgcagccgagctcgaccttcctaatttctcggctctcaaccgacggcaagataactccacctcgtcctccgctggatgctcgcttgaccagaccgtagctcccggaaacttgacactttgtggaaatgccaccctattcactacttttaggcccaaagctagattcattgcacctgaaggctggatgaacgaccctatggggttgtaccagcgagcggatggatccatccacgccgggtatcaatcgtaagtcccctacgtatatctctatcggcgttgtactaaattgaccgttaaccttgccatttacttccgcatctgtctggcttgctccttcatagacacccaaagcacattcagtggggaaacatctctcagggagctggttagttgatcgttccacgctcttctctaccgaacgagctccttatcttctctcttctctcttttcccttctttcttctctccttttctcagcctactcttcggatttcacctcttggaccgacttcaacggctctgaaggctacaagaccatcgttcgttgagtgttcgctcttgttcacatcaaatcacatactgatagcgtttttcgttctttatatctcatttctccttcacctcttgctcgctcgcttatactttccccttaccagtggccttctcaaatatacgatattcgaggtgtctttgatggaagtatcattaaggaaggaatcgacggctaccctaccatcctctacacatccactagtttcggtcctctcggcgcgacgcttaacgaagccgaaggcacggaaacacagtccctcgcctacaccaccgacgatggagcatcctggattaagctcggctacggtgccggacagaacccagtgatttacgaatggcccgagactaacttgaccggtttccgagatccctacgtcttccagtcgcctcgactggaggctctgctcgccaacaccacctcgatcaccaacgccaccggtgaccactttgctaccatctctggtggtgttcacggcgacggagcgcgacttttcttgtacaggcagcacacgactggggagttcatcaagtggacctacctcggaccattagtcactaccggatacaaggagtcttacggcgagtggagcggaaactacggcatcaactttgagaccgccggtgttacccgattgaacccggccggagctgcctgggataacggctcggacaccactgccgttgatttcgtcactttcggaactgagcaaggacgagccgatcaccagaaccattggcctctctgggctgccgttgactatgaggtccgagacaatggctccatcgaagccgtcatcgcatactccggtgtccaggattggggacgaagttacgcttacgcgtccttccctgttgagggttacagacaagtctctgtcggatggatctacgaggatgacgataacgtcatcttggccaagcagttcggctaccagggtgcgttcaccctcttccgagacctcttcgtcaaggtcgtcgagaacgtctcgccctcgacgcccggcctgttcgagcaggcgtcctggtcgacaaagaactcgacggacggaatgtctgtcacggtgacgacgctcggccagcgggtcgtgcccgagacgcttgccgcatacaagggcaactcgacggtgtcgacgctcgccccggtgatgctcaacgagtcggctgcggcctacacgccgttcagcagccagccgacggaccggttctatgcgctgaccgggtcgttcgagtttgggctcaacacgacggccaaggctggcttccgagtgcttgcgtccgaggaggagtacaccgacatctggtttgaccctgcgtctgagaacctgacggtcgtccgaacggcgtcgtcgctgatcaagtcgttcggcaacgacaccgagctcgccaaggtcaagctgtacgagatcgtgggcgcggagagcaagacgctgaacctgacggtgtttgtcgacggctcggtgatcgagatctatgcgaacgacgaggttgcgctctcgacccgggcgtacccgtggctggcgaactcgacgggtgccggtcttcttgctgatggcactactgccggggacgtcgtcggggtgtctgggcttgagctgtgggacggtctggtggatgcgtggcctgcgcgacctgcgaacacgtcgcagggtctggtgtgggacggaccgaccgccgcaatgtacggtctcttctctggccgttaaatctctttcttcgcttccttcctcccttgagccagttgcgcttgcatctggctagccttgatatacttttggaaaacaaaataaaaacacgagatggggtaccggaaggagcgacacgtctatcagtgacgttgtctgtctgtctatttgtattgcatcttttttcttctttgtttcctttacataaactgtttcatattcgatgtgcgttattccacaataagatgagaagataaggtagaaaaacagagaaagactaaggaacgtaaagatttcatctaatctctatacctctctgtacctatacccgcactcgcactgggggtagcatcaatcaacacctcaccggccctctcctcctcttcttcctcctcctcctcgggttcttcttgataccgacgtgagttttgatgttggtgtaggagtgaaccgtcttcttcttctccgaggacatacgtagggtaatcggatcgagcgggtacatcggtaccccttcctcttcctcggcctgcctccaagtcacgctcgaaccctggcccaagatcggactcggaatcagagtacgcatcaccctcaagaggctccgctagcggacgctcaagggagagaggagaaggcgtcaacgaaggagagagggagactgaatgggctggcagatgtgctaggacttggttgtagatccacctgttcgcatgtgttttcaattttttttttcaagcagacgctctcatcagtttgtgtcttgatctggtttgagcgtgttttgagatgttttgggctgagcagaaccgataagagagagaaagaaaagaagaaaagaagaaaagaagaaaagacaacggactaaccagccagtccctgcactgacacacatcgccaaaacaacggaaaaaatgttcagcgccctactcgctccgtccatcttttgccgttctttagagtcagccaggccgtccagtctggagcctacgaatatgatcatcattgttctaggaagcattcctcttttttcgttgagtttgtattgtgggtcagtaagcgagagggcaagatgagttgatatagaagagaagaagaaaagaaaaaaagaacgggtaagagatcattctgtgagtgaacaagacgtgatacagaaacgggacaaacaaggtagctatcaggaaatgagagtaagacacttcgagtgtctgtccatgccaagaacccagaagcaaaagagaaagacgaagctttaagtattgtttgcgtacatctctcaacgcgagaggatgacgacaggaaaggcaagaaagacggaccccataaaaggcgttggagagcgcgaacggaaggggacaccatctgagcgcacatagtaacggtagtgatctcgacttgaccacaagctgaaatgcctcccatttcccaccgctcactttctgactaccaacaattcccttgaactgatttttcaacagatactgatatgcaagaaaagcgatgcttgatccgataacggtcgatacaaaggcaacggggattgctctaaagaatccgtaggtaaacccggcgaaggtcaacctggagtgtatttgggagtgtacgtcgtcagttcggcaccattaggaaggaaaacacacataaagagggattgctccttccgtacgtacgcagaactgaatccgaaaaagggaggtatactagcgatcacgatgaaggttccaacgatcacatatcctaggaaacctagcgctttgaggttctctgccaacgtggtgaactgcgtgttcgtgatagggcgaaatttccggagaagggaaaaccaaacaagcttagatcgtgattagatgacctgcaccgcctttttgcctgtggacgaaggaaagtaaaacaacggtacgaacgaaatctccaatggcttttggtccgatttgcacaatagcggtgatgaggacgacatgaaacaggaccagtgacctatgtatgtcatgtttttgtgtattgaaggaaaacctcagacggcatcaaaaaaaagagacgagccatcgccttgcaccagaggtgcgatctgattagaaaacgaaccaggcgaagaattttgcgggagtcgaaagcttgcggtatctgtctggagccgagcgaaggtagcggactccctcctcaaacgagggaacaacataatctgcgtacactgtccgtatgtttgggattggcatcttgaaggttgagtacggatgccagtgcttgtggttgactgtgtatgcgcaacagcatcgagcgactgggatcgctccggctggaggcggaggcttatctaatcgttttacgtaagcctgcggtcacgtgtcaatcaacggcctattcgtttcttgtcccatccctaatggtctctctaatggattcgttcattttgtgtagtgtaattttttgtagtgtcttccagttttctattctaatgtcccctagtccgtccttctagtgcgttgacggtagagcaagaacctctactctgacgcattctagtcgctccacatctaccttgcttctctggtgtgtctctggatgctggtttccagcgttgctagatttgatatgttgtacggttctatcatgtttctgaaaatggttattctaaaccggtggatactttcccggccaagaaatcagtctgtgttcccatcaatatctgctagacaaagagcattgaccagaagcgcaagaaccacatgaagaagtatccactgagcgcctatagactacgagcaaccagaaagaaagggagactttgattgtacatggaagatggttagtctgacgttcttccctctcctagtcatttctcttccacgccggcctatttttccgaaatattctttttcttgaaaattcaacgttttttttttcttcctctttcctcaatctcttccatccagactctcactcccgctcccatcaacgatcaacacacatcacatacacacaccatgtcagtagacgcctcgctccagggtcgtctcgatcgatggtcaaccaggctggcctctcttccttcgctcgctctcccgaccgattaccccagaccgtctccgcctagggtggtcgagtccgtccagcatgtgtccctctcgagtgaacaccgagcagcgttggacgcgctcgtctcttccaaagctacttcctatcaagtcgccctcactgctttcctcattctcctccacagatacgcgccagatccatccttactcgtctgcacgtcgttcctgcctgagggagaatcgactcctttgccgttgcttctgctcatcaacatcgcaccggaagatacgtttagctcccttctcgaccaggtcgtctcgacagaggcagaggccaaacgagacgccgtctcgctcgaaaacctagagcagatggtcaaaaaggcgcagcccgaacgaggtgacggtcctctcttcagagtcagattcttggacggcaccatcaagcaggcctctcaggaatctagaatcggattcgagaccgatctcaccgtcgtgttcaaccaggatgccgagactgaagcctcagtaacgatcaactacaactcgctcatgttctcccaacaacggtccactcatctccttgcctcgctccttcagcttttgatctccattcaaaacgctcaacctgaatcttcaatctcaaccctcccgcttatcactccggcccaacaggccgtcgtcccggacccgacggccgacttggactggtgcggctttaagggttcaatcacatcgatcttttccgcaaacgctcaggcccatccggacagggcgtgtgtagtagagtcggtagactctcctgatgcccttggggacgggccgagtaccgagcgaaggacttacacctacaagacgattgaccaagcgagtaacaccgtggcgcatcgattggtcaaagccggactccagagaggagaggttgtcatgatctacgccgccagaaaggtcgagcttgtggtcgccgtgatgggtgtcctcaaggctggctgtgtattcagtgtaatcggtcagtaatcgttccccctttggtacaaatcatatgccgtcaagctgatatcatgaatctttgtttgtgctgtccttcttttgtttcatcacaaaaaaaaataagaccctgcctatcctccttccagacagaccgtctacctttcggtctcgaccccccgagcactcgtcatcctctcctccgccggtgtccttcacccaaccgttcagacatacgtccaggaatctctccccgaacccctccgacttatcattcccgcgctatcgctctctccagagggtctcattcacggaggaccgtcgccgacggatagttccgaggacattcttgattccgttcgagcaaacgcctcggaaggtaccggtatcgttcttggaccggactcgccaggaacccttagtttcaccagtggttcgaccggtatccctaaaggtgtcaaaggaagacactacagtctcacccacttcttcccctggatgggcgaacgatttggcctaagcgagaacgaaaagtttaccatgctcagtggaattgcgcacgatcctatccagcgagatagtcagttctgtctctttttttcccctttgtcttgtatatctctgatgagtgcataatttctaaacgatgccatcttgggtcttgtctcagtgttcaccccgctcttccttggagcccagcttcatgtgccaacggctgacgacattggaacccccggaaggctggccgaatggatggctcagagtgaggtcaccgtgactcacttgacgcctggttcgtttttttcttcttaatacttgcctttcatcaagcggccatgtctcttaaagagatgtaaactgaaattctactcttactccgtcttgccaactatccaaatatatagccatgggacagcttctttccgctcaagcgactgcccagatccctacgctccggaacgccttctttgtgggtgatattctgaccaagcgagactgcactcgacttcaggctcttgcggccaacgttcgaatcatcaacatgtacggtacaaccgagacccaacgagctgtctcgtactttgccatccccccggttagcaaagactcgaccttcctatccacccagaaggacatcatgcccgccggtcagggaatgatcgacgtccagcttcttgtcgtcaaccgaacggacaggacgatcccctgtgcgatcggtgaggtcggtgaactatacgtccgaagtggtggaatggcagaaggttatctcgacccggcagccaccaaggaaaagtttatcaacagttggttcggacagggcattcagcgagaggacaccctcgttggcaccaaggagagtgaattctggttcggtgtcagagacaggatgtaccgaactggagatctcggaagatatctgccggatggtacggtcgagtgcaccggtcgagcggacgatcaagtcaagattagaggtttccgaatcgagctgggtgagatcgatactcatctgagcagacatcccttggtgagagagaacgtgacactcgtccgacgagacaagaatgaggaaaaagtcttggtctcttactttgttccccagggcggagacgaacttaaaggactgacgagcgaaatcgaggacgacgaggatgagggtgaggttgtggttattgatggagaggaaaagcgaaggcgaacagaggtcgagaagggtgtcaggagataccgaaagttgatcaagcatatcagagagcacctcaagaagaaactcccgagctatgctattccttccggtatgtttgatttccctcagctttcttctcgattaaagctgcatatgatctgacgaaagttatgatattcaagtctacgtgcccttggctcgaatgccgctcaaccccaacggaaagatcgacaagcctgcgcttcctttcccggatacctccttggcccctatccagtccaaggcgtcccagtctgccgctggtgctcagtcactttctccatccgagtcaaccattcatgacatctgggctaaactccttccgtccgcctcgagcccgatctcgatcgacgacaacttctttgatctcggtggacactccatccttgctacccggttgatcttcgagatccgaaaggctttcgtcgtcaacgtccctctcggcttggtgttcgactctcccaccatccgagccctaggagctgccatcgacacccttcggcagggagacctcggtcttgcccatgcttccaccacgacttccaccgcgcagccctctgccggtggctcgaccgaaacggctggtggagcggagggtgatgatgcttactcgaaagatttcgacaagctggttgccgatcttccagcgtcgtttgagaagttgccagttggattcggcgagaagccattgaccgttttcttgaccggtgccaccgggttcctgggtgcgttcatccttagggatctgcttgcccgaagggttggcaaagttggcaaggtgatctgtcacgttagagcaaagtcaaaggaggacgctctcagccgactgagagagagcggagaggggcgaaacatctgggatgagagttgggtaaaggatggaaaggtcgaggttgtggtgggtgatctatcggcagagaagtttggactagatgaacagacttggaaccgggttgctgaggaggctgatgtgattgctcacaacggagccatggttcgtttatccttctcctttatctagtcagtcatctaaaacctacggagcattgtctgatcggctccactctctgttttctatgcgttttcccttgttggtaaaatcaggttcactggatctacgattacgcccgactccgagcgcccaacgtactctccactttgaccgcgcttgacctggcccgagcccatcattccaaggcattcacctttgtgtccactacggctactgtcgagaaggatcactacgttcgactgtctgaatctctccgacaggccggtcagcccggtttgcccgagtcagacgatctagaggttggcaggaccggattgaccaccggatacggtcaaagcaagtgggtggctgaaaagttgatcatggaggctggtaagagaggactatctggatggatcgttcgacccggttacatcgttggagattcggaaacagctgtgaccaacacggacgatttcatctggaggctggttaaaggttccatccaacttggtctcgttccggatatcaacaacacgatcaacatggttcccgtcgatcacgtcgctcgaatcgtttccgtctcttccgttcgtctgccttcgtcaaccgactcatcctcaccgttcggttcagtctctgtatgccacgtgacatccaggcccaagaccagatacaacgatcttctaggtccattagcctcctacggttaccgaaccaagaccacagcttatctggactggcgatcgaggctcgaacaacacgtcctagacgtaggcgacaacgcactcttcccactccttcatttcgtgttggacgatctaccaacgagcacaaagtctgcagagttagatgacaagaacacgacagaaatgttgaaggcggaaggtgagagggaaggtatgaacgtcagtggagacgtcttgggcaggtatctcgcttggttgatcaaagctggctttttggattctcctccggacaaaggagagcttgagttgcctgttttggaaggtgatgctagagctatcggtcgaagtagcggtgcggtctaaagaaaaaatagacatcgaagagaaacctcagcagagcgttgggttccaaatgttattgttgttatctatatgaagaacattttgattttctacatcgagtccttgatcggattatattagagacggcatctcttctctttccgtttgcgcacgcgtctgtctcttcgccttatcttcccctcaacttttgtctcaaaagataggaatgaacacaacaaagagatcatcgtcattatggctgtatgaactcttcctatcaagggggaggtatatattgtgttatttcttttcatgatgtaaggaattccagaatctgtttctttcctcttgtttggattaagtcccgctattcattcccaaatcaaagatacgacaaacaagacaagaagtgggaaagagaaacccaagtactgagtatcaactctgaatgcaaacggatcaaacgaggaggaagagaaaatgaactaacaacagccatcaattgagaaagttcagcgaatgatagatccagtccttccagagaatttgtcgatcctaacgattctcctctctcgtctcttgacggtgctggtgcagagacaggtgcagatagatgtgttgacggaggcggcggtggcttttgcgaaccgggagggccgggcgaagcagagtttcggttgagccgtaaggtaatcttctggatcgtcgggtagttcgtcgctcttgatgaagttactgaagagacacaggcttctaaaggagttgaaactgtaggctcatgtatttgtccattctctccgggtttaacttcagattcgagtttgagggattgagatcgcgactcggtagaggagggaaggacaacaggtccggttgttggtggcggtggtagaatataatctggatcgacctccccttcagcatcgacatcggagcctacgggctcagccgatccctcttggagatcttgttctgtgcgaacaagctcttcaagcttgggcgaaaccttagtctcgatccctgagacaacagtagcgggaagatgatcggatggaggaggaggggatgaagacagaagtcgtgctgaagatgcttcatatccaatactctcgctttcttcactaccctgatcttcattcatctctacatcactctcctcctccttccgctgctctgattcccataatccgttcattctcctagctcgttcgatcgtggcttttctccagaagtctaaacgaattgaactttcaggtacgcgatatcgtttggagttgacgagcatatcctcgaacggaactctattcggatcggctgacgggatgacttcgatctgaccgttatttctttggaacggaccggtcaaattgatatattctagcccctgcttcggaactcggattttgggctagaaaaatgaagaacagttttgatagtgagctgaaaacatccggagagaacattgtaagagaacacagttaacaagcttacagtgacgtgatcagcatgcaaaggacctttcgttagatagcaacaaaacgtacaacccacaatcagcttgtcaagacgaaggaagaacgaagaaaggggaaagaagaaaaaactactcggatcgaagataggaaaacgaaagagacactcacaagtccattttttggagatctgaggcattgtcgctaacggcggacttaaacaatcaaaatgccaatgtagattacaataatcgcacgagatcattttccgccacgacgcgacttcgattgaaggtttgccggcaactacactcggtcgaacttcggtcgaaccctcgagtggagcggctgagcctccacatctataacatgatagaatttggccttttccatctttaactctgtacggatctcggtcaactacaaaaccggttcgactgtgtatcaagtagcgaccgtcaaaagcaatatgtgagcggaggaaaggtgcagacaccaagaagaaaagtagagagcaaagagaagaacatactcggctttcataggtctcaactcctcagaattaacataacttccgttaggggcgacagagacccctttgaaatgtgatcgaatgaggacaggtagtttgaactggataggatttgtcatctgcacttgatggatcagcgaactgaatatatttggcggtggattcggaaccggaagagacgactgattgacgtttgttttgttttgcattgatatcagctttgccatctcaacgttgaactaaacataacagaagcgagcgcgcgcatcagaatgaactatcaaacgtacccttcggatgctgcattccttgcaaaaccactgttcttccggaatattatcaaagtcgattgggggatcaaggcagagaaagtggaaagatcggggacagccgtcacagcacaagaacctgccgattcctttgcatgcctcacagtaatcgttattgagctggggctgggttccatcaagattgttacaccaagaaagcattattgagttcatgtaaacacgatctaggaagagaagaatcagcaaaagtaggacttacgaaatcattctcgacctggccatctatcccatcgatttctttacccttacccttcgaatccccacctacaggtgttcctcttcttaagctcggtccaccatcgacgaaccttggatttcccccccttctgcttgatcctattcccgatcccacccgcgcactcgaaatgccttcgaaatctgcgtcggtaccatccctacctcctccagtttcgggtgcgtcagacaacggcgatgaaggaaccccatctggtctagatgcctttcgaggtgtgtttgatcctattctggtccttgaatttccagctccgattgatgcctcggatgatttcacagtgacacctccaccttcaacacccgaactatcaacagcagaagtccctaatatggctggcgaatgaggaggcgagaacggagaaagaacagcacgaagctgctgaaggtcatgtctcaattcggcactcgtaggtgaaggcgctctagcagcaaaggaaatagattgggtcaacggatttgccgaggaagctcgactgggactgtgtaatgaggcgctggtgtgatgggagctggaaccattggttggacgggccggagtgagtttccgagaccgactggtgctggctactgatgatgttaacatcgtttttttcgtgtaaggactatcgaaagaaaaacaaggaaaataagctcaaactcaattggctggacaaaatgaaggaagaaagataacgaacgtagttctagatttgggtttcggtcctttctgactctttgatccaggcggtctccctctcctcggctttttaatctctagttccaagtccgttcccagccccgaagctcgatccaactctgagagaacgacgatggtctcgtctccatcatcgccatccccatcacggtcctgttcttcatctccttcgatttctccaccgttgagaagaccgccatcgccatcagatgaaccttcgacctctgcgaacgatcgttttaaatcccttttctcctcgacacgttcggcatctctatctccattcccatcgccgtctatcccatgtccatccattcttcctgtcaatacatccacatcgatgacagacgcaaacgtggacgcagatgatgctctcgaggggtcgaaaccgagttcaccatctggtagaaatgtcttttgacttgtcattacatccactgcgcccggcgtatgctcgacttgatggccgataacgtctccattctgtcgtaaactaccatcgcccgtgactccagctgtatagataacaggcggcgtatgagaaggagcaagggggtaagatgatagaatggcgggggcttggatttgattggagaaagatggcgttccgtgcagtgcgtccatcggctcgaattggttttgttgattatccatcaagcgtcctttttgtttttcttctgcctctactgctgcttgttgttgctgttgctgtgttatcctatgggagagtgatataatgtgatgtggcgtagaaagatggagtcgaggaaaggttgagacgactgggtccagagttatacaaacctacgtggataaaagagaaaaaaatcgagttgggaacaaggtcacgcctatggattgtgtatgcgtcgccaaccaaagaagaaaatcttatcgctgtctcaacagaaagagagaaaagaccaagcaaacgaaagagggataagttggagataagatgcagcaacagcaacgtccgtttgatccgttagcgttagcaagaagggcaaaacagtataaccatcagtcagatccaccacgcagtgaggaaaacaaggaaagaaaggctcatcagctcaaaccaaacaaggggacttgatacaattcgcagaagagaagaacacactcacacctaggtggacaaggcaaagagataagcaaaaggagaagataggaaagagcaaaataacaagagattggcaagtgctttcacgggtttcctggttgaagtatcgtcgtcggtcgtcgttgatggtcaaatgaaaatgaattctcattcgtttcgtgacccaatcacgcgttttgattgttcgtcttcgtctactcgccgtccttcaacattcagtgatgtctttctctttcatccactctccctcttctctcggtcggtatgaggcatgcaagacacacatatgcaaaaggagtgaccatgcgataaagacacgcgatgaagatattagagaaacaactacagccagacgcaggcgagcgaaagagaggataaaaaaagacgacgatgggtactatagacgaagagacagagaaaaggaagtataaagaaagagaagcaaaaagatgatggggtggattgggagggaaggacgaaaaaaaggggaagaaccaagtcggcacagatgaatggaagaaaccctgtgggttgaacgagaaaaaaggatatcatagaaaggaacacatttaggtcatatccttgattgactcatgcctcgttcttggcaagagcaagcttgatttcggcaatggcctttccgggctgtgagagagatgttgggcaaaagcgaaggaatcagttttttgtgatgcgggtgaacatgctttgagaagttatacgtacgttgagacccttggggcatgttcgggagcactgtatggcaatttgttcatatatgaataggttttgatcaacgactcaggacaaaaggaagggttctcattgaaaagttatataaactcacgttgaaaatggtgtggcatcggtataaggagaaagtgttttgaagtttgtctcctcggtccttggtgtaggaatcctacaaacagaatcgaagaagtcaaagttagttgtcacgccgaaaatcattgctgtttttctagtaagattagtggacgaactctgctgtcggccatccacctgtaagcctgcatcaacacggccggtccaaggtactcatcttggttccaccagtacgatgggcatgaagtcgagcagcaagcgcaaagaatctattcgagcagaagacaaagaggtcagtttggatgtagatgaagaagagtgacaagaaaaacagagcaaaggacatacgcattcgctgttagaagggagtgtaggtcaacatagaacggacgagtcttcagctaacatccttctgcgctcaacatcaaaactgtccatcatactcactacatgccgtccaacttctttcggttctcaggagattgcaagtactcgcctagacacgatttcaaaaacaattaacgacgggggttagatcagttcataatcaagaagacaaaggagtacttaccctcagccggtgggttatcgttcttgaggaaaggctcgatcgacttgtactgcttgtagaagttggtgagatccggaacgagatccttcacgatgtacactatcaggatgcaaaaaacaaatttgttgtcatcagttcaaggtctggggacgcagcatatagaaaaacaactcactgtgaggcaaagggtaaatcttggaagtcttcttctcgtctcgatcaattcggcaaagacaggcgagggtgttgacaccgtcgatgttcatcgcgcatgatccgcaaattccctctcggcaggaccgtctgaacgtcaacgtcgggtcaacctcgttcttaatcttgatgagagcgtcgaggactatcatgagatacaagttcagaggtaagcagagcagacattgggatcgttgtgaaaagctggccaaaaaggacgcacccatgggtccggtttgagaaagatcaatatcgtaagtctgaagtcggggcttctcggaaggctggtcagggttctgttacgtgatatgtgcaccaggggtagaatgagcaagaaagattaaagaggaggacattcgtcagtctttgggaagaaaacgcgagaaaggttcagtaaacgagagaaaaaagagaagatgatagcccaaaggaacaccatggctgtttttttttcttctttcgctccttcttttttgtatccagcatctttgtccctgatagattgttcctcggttctttggtctctcagcaagagccatgctgatgcgatcatcgttcctaatctcgactttgagagaagatcgaaggaggaaagggcgagaacgcgagggaagagaaagaatgaggaaggaaaaaaaaacagccaatccggacgctcccatgtgctccaaatgttggcattccctcgattcatcctcctagcatcccccaagtgatgcatgaacccatacccagaaacccatgctcacacatgatctactccagacgaaaagaactgtgaactcacccatcggtagatcgagaacttcttgacgaccttggtatcagtggccggctcagcagaagcgttcgagctctcaacagcagttgcctgtctgacggcctgactagtggcgatcgacctaagaggagagacaaccgatcggctgactgccttgggaagggagtttctgatggcgaacatttctttcagctggatgtatgcgatggaaagatgggatgtatgctctagcagaagtgtgaggtgtgggaaaagaggaaagaggaaaaaaagaaaaccagccaaagagaagacgggtaaaagaggaggagagtgagaaattgcgcagcagatcgatcgagagtcgctcgcgtcgaccggccgaattcctcatcggccagggggagcgaaagcgtcgagtgcctggtgcctggtatctcgtgaccctgagacctgtggtgtgtgtgtctactcagtcgtcggtagtggttcacacatggtcaacatcgaacagccaatgatgaatcatacactctcaagttctctctcatccattcaattcaacatcatatatgtacacacacacgtccttgttatctattttcctaacactccgcttgcgcctgttcctttaccggtggccacatgggaaaacattccttctctatttaatcagaagtatcaggatgtaaccgtatcttcagcatcccactcttggttcttctagacggaaggaaggaaattgatatgaaaagaaagacacccacttgaaccatcggtcattcgcagccttgactctctcggtagctgataaagaaggcgtagcaatctccaaaccttggaccggggtaaacgacagagaagtagatgttccagagagcgcatcgttcgtcgtagtcgatcgtcccaacaactgagtccgtaatcggttggctttggtgaccttgactgcatggagccgagtgagattgaaacatagaaagacaacggatggacaatcagcttacacaaattcacctcttcttttcaaacacactagcatacacaattcagaacttacgtttactcttggtatcgcttgcaatccgaattttgcttccagctttgccaatcatacccatgccaacagtctcatcaccgtagccaccggcctcttcctcagcctcaccgaacgacatccggttctgcaacttttgaagctccgtctgtgcatacagatccttctctgctcgggctctgtagagaagggaggaaagtgcaaaccaaaaaaattgagcgaagaaggaaaaaaaacaacgccaaatgagaagatagagtcaatcgagagaactttactcaccgctttcctcccctacgcttctttttttcctcatcaggtcgaggcaatgccttagtgaccttcatcggtgccggttctgccagctttcggaggtgatcatcgatcttttttcgaagttgcattccgtaagatcctatttacgaaacaaacccaagccccagatggattcattggtgaggttcctcatctcttgctcgtcgagtatcaagagggacctaccatctcttgaacctcgctcaagatcgatcctggcggccaacacacactttgcgccgaccgtcctctgagctttcaatctgaactcctgagctacagattgaaccacaggtgattgaaagatgaatccggtgtgtctcatctgagaatgagatcccaatccattcgacattcctttcttggccgcgccaaaaagctttagcaaaagggacagaagaagaaaaatcattaggaacataaatgaataaagggaaaacaggaagaaagcaagaagcaacaatgacatacgtgaacattgcaagccggtgtctttgcgaaagctgtcaatccaccagctacaccgagcaattttgcagcagtcgacgtgcccacgatagccgaaagattcggcgccaagatgttcattctagattcaacatacgcaaaaatctgttattcaccataagggagagaaacgtcataagtaaatcaaacccctggaaagaaaatacgtctacaaaatagacagacagactttatcccgagcttccttgagactttttgcagcctcacatcccctctgaacaacagtccattcttcctccgacagcgtccgtcctcgggtagcactcgcagtcatgctgaccgtcataatcaccgccggtgttaacactccgtgaagaggaaccctagtcaggtcatcgacgttcccgagaacaagcacagcgtgcatgtaaggccaaggatcagccaccagttgttccaattctggaaaccgaggcgagtagtgatctcgaatgaactacccagagatatgtagtaaacacgtcagacatggaaacaaacggatgaacaaagagtcaaaggaagaaggctctcaccttgtggacgatcattagctcgttttcaatatcaacagacacgttgttagcagcgacaatcaagctatattctggattctcctctaccggtcctgtgaggtctttcggcgttgggtttgcagtgaagtgctcgatatcctaaaaatgtgaaggcgagtcgtagaagttgatcaatctagctatcatatctgcttgaccagagttttatatagtgatgtatttaacacataaaagaccggaacaaacagaagcaaaagacgtaccttcatgatttcatccagtttctttcctccgagtagcttcgcaaccttgctaacatcatccactaagcccaactgcatcctctctacagagtcctgatcaagttcatccgtaggtctaatcccaccttccggaatagccaacagaccttgcatcgcatcatcatcttcctcttctttcttcacgcccgctgagtccaattgatcctcaagcgcctttcttttggcaggaagcgaactagggggaagcatcagaccagcagacgttccttttccagttgaagaccctgcggctcccgtcccagtggcgttcgacgaggaatcagtggccggagtatcgttatcggatccttggtcgtccgaatcatcatcaaaccccagaagctcgtctgctaacgaagacatttcctagagcagcactggaggtgtttgataaagagagaaagaagtgatgatgagaacgaagagaacggatagatggttgttagggagaaagagcgtagaagaggcaaacgaaaggaagtgaggaaactgcacgaaacattcacctacgcacacttcagacctccacctatcttcatctctcgtccgccttcaacactctaatcttcgctttcccctcatccacacccacgtccattccacattaatcacaactacttttagaaacaagctttttctgagatgtctggctggctatcctattttactggcaagaaggacaatggcggctcggcctccaaagctaggaccgccatcatcgacttgagggaacagctgttgatgctagacaagcaggaggagcatatgcagaagaagatagatatggagaacgagaaggcaaaggcaaatgctactaccaacaagcgaggtgggtctaaattccttgtcgtccttctcttccaatcaataggacaacaaatacaaacagaagaggcttggggtggaggataagacattcatcatacctacaatcatagtataaaggtctgctataggtgacagatcgggagtcagtcactcgacggagaaaccaaaagcaaacctggagagtgaactgtgaagcaaggatgggttcgacgggtctatctttgaggatgatgatcaacccgctctgtacatcaacgtgtctctccttctcccattgatcgcctgccttcttatcatccattttgttcgccttgtttgtttgtgctgatgatatatttctatacttctttcttcgactcggtcagctgctttgcaagctctccgaaacaagaagacatttgaaggtcaactggatcgtctgacgggaacccggatgacgttggagacccaggtttgtggaccgaatccactattttctcctatcgacatacttctgattaacgctaccatgcttttccttcgtgtctccaacgatgaatcagatgaacgctctggagtcagccaacatgaacttgcagactatggaagccatgaaacgcggatccgaggcgcttaagggtatccatggcaagatgtatgttgactcatttcatcgttctcacacgagatcatttcatacagtcaaaacagtccaaccgatcctctgacttatatacacttcatgttggggatcattcctggatcaaacgatggctcatataggaacatcgacaaggttgatgctacaatggatgccgtcagagaacagatggagcttacgaacgagatatcagacgcaatttctcaccctgttggcctcaacggagacttggacgacgtacgtagcccacattttgacttttcttaccgaatagttgattcttgcgctcacaatttgtttcttctctcttctctctggttatgaaatatctccgtttctaatctaggaggaacttaatgccgagctggaggcgatggagcaggagcagctcaatgatcgattgcttggagctgatcgggttccagtcacgttgccttcgtcgccaatggctagtcgtgaaggttagcaagacatttcatcgatgacttccatataccgtcttccattttactgacgatcagttctgtctttgttcttggttgttcggaaataccatctagctgctcgacaacaagaagaggaggacgacgacgacgctcagctcaggcgattgcaggcagagatggctatgtgaacatccatggtttttagcacatctttctatacttcccctctcgcattgcccaattccttatcgacatcctttccctaccacgcctctgttttcttctttcacgcactgatttataaattcgagagcgttctttcactctattcacctctttttctttctcaatccatccccttcttgcttctagcttcttttatttgtacaaccgagtccgagacgttcttcatctctttttttgcgtgtgtgttcccgcccggtttgcctgttctcgatcttccttcattcgcttcatttaatgacttcccatcggtaatcctattcaatgtccatacacactcaatctgcctgtgctcgtgacgttcctggccagccgtttgcttgtagtactcggtcggtctaatcttaccgctctttttccgagtcgaagatatcaagtctgacttgggcccactagtgaatatgctcagcctggacatctatttagtttcatttcatcgagtaatcataggtttgtagaagaagcgggatcggccatgaagttttcacttccctcccaggtagcccacattccgaatgggttcttaacggaggaaccaggtgaagtttcatgtcagcttccttatcaacgcgatggcactcatcgtatcatttcgagaacgacgatgataatgtactgacctggatacggccaccttcatggacgacctttgcgtgctcgcatcgtcttagacgacctagctgagggaggtcatagcacttttgaagaatctcaaacgagacagatgttgaagtaaggatgagaagcttggcgtttggtgcgagaagggcgcgcaaggtttgagctacgagcccattcgttttctatatttcaagtatcggtccaaagtttgagtgtatgagttcaacggcgtcggtattcgatctgggtgatgagagacagtgaaggcatacctcattgaggtaaggtgggtctatgactgccaggtcgacggttcctcttaatccttcaccccatttgagaggttcatacaggtcatacttgacgaatcctccttcgtcctttcctatgccttgagtatcccttccgctctcctttctttccctcctttcttttctagtccgaccgacgacaggcaagatctcgaatctgtcgtcgtactcgaacagcagcgttcttttaagaggggaaggttgggattggaatgcgacataaccggttggagaggagaggaaagcgacgcgcgtgctcggtgtgcagagcgcgtggagggatgaagcaagccggtttgcgaacggagtagagtaccttgaagaatccaagaagtttgtaggctcgtaagcaagtggtttgtcggacaatgcaagcagatgatatcaacgagtcgtaccagaattgagacattccaaagttctgaagccaagcatgaccaacaaagcacaatcagccatgtccttctttctggcttgctcctattcccataaagcaagccagagagtgtctgcaagcagagaaacagatgatcgtagtagagggactcacttctccgatgacctttcgatattcgtccacattcatcatcacttcttcctcgtcgtcgttgccttcgtcttcacctgcttcagcctcagcctctgccaattctctaaaccgcttttcctcttctgccttctcagaaaggaacgagtccaaaagagcctgtgtagctgggtcaagcgtcaaaggaggcgacgacgaacgagacgatgttggcgaagatggtcgggacatggtgttctgtcttgacagttggatgaacggagaagagaaagagaaaaaagtgcaagtaaaattgaaaatcatcggcactcgttcatcctcacccctcatcaacatcgatagctccgaccaccatatacccatacttcttctgagatggattctactcagtcaaacatatctattcgtttggtcgcgtacatatcgcctcagaacacgccgatctacttcaggtcttaccccgcctcgtcgtcccctcaagcagatcttgtacactggcaccacgcgtttgccgctctagatcacgtcgatggccagaccgccccatcctctgccggaggcaaggagggatactttggtttgatcatggttctggacgagcttgctgtgttagttaactatgccgttctgagagatggcctgaagcatcaggaccagctgaaattgagggctgactggcaatgcctcttgatctttcggtacgatgaagttatggctacaagccctcgtcgaatatcaccatcatcgtctctttccaactcaaatcccaaccgatacgggattctgatgtcctcacagtatgcttgtgtttcttcctttccttatcttaggtcaaatgtcctaactctcgttcttactcgtggttcagatctttcacgcgctccatcaggcctatctcctgacgatctcaaacccatttcatccccaaccgatcttgtccaacccggcagctagagaccgatggaatcctaagaatttcgaaggaaacaaacagctagagaagcggctgggagagatcgtggccaagttagcatgagcaagagaaagatatccttaacgactttgacgaattctcatgaccaacctctcttcttgtcactgtgtcttgatcttgtttctattttcccctctttcaagaaagctaacgtatgattggagatctgggttatcgacttgttgactttgacttggactcaccttgtcccagtgttctctggatctaccacatccgtgtgatgtgctaacttgatttcgatctctttccatctactcttctcgaatcttctttcttcctctcctcctcatggccatatgaagactgagggtagaccgttagggaccaacgaacaggctctgcagggtgcttgtttatgtcgagcaccccggccatagtaattgagtcccgtctttctcaatcacccttggtcttctaccggttctctatatttgtaataaatggaatcgtttcatacaaatatagagatctcagcagccgaataaagaacaaagacttcctcttcttatgacacggcaacgggcaagacttcctggttcacttccagatggtctgttcaaggtcgaagcttcggtgactgccgcgacagatacggaggagacaactttctatacacattgtactctcattctttcactagtctttctttcgtccgatcatcaagagccaaagtctctgatatacttgtttcaaggatcgaatgtatcaatgattctcttgcttctctgtgtgaatctcgagaagctgaaagaaacactacgtatcggaagatagccaccactacgccgagccgcctcaaccatcttccttcttcagactcatcttacacactgggacccctatgtgatcttgtctgccctgttctttcccttccctacctcactacatctggcatgatcttatcgtcgacgttgagcgtaccctcagtctgggctatgttgcagatgttacgtaagactagttcggttagtcattaaccggcgcatttatcttctgaccagataatcaacctcagcatctcttaaatatccttcctcttcgtccactctcccttcgatccttcttccaacaccatcacactagctctcacgaccgtctggccatgtctggatcatattctcaacctagccctgctgaactcacttctcctgccgcttgggcgctggttcgtctgtctgttgcctgtagttgatcatcgttctacctagtcgtgatacttaccctagcattccctgttgttcaacccctccgaatctcttacttcaaggtcgaagacaagttctccccgttcgccaagaatcttcttgccaatttaattgagtttgtctttgtgagtgatcggtcaacgaaaagtttctcgacctagtcaccttagtgactacgaacgtctgatcgatgccgggtgctcttgttgaccaagatgttaatatcatcgatttacatcttctaactggataccggaaacgcttattgtgattcatccgtaggacgaatgtattccacgagagcatctctaccatgcccaacttcctgaaacaaccgcgctcggtcggtggaagacggtgatccccgtaatggaggagctgaaggaaaaggcgaaagcgagggggctttggaacttgtttttgagcaaggcgtcttacaaagaaggtgtcgccttgaccaacttagaggtcagccatcatctttctcttgcgtccgcacttgttcgaagctgagcatcgttttgctatcacagtacgccgttatgtgtgagatgtaagtagctcttgacccctgtgggatagatcatctctttcgatttcctaaagatcaaggaaggagagaaaggcattgacaaattttctggattggggttttgatagtatgggaagatcgcctcacttagcccctcaggctacggtacgcttcatccttcgtctcttactactcacagaatgctgatgaatttttctgctctgctttcatttatccccgtgatagaactgcgctgctccagataccggtttgtctttttgcctttcatcttcgtctacactagaatatatgaaccctgatcgctaaactcgcgcgatatgtttcgttgtttcaggaaacatgggtaggtctgttgtcgttatgaagatatgtgcaactttatacttgatctgaaacctcattggttctgcccacgatatagagctcttggccaaatatgcctctcaagaacaaaaagacaaatggttgactcccttgatggagggaaagatcagaagttctttttcaatgacggaatttggaggtcggtctgctctcgcatcatcattccttccctctgctctgaacgaaaggaaactcaagtcaaactgcgactggacgctgtctttcgcttggggctatcttatgtgattctttaaatagtcgctagctctgatgctcggaacatcagaacccacatccgacaggaaggggatcagatcgtcatcaatgggcataaatgggtatctgttctcatctcaccatttgaacgcaaactaagcatgaactgatcaagttccacatggctgatatttcaatgatcacacagtggatctcgggggcaggtgatcccagaaacaggcttcacctcttgatgggtcaatcggctccagagaccggtgctcgatcaacttcactccattcaattgtcattattccctcggataccccaggagttaagatagtcagacctatgaaggtcatgggctatgatgatgctcctgaaggtaggctttaaattatccaatatatgctccctataaagacttcagatctgatgtagtcgcctcctcttatctctgttgacaggtcattgcgaggttatgtgagttgacgaacgatcatttacgcgccttcaagtagggcatcccaaactgaccgcttataatcctcgtctctatcagctatgataacgttcgagttcctctttctaaccttgtcggtggctgggggagaggatttgaggttcgttttgcaatttctctcatagagtgacgggctcggtcacctaagcagagcaactgtgtatctctagatcattcaaggtcggcttggacctggacgaatccatcactgcatgcgaagtattggaacagcagccagatcgttggacctcatggtggagagagtaacagacccaaagcgaagaacattcggaaagatgttggtcgagcatggtaagtctttctctacaccgatcatggtcatctcgtcgaatttaatcagttgaaggccattgcatctgttttgttctctctatcgcaggaaccgttttgtctgatattgctcgttcaagagccgaactagaaagttcgaggctgctcgttctagcagctgctcatcaggtttgtcttgttcatttagtgtttatcgcttggtgtctgttacttatcgtcttatcgtcgcgttcgtcttccctcccttcttgatggaaacacaagatcgacaaagttggggctaagggcgcgatgaaagaaatcggaattgccaagttcactgtgccctcaatggccctccaagtagtcgatcgagcaatgcaagcttttggtgcggaaggaatctctcaagatgcaccgctcgcttacttctatgctggccttcgaacgttgcgatatgccgatgtaagcaatctctgcctcctctctctccgtcccaagcaggtcttacgcattgatctcatgttccatcttgaacgaatcaccagggcccagacgaggtccatatccaacagataggaaagaccgagtcaaaacgatcccaaaccgagctggcgcctcgaaatgaacggatccgacaacgcgaggcgcagttcatcaaggaatctgggatcgagatcaaagccaagctttgaaggggagatgaccttgttatcttccttgtgatgatcccatcctctctgtttcttcttctctcgtggctgggaagacttttgctcggtttgatccggacattagttgtaatgcttttgttgtttgtttacttatgtatcttcgaattcttttatgatcaaactatcgatcagcccatgaattgataagcgaaagggcggaacagtcaacgcattggtatattaggtgatttgcgatgcacaacatatgtaagtgggtttattggagtagatggtacaaaaaaaggtgggaaaatgcctcaagatgaagagggaaaaggagaggaagacagttgcaacaggcagacgggttcgaagagaaagccacaagggaagaaggataaagcggaggaattgagaactaaggggcagaaagatgattgtgcatcaaacgcgcatcgtgggaagaacaaaggagtacccagaggaaactaggtg

SEQ ID NO: 811 - DNA, 309 bp, Xanthophyllomyces dendrorhous
ttcgagtgagatcggcttctctgggtcaaagtgtgctagcacagaggccgaggcaaacgagttcttgagtgtctcgaacgcctttcttgcactttggtcgaatgaaaaccgcacatccttcttccgcagtcgagtcagtgcgacacaagtacgagagtagcaaggaatgaaccgcctgtaaaagttggcgaagcccaggaaggcttgtagttgtttgatcgacgtcggctccggccagtcaagcacggtttgtactttacccttgtccatcgtgacgccgtggtcagacaccacaaagccgagaaactc

SEQ ID NO: 812 - DNA, 3145 bp, Xanthophyllomyces dendrorhous
aaaaaaaagagcagagaaaatatatataagaggagtaaaaaatctgagagaagattgtttgaacgtgagcagatggaagaagtcattgtctgcgatatacaagagatattccagacgcgattgcatctgcagcacctagatagattctcctctaatccggaggatatcagatcgagtgatctgcgcctgttcgcacactgtttcagaaagggcgatgagaagagtaggagatggcggcatgtatcagtgaatgtacaagagtttctgatgaaaaattgttgcagatagatcgttcgatctggcgcaaaagatgaggcagatgaacaagagggatactgactgcttctgaagatggagtctttcttgtcgaaaagctctagagggggagcatactcagcgacctgaccagcatccataactttgattggaagggcataaagtgagtcagtatcatcagatcttgcttgcttactatccgagttcagcacctgatgagagtgtaggcatacccaggattcgatcactggtatcatacaatgcgaaatgatcggtcagcaaaggtatatctgaggagcattcaagagcacgactacagaattgatcgaactcactagaacgcaatggttgccaatctaaaagtgcagatagaacccatcgaggcatatgtcagtgagaacagcacaagagatgactgaactgctggttggcaaagtcatacctgtgagcgatcgtgataacggtcttatcgctgaactcgttctgtgtgtcacgaatcgtgaccagcatgtagatgcagataaaacatgtcagatagataccacacggccgacggtaggtgctcagctcgtagttgaactacccagacggacggaacactgactttgatcgtgtcttggatcaacgaatctagaaaggcgtcaagcaaccacgtccaagacgttaggtccaacaatgttcaagaccccgagcacaacagcatgaatggcgcactcaccggtctcaacatcaacggaagatgtagcctcatcaagaatgacgatcctgttggtcaaaagatagtcttgaatcagacatcaagatgtgggtgagatattcaagcaggtggatactgacttggagtctcggacgacaactcgagcgagtgcaaccaactgtctctctcctgcactaaagttcgacccgtcatcctagatatcacgatcggcgacaaggcaggtggttggttcgacagacgtagaaagccaattaaaggcaatcgacaatcaacgatgagcattgcatttgggtcctcgaagatagaacatagaaggaaagaaagatgatagataaaacaacggtgattggaaactcacctggaccatggcatcaagcttgaactttttcagtcgagcatcaacctccacagacgcatcagccgaggcgatcaggtgggtgcgtttcctgtttaaagtatcaggatgtgtatgcagattaagtcgtaagaatcaacgtgacccggaagtttgaggccaaaagcacataatgaccgaaaggagaagaagagaaagagaaacaagaacaatcaacacttacaatgcagaaatcagctgctctggagtgcaagtgccctcaggatccaagttcgaggcaaccgttccgttccacagcaaggggtcctatttcaccgcgcgcacaaagaagacccatgtcgcctctctgcgtcagtactgagccactttcgtaaggctcatatgccaaggctctctttctacaatcttcagctgacgatccttacctgtgggacaatcccgagctttcgcctaatcgacgtcaaaccgacattgcggatattcacaccatcgatctcgatcgttccctccgtcagttcaaccatccggaagagtgcttggagtaaactcgactatcgatgcaaaacatggattgagcacggcagttgcagatggatcgaacgatgtggtatcgaggatgagaggcaagtgagcatgatagcaatgcacatcagaagcagaagtcaaagcaaatggtggtgtcaattagccttgaatatcaccagtacacaaatgcaccgaaaagacgaagactgacctttccggctcctgtacgacccacaactctgcaaatcacatcggtccatcccatgcgagatacgagtacatgaatgacagaaggatagcaggaggatgagagaacgtaaatatgaatagaaacagcgacatcaagtcagccagtgcaaaattcctttccttgcacacccacaccttcccatcggcgcggtttctcgctcagtgacgccactcacccgatcttctctcctgcaccaaccgaaaaagacaggcccttcaacacaggaggcaagtccgctcgatatttcagcaccacatctcggaacgtgatagcacctgaatgtggccaactctcaggcggatcttccaaagtggatcgtgccgcttcgggtgacaggtcggcatagtaggctactctctctgcagtgttcatgtcctgttcgactgtgaagtagtatcaccaacaatgatacacgtagttcatccaggcacgtcagtcatgaccatgtctatccaaatcgacatgaggaccagaacataccttgagcaaagatactatgtgtccaatgaggtcagatcgacattccagtcccttgtcgtttatcatccacgcctatcaaatagccagagtgcagaacagtagtactcacttgacgatttgagagaagatttgcgacatggacagagaataggtgagaacgactccaagcttggcgggagactgccaacgacaaaacaacaagtttgtgagctactcgactattcgctatggacatcccaaatgaagcgactgttatgcgcactgtgttatttctgaacccaacaccaatagtgagacgcataaaacaagcaagtttccgagtgctgcaagacggatacccagccatctgtgcgccgacacgatgaatgtcatcagtatggttgagtgcaatgctcaacgtcatcaaaccaacatatgaccgggactgacctctgaagcgcgatgacgatgaagtagcatttgttctcgatatctatagcggcctcggtccggcggacaaaccgatcttctgccccataagctcgaatagacgatagactgt

SEQ ID NO: 813 - DNA, 502 bp, Xanthophyllomyces dendrorhous
tggctgagccaagctctcccggggctggatctgtcgtgatgggtgtccgtccactgtatgtgcacgatgctgaccggtgttccatgtgactggctttgatgtagagaaccgagcgtcaggccatccgagaacgagcgatgatgactgtgaaccgttatggaagggtctgtctctttgctgtctctgtctgagtcttggtgtgttctatcgatctcatgtgtgctgtttatgtgtgctgttcatacacacatgtctatctctggacgtctgtctgacggtcgacacaggacatcctcgctcggaagaagaaagccgttctcgatctctcggttggtgtcgatggcgggaagggccttgggaaagcagacgtccaggggaaggacatcttgagctctctaggtctgtccgcatggggtgtttgtgtgatgttcgtgaggtgttatgtgcctccttccgagcgagctgacctcttctctgtctcttctctgtgtcttccttgtgt

SEQ ID NO: 814 - DNA, 1523 bp, Xanthophyllomyces dendrorhous
ggggggggggtttaatttctcaatgatttaggaaagagccattggaaatgaaaggaattgaaaaatacagacaaaaccacagacgaaccttggcgacgtaaccctcttgggtagactttagtttgtacactttctccagagctgcttgagacttgacgcgtatccaaggaaggcgaagaagagaaggaggagaaagaaatagatggaacagagggccctcttggttgatcaacatcgatggaaagaacctcgacagagacgaggaaagcggaaagaaagaaaggaagaaagaaaaggatggtggagaaaactcacgttcttcttgaggccgaccatgcgatgtgagaaatcgatcacagggatctgagcgagccagccgggagaacgaacgtcagcgctccaggctctggagaagaggggcaaagacgagatgatggagagacagacagaccgacctcgagactccgtttcatctctgcggtcaacatcatgtgtccttgcgcttgttgttcggtctcttctttcagcgagtccaacgcggctttcaacgagctgtccgagacaccggtcggagacagagaggaaaaggaaaatgaaaaggcaaaggaaaaggacggaaacacgcatccgcgttagccaagtctggtgggaagaaaagaaggaagaatgagaaagacttgcccaatctcatcctttcctacggtctgcttcgccagtttggagagtttcctggcgtaatcctcttcgattgcgattctgtgaatcgggtgacagcgaccggaaagagagaagagtctgatcagaccgaggtcgacggggagacgctttgctcttccgggaaggagcaaagcgagagcaacaggcaagagcaacaggcaagagaacggaccgttctttccagaacactctgacctcttcgacggtccgaccggatcctctgagtctggtggtaagaacgtcgtatccttcgtcgttctgttcagtcggaacgacgatcgccgatcgatcggtgatccacaaaggcgaagggaagtggaccggaacgtagaacaataagagagaacggagaaagaagaggagcaaaggccatcagatacgcgttttttacagtacacagccaaggaaccccatggatccggaagatcttatggagacacaagagtggtgaaagaatgataatggaaacgatagtcgagtgatgatgggatgggatgaaacaatataaaatagaacgacacatcgcaaacacacagacccagacccagacgtaccattccccaaaatgaattacagtagctgctctcccttggccccccggccccggaagtcgaggaagcagaaggttgctctggcgaatggaaatgtttggcaagtgacgtctgcgagacggacgtgtggacttgcatttcgttcgtcctccgttgtttttttttttgtttttcttgtttttgtcttcttgtttggctgttcttctttgggtgggtgggtgtgttcaaggttcacttggttccgtttggggtgtt

SEQ ID NO: 815 - DNA, 774 bp, Xanthophyllomyces dendrorhous
gctgttgttctcggaaagctttagaaagatcttttagacattggaagctttcctcgtaaagggggagagcgtgaccgcacgagactctgcgagccttagttctaaaagctcttatacttgtccgttggatgcaagtataagatgctaaagaactagatctcgcagagttttaagaaaactttagcttttaggctttgcttggcttcagctatgcttagcaaagaacgttattgttttgtttgacttgtaaggacaacagaccccaaagagagaggtgttgtcctatttcaggagattcttatagcctctagagccctctttagtgaacttaaccggtctctattggctattggggtattgtactcgtcagagcgtcggaaaggacatgtgacatcgagcgctctccctcgtaagggattttgatctatagccgtaggcttattaacttagaaagaaaagaccttataggagtatcatcgcttacagctcttccacctctcgttgccctctgagttctccctgagaactggagggggtatagtactcagaagaatctctggaaagaacatgtaacgtcagaggattcttcttcgtaaaagagctcgtgtaagagggtaagggaccctctcttaggggcaaggacgataccttgcggcggcaagaggttgcgaaggacgacaccttcgccgaaaggctctgaaagcctcttctaaaaattttaggagagggatatccctctgtagtaaggggttccaccccttaccaaccccggtc

SEQ ID NO: 816 - DNA, 1593 bp, Xanthophyllomyces dendrorhous
tactatacgatcctgatatcttgtcgtgaatggacagtaacctagactgtcaaaatgtgcgcacaggttgatgaacacgcattggaatagctgccggactgttacataagattcaaaggtcaagagtggactgttcgcttggacacttgttcgccatcaagttctcactgctttccctcagtcatatacactttgcccaggtgtgccaggaagaatggatcgagaaaccaggagaacagaggagaactagctaggcgttcagcagctttgtgaagagacgctctcgggaccccttacaagatctgatagtgctgcgtttgagagaatgatcgcatctacaactacaacgatgtcgagacagtcaagtactcaacaaagatgagtgcacgtcagaaggcatgcgccttgtcgaggctgtaagtccacgtcgagggttgaccacggatgccaccatggctaccgcgtggctaccggatgcaacgtaacacggacacgatctcccttctcttgatcatccagccggacacctcgtctcgtgacagtccgccatcacagtggcccatcatagttcgccatcgctgattcttctcctcctctttctactcgttctcctcaccttcgtcctcatcgttgctctgctacattgtacgactctttctttgttccagagccaagctgcaccgagtccatccagacacttggccatcccagcctcactgtctgtgcccatatcagtacttcaccactcagcgatctctagcagcccttgatgtccctcccagatgtcctgcccgactggttcagcttcacgttcgtaggactacaagctgtgagcgatgttctcatgatctcagcacttggctcttagcttccacctcacaactcacactccattcgactctgatccactctgtcgaccgacaggcagcactccttccgttgacgttccagcatgtcggtgatccgatgggaacgttcgccaggatactaccagccggctacgacagagctaccgacggtcttgcatcaagtctgcgggtccaaatcgctacgaccactggtgctcaaggtgggtgggcgatcgtgctgacgtcctgatcgctctctgctgatatgccatgagtacatacgcagcatatccggtgatagctatcctgttcataggtggtactctctttgctcgcaaccgcctgaaggggctgcccaggctgcaacaagggctgatgaagctcatcatctacgccgggctgttctctcatgtaagtgtgagatgcacatgttgtgcgctctgttgactaagatcgatgcttgttgtcgttcgtcaggtctagctgtacagcgtggtcgtgttgaagtatcccagatctctgcttgccactccttcggtctggacagacagcatgaagggtcttatctttggactaccggtagccactgcactgaagcttatctggctattaggtatcggaagagacactctgtagagaacgatgtggtcgactaacgacagcggacagaacgctacacgactgacatcttgttatcatcaactgtctgtatgtttctattatgtttttttcgtgttgtatatga

SEQ ID NO: 817 - DNA, 1173 bp, Xanthophyllomyces dendrorhous
ttgttttgtgctctattggcttggtcgagttgtttggctgatgggatgtttggtcgatttgtatcaggacatgtccaccagctcaggctctcgaaaaatcatgcgatggccaaagacatatgcatagacttgtaatgtgaagtacgaagacgggagctttcaacaaagacggcaggacccagacatgagagagagaaaaaaaagagacaacacgagaggataaaacgaaagaggaaggagacacgaactacgaagaatgaaaaggcgacaaagtgcttgtatctgttcatcatacaaacgcagaagcaagacgggaaggatgcatacagatctcggaagctgggagatgggaaacacatagcgtcaaggttgcatctactaggatacagtgtcagccactcagaccgatctctgacggctgggtagtaggtatgtgatggttggtgattcgttagctggtagtttattggctgtttctatattgattactagttgagatttgggctagtcggtgatttctttcactttgccctcactttccgttcctctccgttcctttcctagccctgcctttccatcttgtttctttccaccttgtttctttctctctctgcctctacttctatctgacccttcttctgctctcgcatatgatcagacctcgttcacaagcatgtttatatatacgcatatggctctgacaccctgagaacgtcaagagaacgatggcgctgacctgttggagctggatctcgagcgttgatcttaagcttggatcctggtcgctctctttcgtctgctttttgtcgctgactatgctgtccaggactatctctctgcatctgcttgatctgttcccagaaagctcgaactctatttctcgccttggcacccgtgtcgatggcatgcgtgtgactcgctcggctagcgtcctcggtccgtttgacactgtcggccaaccgtcggtcacgtcacgcagaccgtaaagaaggacatctgtttcgccaccacacctgttaagatatccctctcacctttgaccatgctcttctacgactatagggattttcgggacccatacttcgtcaaatggctacaggtcaacttcgaagaagaacgatcctctgctgaagagtcagtttgtccatcagacctatcatgcgtcgatctctc

SEQ ID NO: 818 - DNA, 637 bp, Xanthophyllomyces dendrorhous
caacactctgtcacgtcgatgcgtatgggccgatgctgtcgcaacagcaacagagtcgactgggccgtcggcaagaagtgtatggtcactgacctcgatctgaagcaaaacaagctatgtacgttgacgcagatctgcatgaagtctgttgagcatattggtatttaatgtgacatcgagaatgtagagatgacagtcatgcgacaagtcggtcagatgcctaacaggttgatagcatacgattatgtcaattcatgattgtcaccgccggatagacgtagaacatgatttgcggtgtgaaaaccatctgtgccttgactttgctgtcgcgcataacgtaatttattctgtttttaacgacagtatcagctcaacgaattgatgatttcaattgcatgatagcgatatgtgcgtatgtagtcacagtgccgttctagttgtagtgccttttttatacggcaagttgatgtaaaacaacatcacaaacttgtcgttgacaatttcctttcccctattgcacacttcaaattagtctactgactgaacatgaggtggacgcaaatgtggcgcattcaaggttgaattcagttttatctacactttcagtaactgagtatgctcggagtagacaccatca

SEQ ID NO: 819 - DNA, 498 bp, Xanthophyllomyces dendrorhous; identical to SEQ ID NO: 90

SEQ ID NO: 820 - DNA, 391 bp, Xanthophyllomyces dendrorhous
atgtataaacaaactttttgttctttatgctgatacgtgcaaacagcttgcaaagtaaaatttggagaaacttataaaactaatcaattggaaggagatcgaaacctgatgatcacgaacttctcgtgcgccaacacatttttagaaaaacccagcgcacgctattcagtcatgctgatatcagtatatgcgataagacattcattccttattgctgctgtaaacagaagctgaacacaaacgatgacaaacctgagtacctctggcgcctgactttattgatggtaatcacataaatgtgccctctttcaccctcgactgatgctgtctcagtcaacgtcttggcagctatcttcttccatcgtggctgtttctcttagtgtctttttag

SEQ ID NO: 821 - DNA, 395 bp, Xanthophyllomyces dendrorhous
cgcttgagaagcactagctcgcctggcttgaatggaggtgctggtgttctatgttcgttcgcatacttttcctggagatcttgtgcgatcgacatgcccgaacgacagaacgctagcgtcttttgcacatgcttcacatggtcctgggcggctgggtttggtccctcccggatggtggctgagaaacggggatggtagccatagttagcatagattggggtcatgttagttgtggtggagatcgtgttgttataagagaactcggccaacgataatcgttgtgaccagtcgatctgtaaatagtcagtgtacgctcgtaagtactgttcgacgaccgagttgatccgttctgtctgtccatccgtctgtggatggaacgaggtggaaaggttctg

SEQ ID NO: 822 - DNA, 992 bp, Xanthophyllomyces dendrorhous
  misc_feature (393)..(402): n is a, c, g, or t
catatctgaccaagcgaaacgagaatggtagatgatagttttggaacatgccaaacattactcaataaaacatcgatatcctgaccatccacagaggacttgctaaccaccttcaccgttcctttcccgacgacactcagagaagcaccgttcgcgacgaagagctcgtcggagtaggtctcgtaagtgctgaagagggatctgtcgctgacacaagtctgtgtgcaaccagagtcaagaaggaaggtgaacgagggatacaaattctgtggaatgatagaatgagcgtacgtttggtcattctcgtcaggatctcgagccgacaaggagtttgcttggggacgaggtgtccctttgcctgaaccaagtcgatctcttgcgtaacattctgannnnnnnnnngtggaagtcgcagaatttcttggctttgtacttactgtcactcttccttccagtctgtgagatgggattgtctgggcaggctttggcaaagtggccaaagtccccacagtacgaacattgtggactggaaggagtgacagcaagtgcagaggttgactcacggctattgtgaagtgccctggttgtgttccgaagttgcttgtcgcggaggatggctccagaaacgaattcatatgttaatgggttgggatgacccaaagcatcattgcctgccaaagcaggtaagctggccacgaaggattgtccgtgagcggtagtgggtaaagatcggataagaatgagagcatagagttcattgtatgtcatggttttgccggcgatctgttcagtcaaatgaagttgtcgaccgatatggtcgacatggctttgaagactcggagccgtctcggagcgtatattccagacggagctgagaacctgaaaaacaccgacggtgccttgttgcatatgaacagatcgaaggacttcgatctgtttgtgagctgttagacactcacttatgcgctctccctccgagtctgtgagaacag

SEQ ID NO: 823 - DNA, 337 bp, Xanthophyllomyces dendrorhous
acccgttcagcagatcactttcaacagttgattcctatacatgtgtctgattattcttgccctgacggcatgcgagacaagcatgtcgaactaacatctctgccactccgttcatccgagccaaactctgagaagcgaatcatcctcttaggtacacttcagacaggcaacactcagacctccgttcgtgtactcctcgactccggctctcaactgaacatcatcaaccataagctagcctccagcctccctgccaagattgacatcctttcgtccccgcggttagcaacaactgtggatgggacacccttgactactggaccgattgactctgttc

SEQ ID NO: 824 - DNA, 802 bp, Xanthophyllomyces dendrorhous
tcgtctctctctcgtctctcattcttgcctctggctcctcacttccctctgttccctcctgttctctttgcttctctctctcgttcgttgtcgcttctctcgttcgtgtcggctgctctcttgctatgtcctccgacagatgaatgtcatcatcgtacaggtcacaccgatggaacacatcagaagatcttgcctatttgcaaagaaaccacatccatgcaaagtctgcagtgaacgacacagacatgcagacccgaagaggaagacgacagaagaagacagcagaagaacgccacaagaggacggaaggacgatcgttaatgtgtcgtcgacagatcatttccaacagccagttaggcaataaccaatcgacccgaccgcacagtcgacagcagagcctgctgacgataggcaggacgcaccgagctgggcgtgcccgattagaagcgacgacggccagatgatatccaattgctctctgtcgtcttctctcgaggcccgacggggagaagacagacgatcgagctcatccaagacgataggaagaaagaactggagagatctgggaaagataggcaccttcaccgctggcttgattgctggctgctggctctgttattggtcctgatgagttacaaatagggaaggaccgatacaaaacaacaaatacaaaagatacacgacgcctccagcccgcggctttgataagggaccggatgccaagaggatctgataagggtgaatctagagccaaagtctaaggcaagtgtctaacctcgaacccgggcgcacagaagtacac

SEQ ID NO: 825 - DNA, 463 bp, Xanthophyllomyces dendrorhous
tcatttcatttcatttcatttcatttttcttttctttgctcactctcttcgattttaactcaacacccctcactcagcccttttctacactgtacatgtgcgagccagtctctttgtcggtatcaacgcaagtgttgtggtggtagacaaggctcatacctatctgattctctcggcgctcgcatccggtctgtccattgccccgctgcgaacaccatccttctaagacctgaccgagctgtactagcataatcgtcgacaagtagcctgtgcagtcagtcagtgtcctacaggtactcggtggacgggtggagatggaccgtgctcgaagaagggactgactcatttcattgatgacacaccattgaacctcgcgatctcctcatggtcggaatcggccagatcactcttggcaagtatctttctcagcacgggagcttttgccgacccatagtcgctgatg

SEQ ID NO: 826 - DNA, 432 bp, Xanthophyllomyces dendrorhous
gtgaagagttcaacgtgctttatatgatacccggatgtcatcaacaaacacttcttgatcaacttcatacatgagatcatccggcctgaaccagttcacgagtctcatgccaagccagatagacgccggtcggcacagctttcggaggccgcccttcccggagggagccgatcatttcatacgttgcttcgatcctggtgactatctaacaaactataaatcaatgaatgatgcaaggagaagataaacaaaaccgatgtacacttctcgtggcccaattaaacttatttccttctcaggcccacttgtccgtcgggtcacacttcatatgcgtccacatcagttcggcacccagatcttccttgccgtcatcgccttcagtaagttcctcggcattctggatagcccaatgtttgagaccgagtgtgagct

SEQ ID NO: 827 - DNA, 40590 bp, Xanthophyllomyces dendrorhous
  misc_feature (267)..(276): n is a, c, g, or t
  misc_feature (32668)..(32677): n is a, c, g, or t
gttcatcggtggtctcatttatcccggaaaagctctttcgatgaactacttcaaatcgtatggtgttatgagttgttacaacgccatcgcatttgcccaggatctcaagctcgcccactacatgaagatcccacagcgacacaccttcgccgtccagatctacggagccatcatcgccaccttcgtctcgaccgccgtcctgaactggcagatgacgttggaggatgtctgcacgaccagtcagaagcagcacttctactgcaacgnnnnnnnnnnccactgtcttctggggtaccctcggcccaggacgagtgttcggtgccggcggtatctacacctccctgctctacggcttcttggtcggtgcggtgcttccgttgccgttctacttccttgcccgaaagtaccccaagtccctttgggccaaggtccacgtcgttgtgctcatcagtggaggcattaactggaacccttatgtgacgatcggaaactactggcctcaggtggtgatcggatggttcttcctggtgtacatcaagaagaaataccttgcgtggtggtcgaagtacaactacattctcgccaccgctttcgcatccgccattcctctctgcggtatcctcatcttcggcatcatctcctccacttcggctgatgatgtggtcggtgattggagtgtaaatactatctatcaagagtcttgtgactatttagcgacgagttcgacgaataaatatccagagtgcagaaaatacaagatccctgcggtcggctactttggtgcagcgcccggtagtggcgcttgggactaagagtcatttatccttccgcagtcttgatttgtgtttttctccttcttttggttttcaatattgatcttatttttccttttgtaattcgatcattatctcttttccggatctcctcttcttgcggcctgttctttggtctctgttaatcgttgtaataaagctatccagtatgcctgccccttttccacattagttgtaaaaaggatacctacttcctctctactcaaatcgacatttctatgtttacccacgtccgttgtcctttctgcaactgttatagatgtcctctttctttgattctagcttctcttatcttcaagacaaagatctaatgacggatcaatctgaatttccgtgcttctgctcgttgtatcgtaatacgacatcacaagaatgggttcccgatcgtttttttttgagaataaatcataagatcaactggcttcttaagaagaatcacctttgctcttacgccatgggcagatggataggtgaataggtttaaatatctccgaaccgatcgggcatgagtacaggtgcgaacctttggacgacgaaccatcccgcaacgagaagtaaacactgatgagttctcgcaaagaaaggagcgggcaagaagatagaagagaagcaagagaagaggatacatacagactccaaaggtacatccccatgcacaaccaactgctcactattcgcatccacatcgcgctttctgatcttccgatgtagacgtctgcgtttgaatcttctgaagaagcagagtagacaactttcctgttttggtccaacaagttgatgatgatggaagcaagagcacgaagaagagaaaaaggagcagccccatatgaaagagacagaaggaaggggattcaaaagaacatcagagaagggataattgatagcgccgcatgaaagaatagagcgaggcaaagcaaacgatgacgaaccagtctgtaagtagtccggcgacatacatcgatgctagaataaagatgatatggaaccacgaatactacaatcaaagaacgaagcgagggacgacttgacatcagcaaaggtatgttctcgtttcgagtcactccacaaagagaaagactgacattgtactttgtgaagtttcgctcgtcgtctcgatcttcacctactggcgacgagtttccatcgttttcgtcatctgactcggcttcttcatcaagaacggaagcagggagcgatctgtagaatattcaatttccggagaaacatatcagcccacaacgttccttaatcccatctctgaccgttggagaaggaaagtctcgactcacccggcctcgactgctgccaacaaagcctggtacctcattccatcctttcggactgcctttggttgactagtgataaccagctcattctccgacacacctcgcggtccttcgctatcatcctcatcattctccaaccggatgactccctttctaccgacttgaccagctaagactttagtctgagtggccgctcgggtggtcgagtaagcaaccgctgcgaatgtaaagatcgcgcccatgatgaccgttgtcgttcttgcgcctgatgaattggacgtaatcgggttgcaagtcgagtgatgatcgtttggaaccgacaagtcggatgagttcggtccagaatgattggccacagccgaggcgacaagataggttgagtaaatcgagagcatactcgcttgggccaatccagatttcgggttagattcctgaacggccggaaggacagaagagatagtgatcaccagaacgaggacgacgttggcgctgatgaagaacgtgttgagaccacagccagaaccaccgaaaaagacaaagagaacgatggtgatggcgatagtaagaatgtacatgagcaaagttgaaccgacgaggaagtactggtaacgaggttggagcgtagtctcataggactccaacagggtctctgaccatgtatgcgcaaagtcgatcaacaataccaaacccagaaggatgaacaaggatgatccgacaggggctatagagagtatcaggattaatgatggattcaaaacctggaagtatgtatatgagcaatgaaaaatgactacttacagatatacgacccccagaacatgaagaactcattcggaatcaagaatgacaaaaacacaaggacaatccaaaggagaacttttggtccccaccaactaagaaggcacacaaagtcatttctgtgagtgaccgtgtagatactgacgtcagagagtctaagcgataaagacatacccgttctgaatcgatgctcgcttggacttcgtgttgtgcacaccgattaacagagacgataagatgagatgcaacagtcccaaggcaaagcaaaatcgatggacctagagtgaaatgagaacatggatatgtcgttaaatcggtttgacactttcgagtggttcatcgtggcaacttactgcgagcaacccatagcattttccgccggtacaatccatcttgatccaatcccaagagatcttctcaatttgacgtatagccgtgtctgttctcatgagccatgccagcattgaattcagacaaaatatgatctacccatagtgaagagggttgagtgagtggatgtaatcaagccggattgacatgacaagaatgagagatgacttacagcgaaccccactcgggtagcgatcgagcctgacgacccattgacgttacaacagatgaacaacaggagaggatgagcataatatcgtgtcttcgcactctgcgtcaaacccgcactcactattacagttgcacgatttgaacaaggctgaggcggccgtgcccgacatgaagaacagaactccactgagagcggatgtgccaagcgagccgagacttccgagcaatggtatggagagcagtgcgcccatcttgtaaaggagggactagtagtggatgagtagataagagcaagactgatggatggattgatcagataaagactgtggtcgttatggtcttccaagatcagcgacggccggtgtgtgtgggtacgggtgtgggtgtgggtaccgaagctgtgctgacctatgtgatcactcgccacacacgtgacaacccttccacatcatcgatctctctttctgctgctcatcctctatcctaccatcatcatcatcatcatcatcaagaagctctctcttgtatccttcatcctcttctcacaatcagcatggattctctcaccatcagactgagatccaaagagggaacttccaggattgtcgtagcaaagaccacatccggtcaagatctcgctcagaaagtcagttccttctggtttatctttctccacacgttaaatatgctgacgacgatctttacgtatcctatgtttctgaacgatcaaatggaacaaacaattcagatcatagatagtgtgccagatgatgtggactctagttcaataaccatatccaatcagcctggctcgtctggcgagagactcagccttgacgccttgaccggtagatcagtgagcgacatggggttccagtcagtaatcctttctttcatgctctggacatcgatgctacaaccaagtcagataatagatttcttacgattctcagtatttattgatgctctcagaaatggcgaacttctctttttagaatataaaattggggaagcgccgctcaaaaaagcctccgttcttgcgcccacccatacagccgcaacattggcgtctggcttcatctcaacccctttggccgatgtcccaactgacccgatatcgacagtcttcaacgcgaaccgggtagacctttcaaaagtcgatgaagcagaaggtgagcttgtcttagtacttgtgtcaaaacggcgccttctcacggtatttaaccaatcctcttggtggtttctacagtcgacaaatactatcgatcactgcacggaatgattcctcgctcaagggataataaaatgtgccgacacggagataaaggaatgtgtgactattgtacgccgttagaagtgagtaaacgtcctgctagtcattgcataccgttcatctgattatacatttcttatgcctcgcggactatcttttgtccatgccagccttacgatgcgaactaccatgccgaacacaaaatcaagcatttgtctttccctgcatacgttcgaaagatcactggatcagtttcagcctcccaaacgtctacttcgagtacatcgttgcctcctttggaccctttggattacaaagtcacgataccttgtccgtccgggtcacatccatcatggccgtccggtatctgttcgaaatgtcagccctcagccatcactctccaatcgcagcctttccgtttggtagatcatgtcgagtttgctaccccctcccttgtcgaccggttccttgagggttggaggcgatcgggccagcagcggctaggatggctgattggaaagtatgagccatacgagaatgtgccgatgggtgtaaaagctgtggttgaggctgtgtgtgagccgatacaggagagtgaagtcgacggtgtgtcagtggacgtgccttgggatgaagaaaagagcgtacaggagcttgcagggtggtgcgccaaaggattagaagttgtcggtgtgctgtacagtgatttgacaccgtgagttatatgttttatcagggtcatcttccttctgagcgtttaactcaaagactcaactctttctcggcgctactgatcaacaggtcaccagatgatatcaccaaggttctctacaagcgacatcctcaatcgtactatctatcctctctcgagcttcttttctccgctcgcctccagtcggctcatccattatccactaggctatcgcctatcggccgatttgggtctcggttcgttacatgtgttttgacgggcacggaagagggaggtgtcgatgtcatggctttccaggcaagtgaacaggcagttgccatgttggaggcggatatgatcgaagccagtgtagatccaggaattgttcgcgtcaagagagaaggagaaaagagatacgtaccggatgtcttctacacgtaagtcttccttcaaacctcttttgcccacggttctttttttatattaaattgatctggccgatgcgacgtgcgcgatttagattcaagaatgaatataagcttcaagtcaaacaatcagccaaaccatgcttcccagtcgaatatcttctcgtcaacttgacccatggtttccccgtttcacccgcaccactgtttccttctttcaaatttccggtgtcaaatcgattgctgtcgtcctcggtcgagcagccgtcaatgagtcaggttatcaagggactattgccgatcttaggagacggctctgctttagatttcaagagcgaagaggttgagcgttgggcaggtgactgggagcttctaaggtttttgcagaaagaaggaggtttcaaccaggttcgagacgattttgttgctacttgtattgtgaattcgtcgaacgagataagctcacccgatggctgtattttctcaatctgtctttttctttataaaggaggagatgaagctgctttgtagggtagctacaggccattcaaggccagaaggagaattcgacgcgttgatggagctcgctcagacagatggatggaggaatctgatgagcattgttgaagctgctgctgaaggtgaattctatttctcttattcttcgtcaggatggcctcacttagctaatactctctggaaacttttgtagcacaacaacaacaacgactacagcagcaacaacagccacagacaggatccgactcgatggatatggatggtttcgagatcccaccagatctagacgacccgttcagttcaggaggtggcggaggtggtagcgcggtctgtccacattgcactttcgaaaacgatcacgctggtggtgattgtgacatctgtgggcttccgctcagtggttagtagagtgtatacgtgtgtgtatgtgtttgtgtacaggttatgggtgttgatcgatgagcgggaatattcgaatacgagtttgattctcacctaagtctgttgctacataacccacggacatctgggcccgatgttccgcaaaatgaaagaacaactgcagagagggatgccagaacccaaacgaccagctatttgccatctgacgccctcatatacagagcgtacgcacatcgaaggtcatgtctgaatctcctttgtcccctagcaggacatatcaggatggatcggacgaggatggcccgtcaaagtcatcgggtgggcagagaacaaagactgcgttgaaccggacgtccagagcttgtgtatgtgtcgatgcttcgctttctctcacctttacccgatcgagataggtctcagtatcttgggagaagtgagtgagaccagagtactatggatttaaactgatcttttgtttctttttctccactgcttttacgtctgtttgtgtatccaattccaccactctcactggttggggtcgtgctttgcttgtatttccttccgtgggtccatcaaactctcgaaaacgaatcatatttgtttcatcagaacaattgtagaaaacaaaaggttcgttttagtcactctactcgatgcgttgtattcttaaatgaagactaagatggttgtgcttctggacacgtggcgcgtctcgctgtagatgcgatgtataggagcagaggatcctccctgtaagagatgcaaaaacgctgggttaagttgcttgtttgaaaagccagccaaggatggacctcaagtgggcgaagagtacgtatctgtatccatctttgtctctatgctgtcagtatgttcttgcaaagatctcgtctgatggatagagaatggggtttcaacggcttccagacgaatcaagcatctcgaaagccaagtgacgtccatacagtcgactctgaccgaattggtctcgaccctcaaagccacagctggtctacaagccccaccatctacctctctaactgagcctcaaagaacttctacatatcctcccccaccatcagcgccatattcgggagattactatccccattctcatcctcatcctcatccccatccccatccgtcgaacgctttacgctcgcctcaccatggatctacatcttatgatccgtcaggttatcctgccaagtattcgtcctcaaactaccctccagataccttcaactcttctgggtatcaaaatcaatcaggaagcgcaagaggagatgtagagtcgtcttttactgacgggcgcgcttcgtcgagttatgcttcttcgggtttggatcagctaagcaacgcgcttctcatgtcaaacactcttcaagcacctggctcaagctctcttcagccacctggcgagaccaatcgacgttcgagtagaccagggggtctggctgatcatacatcatcgtcctctcaatcccttcggaatttgtcaaacacgcctttaagtatcttaccaaatcacccctatccgttgcctaataggctgccttggttagatacgtttggttctcaaagaaccactgggtcaacatctggaaatggtgctggtaatgctagtggtggagggaacagctcactgtcgtccacaaatacgagtaatcagcaagagacatcctcatccatctcgccttctgtttcagataaattgaacaatcgagcgagctcaacacttcgtcgaacgacttctggactcgatcagcctcatttctatccatctctaccgcaaacgtcggcttcaacatccacatctaacccgtccccagccacaacttcatcttcccatctctcttcatacccacatccaaatcatcatggtttgttcgcacctcaaatttcatcggccaggacatctccagccggttccgaagcggatgagaacgaactagagcttgagatggaactcccctctagcgcattgactaatcctctaggagctatgggtgaccttgctcaagcggccggtggtcaaatagatcaagctgttgtgtctgtcaggcaagaagaaactgaggaagatggaggaggaataagtgcgttgatgttactggccggggcaggtagtgaggcgaggccgagtaagcgcgcgaggttccaggataacccgaaagaagagcagagtcatgagaagaaggaaaagctaaacactgatacgggaggtaaaaggactagtactagtggtgcctctagaggaggcgcaggaacaggccgcatcaagtcagaaagaggactaggagcagcagggaataaaccggatgaggaaaatggagggataaagaatactgctctggaagaaggtccaggaatgagaggaagtattggcggtccacctgtagggccaaacggggtcattttggactgcgttgatgctgggttggtaggagacgaggaggcaaggacgttattcgagttgtaagtgaaaccttctcatctcttctcgctgtcacccttcttatctattcgaaccgatgttgacacacgcctttgatcttttggggtatgtcgttgataggttttggtctggtgcccatcaatttctaccaatatacgaaccgggtcgagatacttttgacgagtttgtcttcttttctgtctttcacatccttgttttgtgcaatagatctgattaactgatcactggatatcgtggatgtgaatgaacccatatagattgaagaggcggtctccattctcaatctcggtcatgtgtttcacgggcgcaagaatcagggatggtggtcgtaagatctcttattctatttctctcttcatatgggtttgaatcgtctattcacgtctcaagaaggggttctaatggtgatttcccacaggaccaagatcggaactacaaactaatctatggtatcatgttcgaaagatctctcaggaaacgtgcgtagattctcattttgtgcgatcaagactacagctcgttgagaggttgatctcgcctcgttttgacttcttccggttttgtaaaagactattcaaatcacgtactcgagtggaggccgtacaagccacaagtgagaacatttatatccgctctacttggtttcgcgtatgacatagtatactgatcagattcattggagagcatgctatcagtcctcatggctggctttaatgagtacggttggcttctggctggtcatgccgttcgactagccttcgaaattggtacgttgtatctcttttctcgtcagatattcaatcagtcgtcgaacagtcggactcacatgtggatggttacatgaaaatgtcgcctgtatggctggcggagagtaggctgtcattctgctttcttaaagttagttaggagtggaatgggtgccggcaagacacctcttcagctagaagaagatcgtccgctggtgatcatgtctcgtctctggttctgtctcgttagtactttccccatatttcttcctcttcaagatgatttgtttagctcaaatccgttcttcttctgtcatcaccgtgactactgttatctcgacagtacctcatcgagcatcagatgtcgtatggaacaggtcgtcccccgatcgtcagagaagatgagactatcctgcgctgtaaagagtttttgtctcatccgttagcggttgatactgactggcggttgattgcctctgtggagataatgaaaattcgaggtgagacaagaatcttaccctatttctctacggtttgctctgcctcttcaaacttcgggataggtattagattggtttgctgattttaaaatatactgtgctattgtgtaatcaatatcgtatcaactatccgtctggaccggctgatcaattgattctgtagcacccctgcatcttcagttgtataaccttccggaagacgtggcagtcgggacggacacgctagaaaaattgcagcaggccaacttggatttcaatacttggttcgacgagtgggacgctcgaattggtgaataaaatttcaactttgtaatatatttgctgaacaaatcaatgctgacctgttctgctacggttgacttcatcttcctgatgggttttgaagctgagaagttcggacctgagagagaagcatttttcagacagtcgttaaagtgagtttctctctcgtctttactgttattagtcgacttgtcaaaattctgatacaggaataattcaccttcaacgttgcaactctccttctaaattcaagaattcgtgagttccattgaagcatgttctgtttgttcaatcagacgtcgatcgctaatccttatccctttgtaaaaccatccgtgttgtcgtccagaaaaatgttatgcacaactgttccataactgtatgtaaattctctgtcgagtatcgaaggttttccacatcagatccttagtaggtttgtctgtcataggtaccgcattgcgcaagatccacaacccggccgacgtccagaagatgcatccagctcaacgagagcttgctcttctcgctcttcggaacgctcaacagtgtattgatatctgtctacatgccgaagcataccgagcgtctcttcctttcgctgtgcattatacccgttcgtctcttgtattctatcatggttaatgttctttatatcctaaaaatctttctcttgggctggatgtgcatgtatagatatttcggccgcttttgcggcgactcttctcattcggttggcccgaattttccctaccgagttagatcttcgacagacagctcgagatgttgagcagctggcgaaactcctagcatccggtccgtccctatattctgtaacaacttcgttttcttgactacttgctaattgcttgtgttcttctctctaatttgggattatcgttccaaagtgcctgctggtcgatatgcccgctcaatccgactaactcttcggtccgctcgaagacgtaaagtgatgcctcctccgtctgcacttccatctcctacgagtcgatcaacccccttaccttctgttgccaagaacaccactgccaccacgccattgtcttcagaaaactttaccaatgtgaaccaaacatacgctcagtccacgatgctgcaatccgggttgggaagtccggtagaggaataccctgtggaagtgagccaaacgttcgatgcgccgacgacgacgtcaagtatagagtttgagagtccgccggattactcggtggatttcgattggtcttatacggaggatctgatgggcaaggttaatccttttaattacatgttgtcttgtaaggacttaaggtagagtcagaagtaaccatgctgacactataatgcgggatctgccttccaaacagatggggctaaatatgaccgaaggaggccaagtacccttgtaagccatttttatgcaaatcgggttcagttgatactctatatatcctaattaccgattgtttgactatctgtcgtttaatcttcaggtggctacatggctctgatattgggtctagccagctcccttcggcgggaatggaggtttgttcacgggatttgctctcttctgttaagttatgacgccgcctgatgcagtgattttcttctttctttgtatccttcgttcttttagaatttcttcctgcgtaagcttgcgctcaacttatctctttttcgtcctagtcttcacatgagttgatcaaaacctctatcgttctcgctctacagcttccgatcttgacgttcgcctgttacacaccagctttggatctcagtcatctgcagccggagaacctactcaggaagattcattcggggagatttggtaatctctgcgtgtaaaaccttccaaacttgatttctctatccttgtcttgttttagcaagattgaatactgtaaaggggtttgatattcatttttattctcgtttttactaaaaagggatttagttaatttgaggcttcatgtgagatgtattaatgtaaagacttttgctctagactattcagttggccacaattcagacaaccggttgatctctcaatttaggctttgaagaagcgcagcatggacgatccactctttgagacagttcataggtgaggctggaggcagcagaaatgatctagaacaaggcatgttcgtagaaatttataggcaaaacgacgtagtgacgagagtggcaaccaaacgatgcaagcaagagaggctcaacagcatctactttttgattgattgctctgtttcctagcgacgtcgatgtttcgacttcttaatgagtcttcgtcgtcttcgtaagctgttaatgggtcgataggatgagatttttcatgctcccacctttcagaacgataaacgaagatcacaatgcagaacagatggatattaactcgaagaacaaagagttcgaaagaagaaggatttaaaagaaaaataaacagaggcactcacctttcccaaactcgtttggccacatactcaaaaatctcattgacgccctcgccagtttttgccgaggtggcaaggaataacatcggcatctctcctgatacccttaagggtggaggaattgttggttcttccgttccgccgtcttgtttctgggcccattcgatcgaggtgaccgttgccgctgacgatgaacccgtctggtcttctgcgatagatgctgagggagatattatgcccggtgtagtgacaaacgagagactcgatttgttgtgtcgatgccggctttcgttcctactgtctctcatagcgctcttattccgccttcccgtctcggtgccggagtcagatctgggtctcgagataccttcggtggttggatctgaagatgggttgggtgtataggtagaggtgataagaggtgacggttcatgggtaaaagtagtgagtgggccgccgctgatacttgcaccattgggtcgaacagttgacgtgctcgaatcagcggaataggcggatgaagcatatgtgtcgccactttttgatgtttgactcgtcatcgagtctgatcgtttgaaggtctttggtttgtcgagcgcagaggacgcgaagaaggaggacgatgaggataaggaagaattagagggagaagccacaccacctatggaagctagcgaggaggacagagagagagctgagggagaattggacgacgggagcgtggtcgtcgcgtctgacagatttgttcgggccgtattgaacgagacgaatgaagaagctgttgtcttgaccgaaggtgtgcccagcggtttcacatctccaggcacagccgccaaaaggttttcgttggaggaagctgtacgctgtgctgtagtaagagttataggcgctggtgataatgatggtggagctaatggaactgattccttaggattgcctctagtatcttgttgaacggcataagggtccgacggtataggatcttctctcgagagatattgcagttcaggatgatcacggaaagaggaagatggggtgtgataaaccgtaccagtgtacgtatttgtaagctttccgggagaacacgaccgtgttctgtgattgcctggtttcaatccggaggatattgaatggttaggaggaatatgacaatggtgaatatcaatcgagcgtgtatgattcggctctaaagatgtatcggtaggaggatcagatgatgcgactccgacagatgaagagccctcaggtatcgatgatgaggatgaaaacgatgagaatgatcgaagacgagctgccgctgctgcaaaggatgtcgagaagctggaacgcggcccactcttctgtttgttggttccgtcatcgccatctgttttatctacgtgctgctttggtagtcgaggaggaatcaattcttcccatagtttcctcacttcttcatctcttacgcattgtacctcttcggactcggctttacgcccgttcggctgtttgtttgaattcggcgacgacagtctgtccgatttattgccaacgacaacaaagcagaaccgacgacggtcctctaaagttcggacggggcatcggtcgacaaactcataaaaccacttcttgagtgagactaaggtctcaggcttggtcacgtcatatacgaggatggctgcgtctgatcctctgaagaacgcagaggatagcgaagcgaagcgttcttgtcctgcctgtcgagatggatataaatgtaggtgatcagcatacagatagagatgctctctttagacaaagagacaaagagacaaagagacaaactggtcacgaaccgtatcccagatggccaggtttacagtcatgtcctccgatacgggtatttgttgggtaacaaagtcacaaccaatagttgccttgtatgctgtagagaatttctgtgagaggtactgattcctcagacttgtctttcctacactatagacatcagccagggatgagaagattgaagagagaaaacagggaagacatccaagtatcagaatgctaccgtctccttctctcgcttcttgacgttcctgttaggcctgaggagcggtcgactaacccagaatctccgatgagcacgaccttaactgagctcattgctttcctcggcttactcccggttttaactgaaccatgaccaacaggaaacccgttcggtgagaaaatttccggagttctgtctggtggtctagaggcagagctctgtgcatgtgtttgtcttgaagaagacatgtggtagtgaaagagaaggaaagaaacgaggcaaagaacgaaagcttgatggttgaaattgatccgagatagatggatgttcgaatcgtcataaatccaaataactcgattgaaaatcgtgttatctttgttccgttttttttaatctcttctcgtacatctctttccatccttctcactatggcatgatgaatacataatccagggtaacatgatgagatcagacataagcagtattataatctcaaatcccaatacgcaaccggtccatattcctgaaagcaaaggttcgtctgataggggagagaaaaggaaatggaaagacgaggggttcgaacgtgctgaaggacacatgaggtagaacctatgcctgtaagatcgcgtccgaaacgaatgaacaatataggaaatatcacctgggtcaacacatcattcgggaagggtttaagatacgcagagaatatacgcacaaggtaggcgtaagatttgagatcgacgagccgttcgagatactctcgctatgattgacgagcaaattacaagaccataatcagcactctgccaaaaaacacaaagaagaatttgcacttacgtcgatcaaagcttctatccgttttttgatcatggccgtacttggtgaaaatctagacgataattgcttggtgacttcattcattaaagcctgtttgcagagaggaagagcaagggtcaggaatatagaagaaagagaaaaataaacccaacatagattgatagcttgcctgatgggtcatggtctttgaattcttcattattcgaactatgcacgcctacaaacgagaaacacatatccacttattcagtattggctaaaagatcgactccgatatagaaagacacaagacagggggcaacagaagatagtctctcacctctgttaagaacctcctctcttcgtcaaccttctcgttcgtctcctctctttgctcatttgtctccaccttattggcgaccatggcgatttttatctttgctaacggtgcggtgaacgcgtcattgaacacaaatgaatctgtgaccgcaacatctttactctttggatgcttcgtcagcaccctgtatttgccacaggccaatgattgaagcgttcgcatcagctctgaatcaggaatacccgtcgccgatctgatatcctgttcgatcagatacacgcaagaagatcaaacagtcagagaagttacggtatcacatgctcagatttaaaaacaaaacaaacctggtactctagctcttccccttcttccagattctcaaatagaagtagcgtcaccagagccaacgtcgagacgttgagctcgtgcgttcgattcttgaatctgaccttgacgtcggccgtccctagatgtgattgccatgtcagtcttcgaccggaatgtcttgaatggtagaaccgttcgaatgcttccacctgagctgatagagtcgaagggaagatagtagtggattggagattggtccctggccaataggtcgacgtaagcacagtcacagacaggtcaaacgaaggtgccttttgtaagagttgtttaagaaaaagatagccaaaagttagacgtgtgacctcgaaaacgctaactggacgtgtacagaatcttgaggacattgaataggcaacgtacggcagaagtgctggactggtgagcacggtaggcgtccatagtatccccggacacacgcatgtccgtgaacataccttccagtttttgagtaaattgataaccgctgccagaagaaaatcatagacaaataccaaacacttaatcaacacttgtcctatcaatcgcgcaagtttgagagaatatggaaggaaactcatacctttcgacctgtcacaatcgcgggcgttcgcatgaaagaataacaggtaaatgatctactcgtctcaatctctaattgtactcatcaattgattgatcgaacataccttgagttttgccaccatccctctctccgcatcgtctgaaacacttcgactattgatcaatcgtttggccagatggtttttgtagtatcgctcaaatacgtctttgtcggtcaagaatcggaatacggtaatcgctttgttaagaatgatctgttcaacgatgaacacaaaagtattaaaatatgtattcattgagcttagaaaacggtaagttcgcttacgtcgacttcatcttccgatttctatttcccgagatatcaaatgtgatcaaaggtcaattaaacaagtctgttttctgactcaagagcttcgttcaaaaagatgctcacgcctttcaagccttttttgagattctcgtcgatgaagagagagatgaactctgcgctctttggattactattgataaacaactcgaaagcctagagatgggagaaaagaagaagaatcctcgtacagattagacataggaattttacctcgattttcggtctttacatctcattcagaaacatgtagtagagaagacgcacctcgttgatggatgtctggacgccaatatcaccagcgaaagctccgtcaagaactttgtcaaacttgtccttgagatccaacacctcttgaacccatctcaacgcagcctgcaacgccgctgccgcgcctcctccagctccagctgatttagctttcgacttctccttttcgttttctcctttatccccttcagcgacttcctccggctgattcccggctacctctgtgcttggccctgttgtaaccatgattccttggtttatcttctccccacgctctctcacattttctttcaaagccttccttatctccttcaatccggtcgggactcgactaaacaaagtatacatccggcctatgtcatctagtctatcaccatcaagcatgaagactaggccggagcctggcatgttgatgatagatcggaggtgagcatgaaggaggtgatcctctaagatcttttggagcggaggagacgtgttgttcgataaataatgttgcgctcgagaagattcctcttcaaatcgacgttcgacctaagccattatcgaataaggttagctggttggcataaagcaggaacaaaaaagatggacgcacctttcgaagatatattcccgcctcgcattcctccaccaatctctccccttccgccttatagtacactgctgtccactccaagaacccatgctcaaaatcagcctcatacacgctttttccagagctcgctcctctggcgccaatacttgatcttagctcgaccaagatgagcataacatctctgacagccgaacggttgatgacctctccgtctcgctcgagcctgatctgagatagaagagtagaaatgagttgcgcctcgattggatacatcggcgaacgtagcattgattgaaggaacagcgtcttcccaatttcgagcgtcgcaggaacgccagcaacgggaacatagactttgtcctacagaacccaatcaaacggcccacatagtttcagtcatcacgtcatgatgttgacctgagggtatcgagaagacggaacgtaccatgtatgcgagaacagcacacatctgcgtgatacatctctcgtggtcgtcccatactgctttcaaagctttgaggaatctttctccctctgctgcccgttcaaccgaactcatcccgtccacctgaaggtctgaggtagttctcgattcggtgccttgaccgaatgaactctcgttggcactatctttcatcttccctttaccttttcgatcgaaatcattggagaagttggtggttgaggtagctgaggaggagcttgtcggatgcgcaggtatgagaggtggtcgggtgaaagaagggacgatcctactcttagcctccgaggtaagatgctgggttacgagctccttcacgccgttataaagaacatctccctaaacgccaaaagagatacgtgcgtatgtcaattaccgaatcttgaacggctgattcacagagacgtaagagaattagaaactcacccgtttgtgacggaccatactagtagtgtatcgatagttctcctcgaatctaagcttgctcacgttatggttctgtatctctttgattgccaccgctaaacgtcgccaggactcgtccaaggagacatctagttgaatctttctcgttcagatcattcgtccgccaagttgcgttgagagaaatcagatttaaatacaagggatatcattgatagcgagattgtgaaaaaagaaaaaaggaagacgagcgaggactgctactcacctgtctgggtggtctctgcggaagaccagaatggatggttcaaattaaattagaaagatgttccctctatagaatcttgttgatttgtatcgagcttctatcaaccctcgacgtgaattctgaatagtagcttacaattttaccctttggtttcttgagtccatctttagaggagagataatcggagagataggaacgatgagtagctgggcatcaactggtggactacatgtgggagattggcttgacaaacgtactcatcactagagaacttctgttttattgctacacgatacgagagaggatttgagtagtgctagtgatggtaagctgatgacgagcgtgtgtgatgtgtgcaggtaacggttagttgactggctaattgggtgttgggtgtggacgaccaactctttcgatcgcctccacgttcttctaaggatttcttcatctctcatctcttagagaagctcacatcgtattaaaaatattcggtcgtttctccttcttattgtctttgatgtgtctatccgttacatgtgttctctaattttgttcctataaagtacatcttcacggttgagaagagatctgaaaggtcagaattttggcagttaattatcgatgcgacagccggtaacttgtatctaatcaatagcatcgtatcgcattgaaattcttctaaacactcgctcaagcagatgtgtagatctttccgatgttggtcaacttcccgttggtatccagtaatcctatatgatgtattcaccaaattgttatacatgagtctcttatatgtcatcataacagagaaaagaggaacgaaaaacactcaccccacgtgtcggtggttctgaaacctccaaaccaggcgtaccgctcaatccaatcgtacgaatccaagatagccattgaagaattcatgaaggcagcaacatcgttcaggtccgtagaagtcgaagcccactcggtgatccagacaggtccaagactggaaaactcgccatgcatactccagatgtactgcccaaagtaccaagattgagaccaaaggtctacactatctccataccagtgctacaaccgagaaggtgtatgctcagtcagcgaaagagagctttttatcaggaatcatatcatcattctgggcaaacgacataccaaaggaaggaaatcgatgttgcagttgccgtcgcaggcggtgataaagtcccttaaccactgtcgaccagtctctgatgacgtgacagcaggagcctgacatgacaagattatagatacgtcagtcgtaagataccgatgctcaagaagagactccaaaaggagggcaacatactcctaatcggacaccatggttgcttctcaaaggttccaggtattcaatccatagcgccgcagcgtctgtggctagcatattagcctgatcggctgcatccggctcgttgaacgccaagatctctgtgtatccacccgagatcacgaagtccacaaacgagctgatgtcaactccgttccagatcatggggacgaacgaccctggaccgcttcctaaaccggtggtactagcgggtgtccggccccagttgtatagccaggagagttccgagctggcactcagcgtcgcaagatccgttactgaggtggcagatgatgggaagccaaatccccttttggggtttacggctaagctgggcttcatcattgtggcgatagttaggagagcgggtgcccagatagtagaaaacatattaagtctgttactgtaaagagtgttggaaaggagggcagtcgaaggcagattcaaaagagttggctctttatatcttctccttcttgcaaagaacatgatatcacctcgttcgagaaccgttctcaaagattatcttggtaggccgggtatgttctggaacaagaacatacatagattagggttccatgaagatgaaacccatcaggaggctgacaagacactaatttcgactccaaggagacgaaacattgttcgaccaaagtcaacaacgatgatgtatatatatagatcggattaatctgaaggtcatcctagtcagaatttgtccttgctctgcaccatgggtatctggtcagtaagtcagtatgctattgggtcagtcaatcaagattggaaacttgaaggtcaaagtggaacagattgatcgaccagaagaagttataggcgcagtctcttgtttcgcatcatcaccgtttttgtggtgctgccggatctatctcgtagcaagcgcgtccaagcagatcgttgaatacagacaaccacatatacacatacacatcctctatgtacattgaatgatgttcacagaatatattataacgaatagaaccacgtgagccagaagaatcaaggggaagaatcaccagaaatcatcatctcctcctgtcttctttcctttggtgactacagcctgagcctgatacatttcagcgatctgagaccggatgatgaagaaaagagacaaaaacatggatgtcaaccacgtggacgtggggccgtgaaagagaagttcaaactgagttacctgttctccagaagtcgcctggtcggcatccttgtcttctctgatacgaaggaaccttggaaatcgaagagaaatccctcgttcgtccgcctgaatcacagcagaaacaagaagagataaaagcttgttagtcgttttgatttctctgtttcaaaaacaagacaccttgaacgatcttgcagcgtgaaagaatcctggacaaaccaatccttgggcggcggtgtatatcggactcaaactcaaatcggctgtcaagacctcccagacaacctttggttcaaaccagatatctggtttcgctccgccaacctgaatatccctcctcgctccgccagaagtttcgagatctttaagcgcgttgtaatgaatttcaagaatctcttcggaaaacccggttccaatcttgcagatggtctggtacttttcggtatctggatcgtaacacgccaggaggaaagctccataaacgtttgtccgtttcccttttccgaagtaggcaccgacaacgaccaagtccaatgagtctcctacacccgatagataatccttcttgagctattttgtgcagacatgatcccggtcgtcatgatttcatataagtttcagagtaaaaagttcaagaaagacgagagaatcatcagaactcaagcacgtgaagtacgaagagaagcagaaaagccacagaccttcaaccagttcatacttcttcgactgggttcgtacgttgaatcattcgtctccagcatcttgaccattaaaccttcgcatccgtccttgacactctcctccaagaactgttggatctcgtccgaggtctctccatctgaagatttcgcaaaggtgaattctccctcgacaggagtgaaattttcctggagaatcgcccgacgttcatgtagctgcttctgaagaagagactgtatatcattcgagagacatatcagctttcagcgctttgaggattcttgagagatttgaacaaggaacaacacacttcgccattgagaaagagaatatcgaacgcaaagatatggactttgatcgtgatatcttctgccttaacatcctttcgctttcgtctactcaactcttggaacggtagtagcttccgttcaaccgcatcccaagcaaccgcctcacaatccagtacgaacgatttggctgattctttcacggcctgtgattgatggcatggatagtcggatgtcagtaatgtctattgactagggttatggcgcaaggatatccaaagaacatactcgagggagctgatcgaccaaatccggatactttgcagacatgttctcggaatttcttgagaacacagtgatctttccatcttcttctcggtgaatctatttaaccagagcaacataaaccatgattcgtgttatcagcgcatatgcaagataggacttgatactttgaataagcttacttgagctcgctctccatcatatttgtattcgcacgtaaactttttgccttcgaatcggtccaggacttcagtaatggctttcgttggctttgccaacatgggtttcagaggaactcctgggcgtggtggtgacagaaaacataagggaagagaggcaggaatgattcgtgagcttggatcgatactcaactcgcgatagaagggagaacggagatagagggcgaaccggcggtaagcttgcagtcatccttcagcccttccactccgaccttcatcaaagacggaatgatcatgttcaacgtcggaagttcactataaacagatttgaccacctcagttccatctgtcaaaagagtttgcatgtcttctgtcgaaagatttcggtcggctgaaagaatcaatagagagggtcgtgagattggaagcatataaaagctcaaacttcgatggatacacacagtttctaacgataacacaggcttgtgccagagcagtgatgatggtcttttcagctaatccgattcttagcttcccttcgagtgaacggatgatgaatttggcctcagagccttgacaagcactaagcatctgcttgattatattgatcttcttgctcatagactgatttattttcatttcaacaaaggatgttgtcgtgagcatctgagccaatctagagaaggagacagaaattggcaacaaaacgtggaagtacatcttttccggtcgaataggcaatatccgtcaaccttgaaaacacgaagggcacagtgagcggttttggcttgaacatcgtcggttggtttgctcgcgagttctaaagagtgaaggggaagcaatgcatcccgagatagatcatgcaatacgttagcgcgtacagatagcaacgaagcgacgtaaagagagctgaccattgcaaccattccaagatcaccctccttcttgagatcagtcttaaccttggcgactgctcggccggtcgattctccaatagcctttatcagaatactctctccaataccaagctcgagaccttgatagtcagggcaaagctgttcagtgatgaagtgaagtcaagaatccaatcggtcagtcatcgtctacgtttcaagatggcaaagatgagaaacacaagcagttctacggtcgatcacttactcgattgagacatagatagattactttgagtagtccctcagctcctgtctctcctcctttggcggcgtttccacctgctttgactttactacttgcagtctttacagcacccaaatagaaccagatgatcaatactttggagctcccagactttatgaattctgactgaaccaacctctgcgttctttcctacggccagtgccgagccctcaacggccggtgcagccctctcaacgactaaaactagaaactctgtaaggtatttcaaaatttctagtcgtttggtggttccctcgattttcatgaagcaatgaatcagcgcagcataaggaacactgataacgcatatcaaaagtaggtaaagtaagtcaggaagagatcagaatccatctaaacattagtagttatgaagaggacggacggatcagttggtccccatttggggtactctttagaagcagaggaaataatagacttcgaggaagccatctcagcacttgttatattgacgcccaattgaaaggagattagttttcacagaggaaacgaatggtgtacacaactctgagggacgtacatcgccgatgctgccttattgacaactttggtcttgaccttcccctttccttcaaccactagctcctcctcctccatttctagctcactttctccctcctcttcgcttccgctctcttcagcgcttgcgctttcctccactttttccatgtcttcaccgttttcctccttgtcgatcttcggttgcccgataggtcttttcttgagtgaaacagggacttcatcctcatcggatacagctatgaatgctcttttacgcttatgtcgaacgccagcaggaagaggagcgtccgattccgtctcggacacgttggacatatcctggtcttcatttttctcgaccgcggggaaatcgataaaaggaagactggaggtggtcttcggtttgggcgaggatgatgctttgcgttcgatcgttttcttaggagattgagaagcttccacaactttgggcactacgagttacagtgacacaaccatcggaaccccatacgagttagtgttcgaaaggttgaacacatgaagtaagaataaatcgacccaccaccggtctctctctcttcttctaaatgagcatctttcacatcttccttcactcttttcttggaccacatattttccagactggattgctcttttggaggaggtgctacacctttgatgtgactaaacaaggtcgactgtttcatgtctcctttcggcttggcccttgggtttgaagaagagtgcgccatcgagctagagatcgaaccggacaaaagacgatagcttgaagtacgagcggatttcaatatgaatagaatagacctgttgagacgaatattcatgcaccagctgtacgttgggtgcaatctatgagaagtatatcgagtggtaaagaaccggacagagagaagagagggtgtgtgtgtatgtagaagattcagatcaagttggctgatctccaccggtcagactaggcacgcgtaatataatgttatcacgcgtcacacacgcgtcatgcacacgtccgacgcgttctccaacgcgccgggactcttcagatggatcagtacacctccgtccttaatgatctcaaccatcccaacgaccgtggggacgagatcagatgataatgctgagccgaacagaattgggtaaaaagatcgcttgtgtttgccatgctttctaaaatcagacgataaagagcatttccgacaaaattagctcaatcacacgttcatctcgggcttcggagctggcggatttatcgagaaggtttaggacacaacgataacattccgtcgtgagcgacaccgattgatgagcagatggacggccgacgctacaaacgctttatccttgcggcctcgcgagatgaacacgaatgctctcacgtacgactgtagatattgtcaccgccatcagtgttatcaacagcataactcccgctagatcggcttccctttgatcattcagccagcgctaagaaaatcactatcaccattgagagtctatccacgtggatgctaccacatgggcggtccccatacatagtgaacccgggttctcgtgtctatcatgatttcgtataagaacggcgcaccaagtttagagtccatccataaacttgatcctttgcctctcccctcatacaactcgtagtcttcaggttggttccctccgtttgattaccaatgatgaagacaagaccgagatcaagaccaactgttgctgttgctatcataatctctgtcgctgtcggtaccgacattatctgacctgtcttttctcaacatcgcttgcgctggtcaatcttccatcatgcctcaatatcgatcgatctgtatattgtgtgtattaggaaaagaaaagcatcatggtcgattcaattacctccttggacaacttccaatctattctttcagagaacgacgttgtgattgtcaagttcagtaagtttacagtcatctcctgcctatcatttgtgaattaagcctagcggtgttgatattctgtttgcatccatttgtagctgctgtttggtaggtacacgcaacgagagccgtctcctctttgataacgtttactgattgtatactgatcttatgcaacgctaggtgtccaccttggtgagtcagaagatgatgtgattggatatgcagatcaaccgctcacctccatcctctacttgtactgttggcatgtcaacgacacctgcagcaagatgattgctccttacttcaagaagctcgctgaggatgacgagtatccagcaacgtacatcgaggtcgatgtcgacactcaatgcccgactgccgacagctggtgagccatgttcctgtcatcgttcttattctgtagcattttggtcgttgtgacgtatcttatactgtattcttcgcatcaccagtaacatccaagccatgcccacgtttcaatccttcatccgtggcggacgtgctgctgagattcttgaacctactccagacagtctaaaggtacctcttccgaagtccaagtttttgattcgtcattcttgaataaaactgacggggtttgatctgatttttgaacatctaggcatttgtcgcggacgctatcaccagtgcacagacatcgccgtcttcttctccctaggagtcacactggtctgatcactgtcaaacagagccgtcgtagtgaacccctatctaccaacatctaagttctttcaccaaacctctctgtcgttccgttcatatctagtttcgcgatcatatctggattctttccttggtctttctcgccagtttttgataacacgatttccaattaatccttctatcttatcattggacctcactttcgttatcttccttcctcaaaagcttcttggctttcgattcatatacccttttcgatctggtctcttcaatgtgcttgtgtctatctaacgtcaagcgtccgcttgaatgatgaaaaatcagccaatgaaaacggataagagtgtctcttcttgaaaatattgcgcaaaggcaattggtagcaagagaagctatgatatagatgttctgagaacatcaggaagaccaagaggaagcaaagccgtgtgaacgaatctatcagtcagtcatcaacagtaaaagcagcttgaaacagatgaatgatggctgctggctgtttttatctctgagcggccaagaaggatgaggggcgcccagtggttagggttggaagattcatatttgaatttaccctccattacataagacccttaagacggatccaggcggtctcacacacgagcatcccgggtttgctcttttctcccttcaccttaacgacccagctttctccatcaacctcatctgtttcctctccgagcgatgccgatctctcagttgtccagtcgagcacggctctctcctactatcaggtctcttcctatcagggtgagctttcgttttgtctgaatgttgtctgaatcgcgtgtcgagtgctgcacaaggagaaaaaaaggagcgtactctagtactgatcacgccgttccatcttcatcgttctctccatctcgtccatcaattttgtcatctctggtgctttggttgatggtatgatctcactatccgatggaatgaaaaccagacctatgctgcctctcctctctctggtactcctccaaaaattcctgtgaccgtgatcactcccgcggatcctgtgatcgtccaaaagagagtcgttcccgtcgccgtccctgtcgctcctcttcctccctcaggatcgcctcctcctcctcctggccggggaggaaagaagtctcatggatttagaaactttctcctctggtctggattccttgggtaggtctggtttcctgtcgagcgcatttaatcgttccctcaagacgtatctttcgctgacgtcggttatatgacgttttttttctctctctttctttttgaacctttctattgtgcttctctgtctattctatcctttcctactatagtgggtccgcttacagcatcgcaacctacatcgcccttcacaacgacgatttcgagcagttctacactcaatatgttcccggaggattaaggcttgtcgagtacgctgaggaaaaggggtgggaccaggttggggccagtgaagtcgtcggcggcgttaaccgggcttatgagtacggatcatctctctcttttctttgtcactgaaccatatcccttcatgcccagccctaattcatctgtcgactcatctttgatagctcctccaagtcgttgtacaaccgaatcactggtcagatcaccccctcaacgcccatctctgagcaggccgctgatcgagtgactgctcttcaaaagaaggttgaatccaagtcttcggacctccgatcaaaagcctccgaaacaatttcctcattgacacacaaagcatcctcaaccgcttcgtccgccgtcccggccgattcggaaaaccccaaggcattgggtgacgacgctcgagcggttcactttgacgcagtggatgactccaagcttagagtactagatgccaaggatcaggccgttgacaagacgaaggacatcaaggaagaggctgtccgacgagccaatgaaatcaaggagaagactgctcgaaagggtagctctttgaaggaaaaggtcgttggcgaggctcagcacatcaagcaggaggttgtcgacaagtctgctcaggctcagaaggatcttgccagcaggacctcccacgtccaggaagccactcaccagaaggccaccgaagctcaggatcttgcttccaagaagtcggctgaggctcaaaaggctatttcgcagaagactaccgaggctcagatcaaggctgctgaaattcaaaacaaggcgggtgagcttcaggacgacgtttcggcaaaggctcaccagttgagcgacaaggcgctcggatttgtcgagcagctcaaggcaaaggtcgaggagaagtttgacgccgtcgttgaggagggcggaaaggccaaggaggctgttgttgagagcgcccaccaggcttcgaatcagctcgacgccattgacttgaagggagaggccctgaagaagatcgaacagctcaaagcacagggaggagctgtggccgacaaggccaaggatgcggtggacgctgtgagcgagcaggccgcccacttggtcggagaatcaaaggaggctatcggacaggctgagaagaaggtcgagaccaagactggacaatggagcgagggggttgagaatctcgttcaccaggccgaggacgcactcaagggcgtaaagacggaggtcgagaacaagattgccgagaaggacatggtcgacggaaagcttccttgggtcgaagccttacctattgggtttgaagctcccccagggtactacattcctaaagcagtaaaggctacatctcctaaggctccttcctcgtccactgtggtcggtaagcccgctgtgggcgagatccttccgttgatcgctccttctgtccgcgagtttgcttcttccgagccaatcatcgcccaactggcgaccacaatcgactctttggcttcctacttgtcttctagtccttcagccgttccgtccgctaagaacctgatctcgaccgcccaaatggatctcgaggccctcggaggacggcttgcctcagtcaaggaagaggagaggaagaaattggagactcagctagaggctaagagggcagagtttgagcgagagttgaaggagaagactgtcaagctcgaggaggagttggagaagagggaagaaggttggaagagtgtggtcgaggatgagagggccaagatggtggctgtgttcagagagagattggagaacgagttggaggttcagagcgagatcatcaatgctcggttcgtactcttcttatcccgttacgtgttctgtaggatgtccctgtctgttctggcactctgttaatgtacctgtcttctgcttacggttgtagattgaaggaggaggtccttgctcaggctgtagagcttcaacgatcccttattcgagatatcaagactcaggtcgagaccgagcgaggtggtcgattggccaagcttggagagctcgagacgggattgaaaggtcttgagaaggtcactttggacaactctgctatcttggatgagaacgtccgagtccacactctttggtcagcccttcgagccgtccagaccgctagcgagacctctcgtcaaccattcgacacccagctcgccgctttgaccaacttgacaactgcttctagagatccctctgtcggacctactgtccttgctaccatcccttcctcgactgtcgctggtggaatcgaatcgacttctgacttgacctactggttcattcatcgagtcgctcctcgaatccgatcggtcgctttcgttcctgaagcagccgacgccggccttctcgctcatctgacgagtttcgttctttcgccattgctcttccgaaagtcgggtaacgtcgaaggaaacgatgttggtgctgtgttagccagggctgaggatcgattggctaggaacgatctggacggagcggctagagaggttaacagtctgaagggatggccggctacgttggctcaggattggctcagggaggctaggaagcgattggaggtcgagcaggctttggaggttatcgctactgaggctaaggttgcttcgcttgttgtcgtcaactaagggattctttgttcattctctctcgtagtcgatcttttgattctttcttcccctttttctttcctgcttgtgttgctttgcatccccccttttttttaaatcatttcatcttatatcaatgtatcttttctttcccttctctcgagtgagataggtagacgatctcgatgttttttttggaaaaaataataataatttattcgatcatctctttagatcatccccggttctttccttgttctaacataacctcaaacccatctattcgacatcctgctctccagagtaagcgggcaagattccagtagccttcgaccaatcgatctgacccttgacgagttgggagatgacagagatgacttcgtcgatcgatccgatgagttgttcggtagtgtctcgttctcgaagggtgatcgttccattcttgacggctgtgtcgttttgaggaaaggagaaggcaaagggtttttttttttttttttnnnnnnnnnngggtcagaaagagaaagaaaacaacgtagggttgatgataagagtgaaaataagaagtgacgaacaagcgaaatcgacggtagctccgaaaggagtaccaagctcatcgttcctggagtatcgctttccgatggaagcaccagaatcatcgactctgcatgcgataccggctttcctcatcttgagagctatttccgaacaaagcattacccagtagaagaagcaaggaaggatttgacgttcagaaggtgaacgacgacagattacatatctccatagaatgagaaaaacgtcttacagagctcgtgggcggctcgagaaagctcagggttgttggagataggaacgatcaagcacttgaaaggagcaacagccgtaggcagcgaaaggacctatgtacattccagatcgtgtcccaaaaacgatatgtaattaggatctatcgttttttttttcttcgaaagaggagaaaaggaaaaggaaaagcgaagagaggagggaaagaaaaaaaaaatgagagaaaagacaaacctgtcgagcggaatcagattcccgtcgccagaacgagtgctccaaaacagagtagaggattcgaccaataccgaacgaaggctcgataacgttaggagtgaactctcggatgtttgtcttggtcgtcttgggctcgatcttgacgtaagcagccaggatctcgtgggaagcctcgccaacggtcaccgtgtactttctgtagtcgtcatcaagaagagaaggggtctttagtcgatggctgcaccagcgagggatgatacaaggtagaagaagaacaaaacacaaacccgttgctctccaactcggtctttagcgcggtcaacttgtcctggtcgagtgcctcgacatgagccatgacggcaccagcctccttcttgaaagccattccaaccgtcttcttgtcccaagtgcaagccaactttgtctcgatcaccggctcgggcaacaagacctgaacgctcaatcgctgcttggtcttctcggcgtgaacggaaagatcataagcggatcgatcggcacaaccgacacactcgatccagccgtaagaagattggatctcggcgtcccaacagtcggcagcgtagtgggccatctcgttgtccatgtgctgtcggaatcggagtcgactggggtcaattccaatcgagacgaggaagaggtggattcgaccgataaagtatccgagggtctcgttatcgataatttgctgtgtggacacaagttgatggaattgagtaagctttgtgtgattgtatacgagaataggaaaaggcagctgatcctcgcgcgtaccttatcgacagcatcaccaacggtcatctcgaccaactcggtctttccctcgagctgaacgtccttgggcaacagagacaacttgagatccttgacctcactgaaccgggcgtgtctcttgtccaaagggtcaacaaagtgctcaatctcggccatggtgaactctcggactcggagaaggccttgtctgggagagatctcgtttcggaaagatcgaccaatctgggccgaggcaaagggaaccttgccgttgttgaactcgaggagtcgggaaaagttgacaaagtgaccctgagcggtctcgggtcggaggtatctgtaggtcgagcaggcgtagcagcaggatcagattgcgtttagcatgagctcaagtgacggagtgagtttgaaagtaagcacactgaccccttgaggtaaccagtgggaccaatgctgttgctgaacatcaagttgaactcttcaggctcggagacctcgttcttggtctcggggttgacgatcttgaactttcgaatgagctctccgagctcggcaccagagtagttgtcaatctgacgttccagagatgcatgtcgatgatcagggttagcatgcaagacgagtcaagttaatgagctcaaagaaattgataattcgtacctgtgcgagaacgtactcggtctccttgacctcctcgtcagacaacttgatggcggtcgaggcgacctttttcttcttcttcttcttgtcgtcctcgacggcgacgggagcctcggcgatacctcgagcctccttgtcacctttgagtctgattcatagttatgtgatatgacatgatgaagcaaaatggctcgaattagttgacgagcttctagtataacccatctgctccttcttcagcccaaacccaaggagggccattcattagggaggaaaaaaagagaaagaaggtgatactaatggcactaacctggcctccaagacggcctcgaccaagtggtcggctctgaagatctctccggtcttgacatccttgcacatccaatcggaaaacttggcgacatgtccggaggtgacgagcacatccgagagggtcatgatggtggtatcaagctcgagcatatcctcctcgacgatgaagtgttgtctccaggcgtgaaggatgttggactggagggaagaaccaggaggtccgtagtcgtacagaccagcaacaccaccgtagatctcgaaagcgggagtgtagaagaatcgtttggccatcaactgttcaaactgaggcttgtcaaacgtagccgctcgggattccatgacagacatgatgggtgagattgaaaactggcgcttggaaagaggagcagagattgtttgcaagtatgatagtcgtctgaatgaacgggagagctgctgcatgcactctggaaagagtcaagaagcaaggcagacggatgatggatggatgatcggtcgagaatccaaaaaggaaaaataagaaggatgagcggttgaacgtccgaacgtccgctctggtggttacagcgctggacgtaacccggaggacgtttgttgggctttccctctttgagggtcagatcctcatgtgtacaagcatgctttggacgagtatgatacaggcagtagctctagaagagacaccaggcagacacagacacaaagatgtatgagagaaaagccgagaagagctgaagagaagtccatttatatccgatctggatcgtacacaccacagcatctacaacaccactttgagctcgagtacagcctcagccatcgctaagacaatcaacagaaagtatacaagacaagaagaacagtagatacaagaggagggaatgaaacagaacggagagaaagaggtcaagtaaaacatgggggaggctcgaggcttgaggttaagaaaggatcagaatgcccgctctgttttagagtcggctgaggagtcaaaccgattgcttgcccttgaagtcatacccagcctcagttagactttccttgagagcctttaggatcgtatccacatctcctcgagtggggtctgtgacggtgatacccatatgtccgattcggaagtacatatccttgacctccttgtgaagaccggcagccatgacgactcctttggcgagaagcttaggaagactgtgagaacgcaaaacatgaggcacgcgtcaggacaacaaggacaatgactggacggcaacaagaaaaccgacgactcacagatccggcgcctttagaccggcggggaatttggcagcggtcctggaagtaggtgtagatcgaaaatatcattaagcgataatgatcacaaaccaccatcttcaactcgagccgacagagagacatacatgccgttagcgctagcgtccctactgagaggaatgaagccaagaccccactcttcgagggtgtccttgattttcttgctagcggccttgtgggcagcgaatcgttcgggaagtgagggcgaagctttagtgatcgcgctcaacgaagcatggaaggcatagatgagctgaacgggggctgtaaacgacaagtgaaccagatggtttgagttagcaaccagaccaggaatagctcttctatatggagaatgctttctacaaacgagtagcaaagtaggtagccggaggggtctcgtaggacttcatactgagcataccaagattaaaatgttatcagcaactataattctcgatggatatatggacttgatgaccccatcttcggcagaattactcacacaggcaaccatttcgcccaggaggcgtagtaggccgacaccctagtctttcttgacttgaacacttctaaagccttctgggatgccaaactgacactcagaccgggagggacacccagtcccttctgagaggctccgatgacaacgtcaatgccccaggcgtccattctgaaaagatgagaattaagaaattccgggtttaacaatcactgagattgactgcgtgtcgctccagaacaaaaaaaaaagaggatggacaggtgacctgaatagacagtgagatgaactcactggatctcctcactagcaacggagcagacaccatcgagaacgaccaaagtgtcaggagagacctccttgacggtctctgcgatcatcttggcatcagagagtacaccggtcgaagctgagagatgtataacgagtgcaacgaagagatcagtcttcgggccggagagccgatgcagcgatgcagatgcagagaaaggaagagccactgactgtcgacatgggtgaaagtgagaagcttgaactttttggaacggagagactttgtgatttcttccttgctatagagacagatggagaaatgatgttggaagatgagaagcttgttgagagggcagagagacacatgtgtaatttcaaacgtacgtgggtgcccctccgacaggggctccgatctgggtaacctgagcgccatatgcctccaaacaatcggcaaaagaatcaccaaagtagccactgagtgaagagagaacggaagatgtgattgagcattgagaaccagctgaaaagttgataagaaaaaagagagaaaaggaaagagagagggaagaaactgggttgtagacataggaagagatgagcttttgaacgtacctgttgagtaccaagacatcttctccttgctcgaccaagttagcagcgacaagatcccaaccgagcgttccactcccagcgattaggaaaggttgagcatcctttgtgaacacgacctccctggtcattcggatacagtcaccgaacacgggagcgaacgcaggcgagacatggctcatgctcgggtgggcattagcgaggagaacatcgtcagagacctcgataggtccaggaatgacgagaagcttgtgctcctcctgcttgaaagaagaattagacattgaatagagtggcgagatgtgacgaagaaagatgtaaggcaagctcaatgtatgttggccgggctgtttgatggtcggatggtgaaagaagaaaacgattcggaggcgatgcacagaataaccattccatccagatcatccagcatagctgccatccatcatctgtccatgtcgtctctactcgatccgtatgtcctgttggtcacagaggccagttgagagacgtgttctgtgctgacttgtgggcttgagtctctttcagatcactacctagtctggtcatccgtccgtcatcgtcggggtcgaccgtagaggtctttgacgctcaaggtcgaaagatctacctgtacggacggacatctcttcaacatacaccatatcaagccaccctcgaggatgcccactttggagcggcggtatcgagtatctctacttcttctgatgctcagtccaaagtgaaacaaatccagctattcaacccagatgtcgagctcgagctgagatcggttggaaggatgagttatacctggcagtttacatgggagaggtatgtgtccatcatctttgtctgttcgtcaactaccaagctcacatacagccttttactttctctctcacacatgcatctctcatctgttagtgagttgtatcagtggaaacagccgaggttgtcttccaaagagttcacatgtttttgtgtgagaaaaccagatccagacgtcgatgtttcaaggtcggtctttctcttcgttgcctcgatcatatgcttgcgactgagcgctttagtcgggattttcttcttcagagctcggttaggagacaccaagtcgccgaccatcatcacctttcagcaatacaatatcgaccggttctccatcaaagaccacaaaggtctagagatcattctcttgacgaccttgctctcgttcctcgatgcctcgcaggaaagagaggatcggcccatcatgatatcttcctctgcagacgacaccaccacgatggttcctcttgctcctccggcagtacctcctaaaccccaaaatttgagagaagagattggatttggagattttgaagaacctgtatgttttcttttccgcgcgcggtaacttttactgagagaaggtgctcatatactcatttgtccttactctatttctccgtgtcctttaattgtctcctttcttctctccctcaacgtcctattgggaacacaaacgccacgtagccggatccaaacgaactgacaatcacatcggcccattcggtagagacatacgctcagaaatcgttcgatctcctcctcgtaagtcatcttctcacaagacatgataactgctcgtctagtctaatttttgtgatccaactgcgcgcaaaatcaacaggactcgtcaatgctattcgtcatacttcgcgcaaaatcaccagagatgatacctaagacggtcaaggtggcagaggaagtcaaaaggctgaggcatagagaaggatgggagtctatggatgaagaacaagagatattccagtaagcacctctttctcctaatatcgacacgctggccatcctgtatcgtatctaatccagaaagtctctacttaatatggatggatcaatgaaggtatgtggtagaaaacatagaagatccaacagggccaagtaaactagagacaaagcctactgctggctctatccgccgtccgcccaaagtaattgacctgaacgatcctgttcctgcgacaagtggtccatctccctcctcattgtgagtgtaactctgttgcttcctttcctctcctctcctcttgtccttttctcttttaaactgttactcaacttcctcgcttttcttcttcggcttgtcttgttccagaaaaccacaccaaccttgggataaaacaccaccaagttcaatctctatatacttatcaaaaatcgtcctgccggatctacaaccacaggtcaaaaaaccaagttcatcgaaatctatatctagaccaatcgactcttctaatccatcaccaatccattctccttcacctccatcattatcaccacagattccatcatcatcgtcatcatcatcagcagtgaagacagaagaagaacccagacagggaacagagagcaggataggtaaactcatcgacgggtttggtagactcggtttcgggaacgggaaggtctgagcaagctatcatagtcaactttctagatgaacatttgacaattctgctttcttttcttttcttctcctgaatacggatgtgagtgcgcctgaaaacggttcatcatgcagataacaaaaaaataacacccggaagggagaatcgaagaaaatgtagagaggaaacaaaaaggtcgaatacagagggaaaatcgcatagtaacaaagaaggcaaagaagaacaaatcaaggagcaaaggaagaccagaacgaatgatgaaaactatgtgcgcaagaagatatctcatgtcgagtttagacttgactgggtggttttacagaaggaggtctttgtaccggcatgttcggtggcaaaggtgacatgtttcctccctacagtttgacgatacgaaaaaaaacgatggtgtatgatcagcctactgattctcagacatttcagaaaagaaacaatgtgaacaagacgcgcacctgctgctgctgctgctgctgctgctg

SEQ ID NO: 828 - DNA, 27751 bp, Xanthophyllomyces dendrorhous
  misc_feature (24213)..(24222): n is a, c, g, or t
tgttgttgttgttgttgttgttgttgttgttgctgctgctgacgcatccgaagagcagtttgaatatgcaaaggagtgacggtgtgattctgcggatttccagaagacataaatccgtatcagatcaaacgcatcaaggacactgtgttcacaacaaaagagaaacatcgactcacgtttatttctgcggttcagaaaaaaccccatcaaagaatcaacaaaacagtcagccgcgatacgcatgtttctcaggaagaatagagaaatagaggaagatcactaacggaggttggtcgtgatatgcgaaagcaactccaacggcacactattgaccaaagcagccgctatcgcctgtggactctgtgcgctactcggcacgttctgcaaagctggcacagcacccacaggtccattgcttgtccttctcacgttttgaagaccaccttgttggtttccaatcactccgccaccgcctggacctttgtccgccggaccaacacccggctggccagactggggtggaagaggtgaaggcgttctcgttccaacctgacccgggttagaattgatgcctccgttggaagcagcggccgaaacagcggcagctctcaatcctgcttgtctctgtaactctgaagccgtccgatgggcttgtaggagttggagctgagccagttgggatggactcaatcgctgaccaggaggaaggccagcaattgctggacgctgctgttgctgctgttgttgaagctgttggggaagctgttgctgctgctgaagagacatttggggagacgacgtggccgaagcgggtaaattcacagataagtttgagtttggccgctgaatttgctgagggccaggagggtggtgcgctggaccagacgtctgttggccttgtggcccaccgttcattccgtttgtaggagccggtcgaggaggaccagcctggatcaagcaccaaagagagtaagaactttagataaaagggtcgcgcaaaagaacatatagagaatcaaggacgaacaggtgcgggttgaccagctaccgctcctcgagcttgcatctgacggtaatactctgcttgacgatgttgctgttgaagaatagtggcgtcgtggaactgcttgtctcgttcatacttatgctgacttagatcgagaggtgtcggagccggacgattacttagatattgattgtgtgattcatgagccgtcagaacccggcgaggctctttctctgatgttcaaaacaaggcaaagatagattagcaacagacaaatcatgcccagctaaacaaggaagaaaagacgaacgaggtgccttccgattcgacagatcccttctcttcgcagtctttctcatggcctcgtagagctttgcatgcctcaattttttctttgagccctcgaacttggggtccaaaatcgagggcatgttcttcccttgtttcttggttccaccaggtgaaacaggaatatctccaccagacgctccaatacctgagatgccatttccgtttccgtttgcgcccgtgttcgcgctttgaccagctccagaaggtagaccgttcacaacagcaccgacggatccttctgggtcaatagacggatctgacgtgatagcttctttcttttccggctctttttccgggttcgggttccatttcttgttccatcgttggaaacaatcccatggggatcgtctatcgatctggagtgttcgacgaacagtgttgaaagagtcagagatgagttgccagttgaaagggaattgatggcacagccgttggagaacgacatcgtcgtcgttttgccagatcgtagacgcaagtcgactctcatagtttcgaggttgggatggcttgataagaatcggtaggtgaatcgattctctagccttctttccggcaaatagcactaggaattgaagagagacagagaaagaaagagatgaatacatttataacgtattggaagaaaccataagaatcacatgtaggagatactcacttgtaccgcttgaataaacatcgcccctcatctcacctaggtctctgatatcttccgacccccaaagatcgttcacatccgcccatccgtctgaagttattctcgtcgccggctcaagtgtgctcaccaacaccggtctgatatctaataacctactcgtgtgagccaactttccaccggacgtcgtcgcgtcatctattcgtctatctagctttccagccatgatggcgttctcgtttaacggtactggaagtgcgtacggtacgacatcgccgaacaaatcgcttaacagagcaagagcatactcgttggagtcttccccgaatgtgaccggatcgagaagagaggacatgtcgagggtgagggaggaaggggtgatatcttgtaacgcggtccgggcagtagacgagatcgcgcggaaggcttcttctgttaccggcgggttggatggaagagaagagtacggtcgtactgtcgatgtggttgaatcgggagccactgcagaagcagaggcagaagtggcggacagaacgggatcgagagctccaggacggaggccggtggtatccatcggcgacttggtcaagatgtcttcgaccggtagttctggtgggggcagcgctcgctcttccttggagtcgaggatatcgaacatctcgacttcctcatccggttcctccaattcaccttctccgtctggatcttgttcagatccaacagcatcgttgtctatgtccatcgaaccttctgcagcaggaagtcctagtaaaccagcctctggctccgttgtctttcccacagtctgttgatcttctattgcttccagcgcagcttcaacttcctttccttcctccggctcgatcattaccaaggcctgttcatcttctgaagcacggacgatcgtatcgtttgcagaagacgagctgagttcaggaagtccttctgatagcgtcctgggattagtgttgaccgagatctctggtttgctgttatcatcgataccttctccgtcatcgttctcatcctcatcggcctcggtacggtctactgacacaccttcagcgaacccttcctgaggctcagcttcatcatcaaggtccatcggttggaaatcaacgtgatcgcggttcagatgtttcggtcgaccgacaggaacacacaacgatgccttgtccgaggagaggtgccattcgagtacccagttggccatttcgtaggccagggctaccttccaccgacgttcttctttgaaatctgtttgaagccatttctgatgattgtcccattcatatgacaggttaggaatcagagcgagttgacaaaggacgttaagagaaggcaacggaatgaaacaaaccatttcttcaagcatccagtcccaatggctttttgtcatcggaggtcctttctgtttctttggctgtcggaaagaccatctaccttctgccttgagaatttcgactctctgcattgcccggttaaatctcagttcgttgaaagcggtctgcgtgtgcgttcgattggagaacatacatcagtacggctttctaggtaaacgaagaaaacagaagaatatcaaagacaaagaggaatcatacctcccaatcggcgctccctagacattttctcgctcctctgaccaaaccgctcagaggatttgcgttcaccgtcgcttgccatttgaacaagtcgggcggctgaatcgatcctgccattacaccacctgcccctccaggattactcgccgttgacgtgctcccgttcgtccctcttctcctcattttgcttactgatttcctcgctgtatccgctggtagaaccggaagcgggtacagtgatcgggcgaaagtcgaggagagcggtaagggaattgccgagggtgtacttggttgaagcggaggagagaatggagggagctcatcagggttcaaatgactcgatgatggagaaagtggaggtgtaggcgggcaaggatggatagctgataaaggaagggtataagtcgatagtgattcgaaccttggctttgtgagtaacgattggcgaccggatgtaaacgacgaaacggacggtcggacaagtttcgtaggcgtgcccgttatgggagaaccgagggctggtccagaaggtgtgtctgtcggagtggccgtggacgtattggacgccgagatgggagggaccgaagaagaatcagcctgaacgtcttcttgttctttgaacttttgtaaagccggggcgtctgaagagagggcaggggttccgccgttcgtcgaaagaggaggtgaaggaggtgaagtcgtttgagaaggggacagttcgaatgaggcaatcgatcgacctttctctatatcaaactttgatgcaaacttggcccaccgatcaatctcggagatgttcgcgtcgacaacggtgttggcgttgatgttagagttggtgtactcttggacaagttgaaagagttctttgagcaagtctgatctgttttggaggaggtttctgtgagggtagaccgggacgcgtatttggttttttttgtgaccgccatccggcacgcaagaacccagacaaagatcagaactgatgtctggtacaggtcaccgagcagaggcgggaaggagaggaaaaagagaggggatataggcaaagagggaaacgacagaagaagtaagagacgtacgctcgatcggagtgcttatactcaacaagcaacctgatgagttcctctacgggtaaactctcgatcccctcgtttgtatctgcttcaacgacgttcatccggccaggaatggaagcgagtttgtggtcgactctgtgagaacgtctttctgatctgagcaaacggctgtcgaagagtaagaaggcaaacaacggaacgttaacaagatggttggttggaagttggcagttggaagttgaacgttcagtttgtttgggtcgtttctaattatcttctctctccgactctccggcctgttctcgtcaagtctctctgctttcatcgggatcatcctcataccctcgtcggtcgactgtagaaatcgagtaggtggcattatggtctggcagatcattttaatgtctacacacgcaggttgaccagagcgtgagccagagccaaaaccagaagcaagatctcattacagtcatcatattatacaaccccatgacttgttcttccctcttttggagttctccatccttgtgacagacaataaggtctagtcgacctgtggaccggcagatcagcacatccaacgtcactcaacggagcaagatcgtcacgcccatcaccacgcaagccagcgacacataaggcgacaatctctctcctgtcgaaaacaagcgcgacataggtcccccagacaacagtcaggtaagcatacagatcagatctagatgagcatttggattttgaaaagcttacctatgcgggagcatttccagaataaaccagagaatctatatcaagttgatccaagtaaaaccactgttcagttgaccacacaagaaagtttccgagccgaggaaatccgtagttccatatatccaccagtttgtcgctctcctgaccgaaagcgtaaacttcgaaggatggtcctttgaatatagaatccactcagactaaaccaagactcacccttccttgttccggtcgacgagtccgggagcagtggccctagcatatgtgcacgtgcagatgaacaaaatcacacagagcagtaatgattgaaagttgaacaatgcagtctgtgtcgcgtgtccagcatcaaaagatgaggtttcagtaagagcttgtacataacgaccaaggcaaacaaggaatgccataccatgatcgagagtcgatatccagatgagagtcggagcgaacgagaaagtatagactgttgattggcaaacccaaagatatcgaagtaagcaacatcaccacgctctgcggtctgttctccctgtcctgcactccacacgctctcctctatctctctcccatcaagctggactagcactcacgacggtcgttgtttgctggatgagtgttgctgatggggatgaaagcctacgtgtgagcctaggggaggcggcgagcacagccttgttctcccttacagcccaacagacgccacactgaatttgagaagacaactccagccattctatataccttgcctgctcgtctcgcttgctcgtcttggatcctctctttctagctcacacacacgcacgcacacacacacgcaacgaatggaacagaataagagaaagctcgagggctatgagttcttcaggtccatcggttcgcctaggcatgtcctcgcacccatggtggatgcctccgaacttccttggcgaatcctttccagagccccggtcgacgacatggatcgtggttctacggctggtatcacttcggaagatgataagagagtcgaggagcctgggaagaaggcagggaagatcgtcaaccaagctgctacactcgcttacacacccatgatccacgccaggttgttttccggaccaaaatacgaagataacgtccatggtcgaggaatgtttgacctgccgtgtggttcgtcaacattgctacctagtcaatttgtggatattgtctgacaatcatggattctctttttctctctctcatttcgtttatttcacaggcgaggaaggatcggaagaactctttccagactggggtgtatccgatcgaccggtgtttgcccagatgtgcgccaacgatcctgacgagttcttaattgctgccaaaaagatccaacatagagtggacgccgtcgatctcaatctaggttgtccccaaggcatcgctcgaaaaggacaatacggcgcgttcttgatggaacaacctgatttgatctattcgctaatcaacaagcttcacaatgagctggacattccagttacggcaaagtttcgatgtttcccagaggtcgaaaagacggtggagtatgcgcggatgttggaaagagcaggagctcagatcttgacgatccatggaagaacgagagagatgaaaggacagtacaccgtaagtccgtcattctcttccgtcgtgttcgttgtttccagccaaccgacttgcttctcttcttccagggcctagccgactggaaacagatcaaggcagttaaagaagcagtcagcgtaccggtcttcgccaacggcaacatcctttactacgaagacgttcaacggtgtatcgacttcactggtgtcgacggtgttatgtctgccgaggtttgtttaacagattcctttctttatctctatctcggaaatatgcggaagtcttgatgttcaatttccctccttttctcatatggatacagggcaacctatacaacccagcgatcttcctccccccatcgtcctcaaacacttcgattccgcacgaacacgtcccgatcactcacctggctgatcgatacatccggatctgtcaatcactcctcacaaagacctcaacctctgctgttaaatcacatttgttcaagatcttacggccagctttagatgtcccttccaacagagacttcagagatcgactaggaagaggtgttcctatcgacaagatcgatggcgaagaaggaagggaatggctgtcactttggagaacgttcgtccgtgactttgaagaacgactgttggatcaggcttgggaggccgtaggaaaggagagacagaaggagtttccgatagtggattcagctttcccagtagatcctcagacatcgatcaggatagtccctcactggctatcacaacctcaggcgcgagctatcaacccatccaaccctaccagcaccagtgccactgcttcttcatttacaacttcaacctctcttcacccagcttcccatccactcatgacgacatctacattcgacgctgtcgcttctctccatcctcccaattcatcctcggccatgcccatctctggttcaaacacaccgatcacatgcactttcctccttcctcctacgtccaaacatccatccccacataaatgcacaaacatggcatcatcttcttgtccccatcggtcatgtataacccattgtcggttaacatcgttcaatgaactcgtcgcacagggtctcacaccgacaaacgttagtcaggatggaggatacggcgcaggtgaacatgtaggtctaggttgtgagtttcacgaggaaaaggtcagggcgaaggagattctgaaaagagaaaagaaggaggagagagacaggaggaggttggagaacatcaaggcgcacaacaccagttccaagtgtaacaaaaagaacaagaactcaaacgggaacgtcaatgggaatgggaacgcgaagaggaagggaaatggtaagagagaactggacgaaccgacagaatctcgagctgaagacgactcgacctcaggctcggtccaatcttcgataaacggccctgtcggaagaaaaaaaccgcatctcgacgtacaagaacccactgtggaggaagaatcgatcaacagtgaacctccagtcgttccagctcttgtttctcctcctcgtcctacttcagactagatctagagaggtttttctcaagttgtgggtttcatccagttctttgtcctcgtggttgtatagtcgtagcaagtgcatatacatgggaaatatagacgttcgtccactctgattcgcattaaaccgaaatcctacaagaaaagacattcatcatgagaacgtacagatcggacaaaaaagtgaaaggaaatggatgctgaagacaattgaggaggatatcaggataaacatgtgaaaaggagggagaaaagagttgatcacgttctaattggtacacggagaaaaatcgagaaaagatagagagatgaacgaaagcccatatgaacaattgccaaaggccaagatgaaagaacggtgcacgaaagtcaaaaagatgatccaaggaaaagataaaatgtctctggtgataaagatggtaatttagagtcccaaattcttggtcgccacgtccaaagaatctactccgccagtagcagaacctagtgtattgatatctagatctaaacccttcatagttgaggcgtgtcttccgaaaaagacatcagggttgacacatgcagagactgcccgtctcatagccacactgcattacaaaggaagaagacgtgatgccaaatatcagaaaacacttttcgagaggcgggcaaatccaagacaagaaaggagcagaacaaacctcaggaacgacaacccgacctggaaacttgcactgcacaatgaggaaacacaaagaaatgaacaatccatccagatgtccatccaaaaatccgaacatataaggacttactttgtccagccaaaaccctctcgggcaacaaatttgaagtcaacaccctggtttccatattcggcatcaaccatgtgcgaaagcttgacggcgtcgaactaaatgaattatatacaaaggagtgtcagccgaggatcgtattgtagcgaatcactcataaaacctgccacctactttctcaggaacgacaccgttgactaaagacgaaatcatatggatttggaagatgaatacacgctccagagtatgcagaaggttgtcaaagaaacaaagcgactcacagtcaacgaacgcaacagtcatcatataaatccatcgataagctagccgactagcctcctcaatgaatccataccgctcgagcccaacccaggccatgatttggtgtggaggccaggcatacgggaaatctgaccaaaacgtgcgtcattcaagaacagtaagcacatgcgcgagagagaatgaggtaggaaggcagatagaaaacagagaacgcaccccactgtctgtttggtcgagaaagcgagatctttccacgagactcttctgtaccggggaccaaacctccgatcacctcaaatttggagagtgaatgtcggctagataaagaagaaagaattgactaagcattcttcctgatgattctgttcaggatgcacacgtagatatttcgaagattgatagcttacacaagtttcaatgcctggtcttcactcgcacaacctgcccaaagtgcccagaatgcggtcacactctcgtacctgctctgtctcttcttggcggtatcgtaatcgtagtatagcttttgaccctcattccaaagatacttgtcgatctgttgttttctgaattcagcacgggcgaaccactcggcggaggagtggatcttgcctgtagatcgggcccaggtcgatgtgggttgagcataggcttcgggggtgatcgggaagggagaaagggggaagtcttcttccatctcaaacgagtcattgaagacatcccgaatggcggtagcgatatcggtctcgtacctaatcaagcgcacgtagaggtatgattagtcgtcttctctctcaacagacatgatcggggttcagaaaagatcttacttgtagagaagggcgttgagatcgatcgttgccaggttggcacacctcttctcgaatcggtaagtggtatcgtgcccactctacgagaggaatgacggaaaatgaataatttaattaattaacgagtcctgatccactatgaaaactgaccaaagataagaactcacctcccgaacagctcggtcgtgcatgaaatactcgtccagttctggctctttaatctccccaaagttgtaagcgtcggcaaattcgaggacagagattccatgcttgtcagcgtagggctgaaggatgtgcgtgaagtgagtggcctcggtctctggaggaattccgagtccgtccggtctgaatctagagagaccagtgatggggtccattcggggctcagctacccagatagtgtgatattcctgatttgaaaaagaagagcactcaagtcattgagtataaagaaacggtcgaacactatatgataggatagcaagagcaaaccttgatagcagcctgaatggcacccttcaaccagaggttgtttgccttctcgtctgccctgtccaactggttgtacgtctggagagccatatctgtcaagaaaggaggttgcgttctgcacaaatactgtgtgatgtgttccgaaccgaaccgagccgagtcgttagtctcgtgggcaacttgattactagctttgaccgtgtaatagagctgagagcaacttacgtaacttcgacttccattcaagattttacctagaggttcgaaacgttcggaccttagtcagctcaagttgtatacgatggaaagtaaggtgaaatcaatatgaaacgaaccgtaatgcttgatttcaaagataaagtgctcaaccatgcctttcgccatctcgattttcccgtcaatcaacagaccgagggagatgaagtaactatcccaattgtagagctcgttgaatctagctcccggtacgatgaatggaatacccttgaaggtcgttttctttgtttccggatcaaccgtcttgcgcatggcgagtgcaaggatcccgggtcgatcattaagtgactgaacgaacgccgggtcgtctgggtttggggggagaagctccacttgaagacctagatgaggcttctgagcagagacctctctgtagtagtctgccatctctggttctccatgggggacgtagatcaatggctttacattgctcgtcctgttctttgggtccgcacaaataatctcaagaccatctccgtcgattctcctggtgagcgcgttccagaatgagtttcggatcatcctcgacagtctgtcgaccgggttctctgttagtcgagcttcatcaagtacaattctctttctgccatagtctcgggcgagggcgagctcctgaagcaagttggagagcatgtagtttccctagcaacagaaaagaagaagaagaagaaatcaaagttagtgtattggcacaggataagttgaaacgaacggatgaaatgaaaggacgacgtactcggacatcgaatgatttgtaaccgttcgaggttgccgtacctagggtcatcaccttaggtccagaatctgtgatacaaatctaatgacatgtcgagcacgatttctcattagataaatagggccaaggatcgagagaagaggtaaagcaagaaaacgacccacttggaaatctccatcggtgtcctcttgctcgaggactagtcgcatagtctcctctacatcaatcaggaaccgcctgggagccgtagtagacttttcatctgtcggatgtgaaccaagtgagcttacacaaacggtgaggcgaaacatagagaacagacaggctggaacgaaccgtgactgagtcggcgttgtctgttgataagatcttggccgatacctactcctccagctttggagggagccgccttcaaaatcatgttattcagagatacacatatgaaaaagacaaaagatcagtcatctcttatcgatcgatgtctgaagactctcgatagaacatatcaccatgtactagacacggtgatgagagaagaggatgcccagaagaggcacaagacagtttctcttcgaccaggccaaagaagaaaaacaaaaaaaacaaacctgactgaacgtcctggctctcgaatgaacctcggtcgaataatattcactggcatcactatgaaccgccgggatagtcttctttccacctttggccagtgttgaagtatccgaagggaaccctagtactttcacaggacctgatgctgatgtggctgctggtcggcctgcagtcgaggacgaaggatcggtggatgcagatgcaccaggagcagcgcccggagcgataggagtgctgggtgccggggaatttacgaaaggggattcatggtcgtcatgaaatagaagtgaattggatgtctttaattgcggtctctgcatcgtgggtatgagtgtatatgaatgtgtaagggacagtgcgtgtatgttgtatgagatatcgagtagaatgagatggagagaaggaagaggggagagaaaaaaattgtcccggggtgtttgacgagcctatttgtggagaaaggtattcgaaagttttgtagtggaccattaggaatcgttgtagtgaaagatagaatgactgataagaaggctgagaaacaagggtgacgtcatttagctcgcttttgatatcttacagtacataccatccagagcagatcaacatacacataaacaaacgacaacagctagggagagaatatgaagaaatgtatggggcgtagagaaaatgaagaacaatacaatatatggatttgtaggatacatgatacatgtggttttcgagaagcaatgtaaaggttggatgtatgcaagtaaggaagaggaaaggagatatgtcgtctaggtgaacagataccaagggattgtcagtgtgctgaacgtccttcagaagtcgatagatgacatgacttacaactctgaagaagaaggcgaagaagaaaaaaaggaagaaaaggaagaaaagaaaaaaaaagaaggaaaacgcctatagcgacgcaataaacacggcccagccgattttcttacaagccggcatgacccccaacaaggatcccttcttccaccaatgttttaccctgtgcatttccgtggccgacgaagaatgaacctgatgaagacgtatatccttgttgaactccgaatgattcttctaccgccgttgacggactgtcctcttctgaagagcttccaggagacggcgaggaggaggaccgatctatcgacgaacacacggtcagacgaacagtttctttcttaccagcagggaaacagcccccttgccctccgtccctgccaccgatggcgaccgtcctttccatctcctctagagcggccatcgatcttgtccgagttctcgttcggaattgttcttcggatcggtttcgttgatcgatgatttcccagactggtcgatcccattcatcagtcaccttcactcctggaatcatggttagcgaacccaacatggttgacaacgagtccgaccattggtccttcgggatcattccgattgatagccattcgagtttcggaaatctagctctccctcgttcgaagagtgacttgatctctcccagcgccaataggtccatctgtgatgaagggccaaccgcctcgggttctccacaaggagtttctccgtctaaccgataatggatccggctcaaccttcgatggcccagtttgaagagttctcttccatcatccagaccggaggagaagacccgatggttggttagctcgagtgtctgtagattcggacacaagccgaagacggacaagtcgagtaaagaatcttgtgggcaagacgatcggtcagtcgagagcgacagatgatttatcgttgagccgatcgcagagaggaatgtcggttccggaccctgtatgattcgagaaagacaaaaagattcaggagttgtgagcggcagtctagggctaaggaacaagaaaccccttctgaaaggaacggacccatggtgaagcctctggataacgcttcgttgtgaaactgaagtcaagctttctcaactgtggcatgtgggtcatgtttgattgtcgttcgactatactcaactctcgaagaggtatgttgtttcctaccgagtttcaaaacagaatgggagagtttgtagtggcactttgttagtcaagacctcggtagattcaaaaaggaaaaagacaaaccttggttgaagtgatcacatcgaattttcagcgattccctgtaaatcctcgtaagtcatcagaatctggtttgagttctgctcatgctgcttcttatagagtaaaaaatgaacagagagagctaggtgctacagaagagtactaacagggtgggcgggaactcgacaataccggtcgcaggatcacctgtgaaatatgatccagatgtgcgaaaagatatcagcttttatttcctcgcgcacatgattctctcgtatcttttaaaaacaagtacagaaggagagggaaggatgattctttcaacgcaccataccaaatctgtggtaaataaaggagacggttagcctcaagctctgattcaaatgacattttcacgaagaaaaaatgatagcggtcatgtccgacaggacaggtgatgatgtcgagaccgaagaacgagacaatgatgtttagaatgaagaatgaagacttacgcttagctcccgcaagtttttaaagattgggtacgtcaacacctcacttaaactcctattctccaccgccaatatcattcctaacgaccgcaaccggccgagctcttcgctctcgatctcttcgaactccttcaacagaggccagacaaccgttggaaattccacccttctgaccgcgccttccttgagaaggattgagagaagcctgagcctgatggagatgatagctttataattgaaatcctgtggaagatttgaaggttcccacgtcgcccaggtaaaagttcgaatgaacgaccggagtggcccagggacgactgtcgagctgaacgaactcggattagagatcgttctcagaaatcgtttcccgttcggtacggttgtcaaagaaacgtgcgcgtagagaagaggtatcgcaaccgactacagacagggtttgaatgacgaaaacggaggatggttcaagtcggtaagtgttcttcgttctatagccgagacgaaggtgccaagatccattgaatctacaaatccacatagtccccaagcaccttgacttcataaaagaatcacgcgtgttttccgaacgaaaacagccccacgtatttcctctgcccctctttgtgttccgcctcgatgccaagccgaaactcgtattgaaccagctagacgaccggaagggcaaacacaaccatacgcacacaaacggactcactgcgaaatctttgttgacgaccaaacaagtcttcaaaaatgtatagaccctaacggagtcctcatgttcgtcccctgtctgatggaacggagagatcgacaccccatcggcgccggcccggatgatagctgctttgagttcccatgggatcggtggaaacggtttgagcggtctttctgctcgaatgagaggactgataggaagagtgtaggcggacgtaggaacaggcatcttgttgaccaaaaggaaggcgatgagaacgacacagcttgtgatgtaggagtggacagattctatcaggggagagggagagactccaaccgagcggaagcagaggaggagtgtggaacacgaacaacaatgagagtgatatagaaaggttcgaggggaagttggaaggaaagctgggttcacgaggtccctgacctgtagatcactgtctttagctgaggagccaacgaaaacattcaaacaaggccaaacaacacaggcagatgagccaaagtggaagtgggtccgaggccattgaggagaccgatgtatgtccgtcagaaacaggttctacataccaaatgcgtgcgagttcctcctttcgttttcttctctctttctatctgacaagagaaaaaaatgttcaacgtgtttgtggtcgtggttgtgccgagtgtgcgagggctgaaaagagacaaagaggttgtgttgagtttaatgcaaatgatgaattgaatgcattgtctatcggaaccgacgcctcatttcttcttgttttccttcccttgtttgtgctctcgatccatcctattctttctttgtgtctcttggacgatatggaagaccaagaacggcgaagaaaatacaagctgagccttgcagactcggtcgccggtcgtgtgtctctaccatcaaaagcagaaagcccttactgccttgcagagagctggatcagacatcactctgatgacgaaccaagtacgcaatgaccatcaatttcgcttatctcgttgaacccggactccttcccatattcactccaaatttcatgatgatcaactagtactcttttcttatcacgaccgaagctttaaacatccatcgtgaggcagaaagtgttatctctacagcaagatatataaaaagagacggagaacagagtcgtttaatggagagggaagtcggggtctcaggagtgaagagggagaaaggcttgtaagttttgcaaacgtatcgaccaaactcctattagaaaaacaaaagggaggaggaaagaagaatgaagaagacgagaaagaagaatgcagatagcggaaagagaagagatgagaagaaaacaagaaaaggtaggactagaggctaataaacacattggacgtaaatcatactctttacaagactattggagtgaagaaacgaagagataaaattcagtctccagtttgtctaacgcgttcgtccgatcgagacaagaaccaatagtacgaacaataatcaggaggcctcctggaaaccaacggctcgccggctcgtggcgcaggatcgaattgaaggctgtgaggaaaagaagaaaccccaatcagaacccagctctcatcttgagcaaaactacaaaggacaaaaaacttacaaggtatacttgagtgcatcgtcgacctccaagatggctgcctgattaccgcatcggtagcagtagtttggcgccgagaaaatggtcacgacatttttctaaaaacgagaccgggagcaaacaacgggcaatgcatgagccatcgatgcctctaccgaaaatgaacaatatacacataatgtattcaaagaaaaacaagggaaacctacatcttgagcccatgagtatccctccataaccaactgatgtgctctggctacgagtgttaatccgttggaatggttgaaagcctcactagagcgatcagaaagaattttcgtaggtcaagtaaaacaaatcagcttcaaagtctactatgtcaggagaacatcagcattgagatgaaactctgaaacgaacctgatgtcctgcccgaatgtgtaaccagctcctcgaggacttataccccaaccacatcgatcatccggatcggaccacaacaagtcgcacatgggtccctcgtggggaacctcttgaatacgatcaatcgaacgtatatggtctagtgtgtcgatcgaaggtgacagaccaccgtggagacagaagatctttgcaggcgagacgagataaacagaaaagaccaagaaatcagatattgacctggcaccaatttgatgatccgacgtaaactcacttggttctcaatcaaagcggtcaacggcaggtagtcaaaaagatcagtgaaaaatttccagacgttggcgtttccgtactttcgcaagcactcgtcatagaaaccgtaaacctgggtgatttgtcgagactcgtggtttcctcgaaggatcgttactcggtctcggtatcgaagcttcatagtgacaagtagagtgacagtctcgacggagctattggtgaaaggcaaggagagcgatagaagagaacgaagacgaaacggagagtaacgaggggataagttaggtataatccctctctacaaactgtatttagaggtcgagagaaaacgaactgatatcctcggtcgacataatctcccataaacaggtagtttgtgtctggggagtttccaccgattcgaaagagttctgacaggtcgtgctgacaaagtcaaattgcacggaaaagagcgtaattgagatctggtttgtccttatttactgaatcatcttttctcgtcttgtctcatgacttatcgtaactaaccccgcccgcttgatttaaccaaggggctcaggctgtcggccgatagacagacaagatgtttcaacatgacctcagagaaaaggagtacgtacgaattggccgtggatatctccacaaaccgttacaggacatcgaactggttggacattcgactcctccataaggacctcacgagtctgaaacagatggatgatcgaatatgtcaggatgatctacaagcaacgattcgacaaatcccaagtccaggatttgactaagacaagataggatagagaagtaggaaggagagtgggtaatcgatatgtatgttgatggagatgtttcccacaacctaatctatcggccgcccgagattccagagatgctcctttcctaagacgcatatgctccacccttccatgccagctttgacgaaaaaagagctgagagaagcaaaagaagacaaaccttctcacaaagtctcttgatgtctgcttcactcagaggcttgcattgctgaagttgggcgatccattgatcgacctgtttttgtttttaagaccgaacgaagaaaaaaattcccccagagacgaagatgatggtcccgatagaaatcgtgttatatacgtgggatagggagttatgtagaccgacgtcagtgcaaatgtccagtgtctcagctaacacgcgttaagaaagagaaggacgacacgaccggccatatcgatggaagtctacttggcaagggggaagcgagcaggaagaggaaaaacctgctagccattcagaccttcagggcacatacctctccggtgtctcccatatcggaaacgaggaagggaggggaaagggatgtgttgtctgtcttggtgtacgggctgatttggtgtgagataggtgtggactgacgagggatgtaggaaagaaaagagcaggagagcaaaagatcgagagagggcagtgatggaagagagaaaaggaaggagagaaagacagaaggtagcgatgaacactgtgtgcccagtgacgggaattgtaaccatggtatgtaaccacttcaaacaagccaagttcccccttccttatcgttcttccatagacacagtacaaatatcatctagtcttgtggagagggtacattgatagtgagaggtatacggagcgtttatgcggttcggtgagggatggaaaaattcatgacgagaaacgtaggactaacagctgaggaaacgatacgaaaaaggagaagaatagagaggtatccaatagtcaagtagagatggaactggcgtatatggctcgtcgttcacgctctatcctttggtctcatacgtgagctgctcggaagaggagatgaaaagcttttttacgtcctggacagtagtgcgcgcgctaatatcggcactgagaagagaacagtcgcgatcaatagattctttgcagaaaaggcgccatacctgaagattctgaacacagttaattaggtcactagagtgagccaaatcagtcgtgcaggatgtcctgattgtacactactacacggactagaaaagggaaagacagagacagagagagaagtatacgatgtggaatgtaggatagttcatgcttttttccagatcaatctcgcattttctctctcttctaattcgctcgtcgcctcgattgtttgaatgatcaatcgatgtgttctctctatacgacatgtgtgcgagtgtataagttgatgtattctactttcacatactcagactagcaagatagaagattcgatcatctttcgtgcagtcaacactctcgtccaacaatgtggatagccctgccgatgaaatctcacgcgacgatatttagtcaggtttagatccgacccaaaaggccggaacagataaggtgagtttataagatgaagatgagataaaaggctaatgctaaacaccgagaagccaaggatatgatggaggtgatggtgacggtgatggtgatggcagtcaacacggcagtgtgttgttcgagtactactcttcgaacgaacctgaccattctcattagtcgctaccactgggttaggatcgatcaccgagatcattgctacctataagattacagaaagtccatccaaatcaagttcccgatagatgaccgtcgttaacataatcattgccgtcgtcgttgtcttcgttgtcgccgtcgtcatgttcactgttatatcaaaatcgaaggtttagaaacaccggagatagaagcatggaacgtctcttcacgtacgttttcgggctcattcctcttggttacacggggcgcgcctggaaaagactttgctcgttgttccaacatccaggcgcttatccccgacacgaaatttctctacttgatcctttcaaacgagttcttctctctttccaaagaatctgtccatatcttactcacacatatatacacgtataagcacacgttctgtgtgtttgtcacatacatccctcacgtttcatacatccgtcttctgtacattccgtcactgcaatccgtccgcgtgcactatctctcatagccgggtagacaccagtcgttttaccttacagatccgtcctgtctcttctgggatctcgtacaagaccatgggagcctcttgctgcaaacctgacgttcgtttctcctttcgtctcttgttctcttggacttcctatctcatatctaggtcctattcttttcttgttcaatcaggtcatcgattatgatggggaaacaaacttgtttcatttctatcttctccgtagcgtcggcaaaggagcattcggcaaggtcagtcctcgctttcttacatacgaccaagctctttctccgacatccatcctctccctgacttggcgcgggataagaaccatgatcgaacaatctctctcacgattcattctcaatagagaagctatacttcggacctcagttgacgactatttctatcgtttttcttccccccccccttccttgataggtccgagtcgttcagcacaaacagacgaagcagctcctggctttaaagtatatcaataaggccaagtgctgtaagatgaaagccgtggctaacgtcattcaagagaggagattactcgaagaggtttgtttcttgtcgcgtcgaacttgtcctcgtgtttttcctcgagagagtttaacgaaaagctgacgattccttgttgcccaacatgggtatatgcggtccgttagatcgaccacccgttcgtcgtcaatctaagatacgcctttcaggacgacgaacactgtttctttgtgctcgatctcatgttaggtggtgatcttcgatgtatgtctttcttgtcgttcaacttatcgagactgcttccctatcctcttgagacgcgtcactcaaaccatcttattaccaattctctaaaaaactccacactcagtccatctcgatcgtttgggctcactacctgaagaggctgtcaagtttattgtgtcagagatcgtgctcgccctcgattacctccattcgatacgaatcgttcatcggtaggatctttcgtcttccttgatatatcgatcttgctcgtttcgcaaacatcttctaaatccctaacgtctccctccttcccttgtcctctgtatattctccctccgttctttctctttgatcttttctcattcttagtgacttaaaaccagacaaccttctcctcgacgaacgcggtcatgtccatctgaccgattttaacattgctgttcacttcacaccatcaaccgcgcccaatgcgaaacgcctcatgggcgtcgcaggctcgatggcatacatggcacccgaagtcctcaaccgcaagggttatgcctgtcagatcgactggtggagtttgggcgtgattgtgtacgagctttattttggaaggagaccgttccgagggaaaacgaatagtgcgttgacggagagtattgccagtgatcgcttagtctggccggatgatggagagaccaagattggaaaggatggaaaagaattcatcagttcggtacgtcttgcttcctgtatttttctcttaaaatgcgaagaagatcagttcgacagagatgaatagatcctgccaggtcaataaatgacgctcatcgccttcatctctcttttcttccaacttcggcctacaaccgctttttagttactggagcgagatccgatgaagcgacttggttggaaagcagacgggaccggcttgactgacatcaagcggcatccttggcttcggtcgatcgactggtctgcggtggaaagcaaacaggccgtccctgtctttgtacctgacgtacgtttcctcttctgtcctgtctcttctctctcatatattaggtactgacaaattttagcttgattcgtctgattcatgatcccttcctggtcgatcacagtccaaaaaagcaaacttcgatgcaacacacgagttggaggagttattgttggaagaaaatccattaaaggctcggaaaaggaagccgaatcaggatgtgtcgttgttgagcacagatatgcgattgatggaagaacagtacgtgtccccttggctatctgtcgctgttttcttgcaaagaagcgtccagagttgaacctagttgtctctacgtatttgtcaacctaaagctttcgattatatgactatcgccggatgtctagaaaatcctattaccatccctcgacccctccaccgcctacattttccgtcgcgaacccagcaaacaacgctagttccctgctcacagtaccggcttcatctacgtcgatcacgacgttgacaaaattgataccgcttgggcccattgcccaagctgggtcaaccgaacgacctaaaccggaacgcgcaaactcgagtgtatcggcctgtcatctcgttagtcggacaggattgagagtagagagtaggattgctaatggtgggggtaagctgataggacaaggtgaacaagaaggagggttcgagttggatcctctggttagtcttttgctgccttccttcccttcgttccagggaacgatttatttatttacgcaagtccattccgcatggtgtctgatgaggacctttcatttgctttcttctattgggatgagcggatccagaatcaacggaaatagtaaaaaaagataaactcccgatcaacatctcaactcagccggctttctgactctccgtatattctcccactcatccttcctgtctttcgacattgaatgtccgaattatctcatcgtaaacttataacacaacctacacatcaactctgataccctcttgttttctcacctcaatcgtcccatccttcttgttttatatcctgtctcttgctttggtacctggtctttttcgctgtgcttctcttccttcccttgtcttttcttctcgctcccgctctcgctctctcgctttcaaaatgtactctttctaacaccttcgcttttctctcatttccttcttgttctttgcttactgttttctgtttctttttttcttttttnnnnnnnnnntctttcttttttatctttcaaagaatcctcactagtagttaatctcttctctaagtgagcataatgctcgacatgggaaatattctttttaggtagccatcatcgatccttaaaattcgtactgtcgagcctccaggagctcgacattcacgacagctccaacgcttcaacgtttcaacactccaatggtttccatctacactatctgcttttctctccgttccgcaagcatattcatcctgtaccgatctctctttgtgtttccttcttatatctgcacatacaggaaggagcgaaaggatatacatcttctctcaatttccgctcgcgctttatatcttcctctctttgcttttcgcttccaaaaatgacatagcttgttctctcaggggtctcttctatatctcttcttatatcattctggttcaacacccactttttactccaagaaatctatatctatctcatttcttcaactcaacttaaaaaaatcattgcattgttttgtttttaatcttttcgtcttcttcatatgaatatatatatcccttcgagacaacctgcttattctgattaacttcctctttcgccacaatcctgatcctgatcaatctctccattgaagagctcaagacaaactcaatcggtctaggaaaagtgcaaacgtaaatgagcaaaacgacacgtgtacgagaatgcgtgagtagcaaccctagcacgcgtcatcaccattagattgagaaaaaggttcagcctatcctatgtcctaactctcactcgtcatagccgtcaagtatgcttacaccttcgggacatcacgtttcctttctcgtctctgcattttgatcaagatcactgttcgagagatgtgaactgatccctcagattatgtatatatctggctgatatcggccagtgagccgtggtgacgaactcagatataaagttttgctaatcaaaggggtcaatcggcagtgccggctcaagaaacaacccatataaactcacgcttttccaccacattcgtatcttgacttccaacaaccatcatgaccaacaatccgtatacgcctctgccctcgactgacgagccggctgcgcgctctctcccttcgtactcgaaggaatttcatcctgatggtccgcttttgctggttggagaagcctcgtactcagattcctatccctcccaagttttgaattgagtgccttccgatagcagattcggagcctttataatcgtttggaccatgcctggttcaataactaatgcaatgcccactgaattcaaacgcactgtgatgtgtgaatggggtctcatcaaagaggtatgcttttcgcatcttgctgaaattaatctcctttctttctctcttttttcctttgcgaaacattccttgttcttcacgcgtgtgcggtgggatttagcttacaccgatccttgttctttgctcttaattttcttatctcttccatctggtttgactatctaaaagcaaactgctgagaatctgcgtcaggctgttccagatttcctcggcaagagatctgccgaacgaatgaccttccagatcccggcgggtgagacatgggccagtgtattggataataactggaatgactttatggttggtcgaacgtacccggaggttagggtcgtgatcatcaagacagggtttgaggaattcagaggttagttatggacattcacttgttgtcctcgagtgtttcttcctttcttcctctgttttcgacttcttgccctaaatttaccgttcagtcagacaaaactgattttatgttctgggaatcagacgctatgctctacattctatctttagttctacgagttgtctcagtcgcgttctttatccattttgtcgttcttgtggtatttggctaaatcatatcacatacaagcctacgaaggaacaaaccatcttcttatctcgacaatgttgtgctatcttcatcttgttattgctcctttccaattccatcccttgatccatgatgttctcatctctgtgaattgatggttttactcaccaatataatgaccatgacaatatctgtccattccaactgacgttttggatactagtgggcagcctgagtgtcgccctaggcgctgcttcacgtgtttctcgcactgacatcaccgacacgtgtatgacaacgaagtcgaacatgaatgattacatctcatcaaatgcgaacaaaacttttatacttttcctagtctctctctcctgtcttatggcgtctttttttagatagccgcttcatccaacagtggtgggtatatcaacagaccgtttggtgtcgaacgggctagctaaggtctttacttggaaatttcaccttgatagtttgccctcatgttttctgtagtagtgtttcaacccttctcgaaagaatggaagtcgtacttatcatgtatagctagatgcgaagtaacagaggtcatcatgaggtgacggaaatcgtgatagaaacgaggggtctatttaatagatatacaacttttgggtgattcgtattcacctatgacaactaaagagagaggattatataagagaaagggaagaagcaaaggaaacagaaaaaattctaaactatgaaggatgatcggtcaaggttgagggtgacccaataccctagttccaagcgccaagaccgggcgctgcaccaaagtagccgaccgcagggatcttgtactttctgcactctggatatttattcgtcgaactcgtcgctaaatagtcacaagactcttgatagatagtatttacactccaatcaccgaccacatcatcagccgaagtggaggagatgatgccgaagatgaggataccgcagagaggaatggcggatgcgaaagcggtggcgagaatgtagttgtacttcgaccaccacgcaaggtatttcttcttgatgtacaccaggaagaaccatccgatcaccacctgaggccagtagtttccgatcgtcacataagggttccagttaatgcctccactgatgagcacaacgacgtggaccttggcccaaagggacttggggtactttcgggcaaggaagtagaacggcaacggaagcaccgcaccgaccaagaagccgtagagcagggaggtgtagataccgccggcaccgaacactcgtcctgggccgagggtaccccagaagacagtggcggtgaagaaggtggcctctccgttgcagtagaagtgctgcttctgactggtcgtgcagacatcctccaacgtcatctgccagttcaggacggcggtcgagacgaaggtggcgatgatggctccgtagatctggacggcgaaggtgtgtcgctgtgggatcttcatgtagtgggcgagcttgagatcctgggcaaatgcgatggcgttgtaacaactcataacaccatacgatttgaagtagttcatcgaaagagcttttccgggataaatgagaccaccgatgaactcagcaaacacgttcagcgtaatctcgattcccgtgatcgaggtga

SEQ ID NO: 829 - DNA, 19629 bp, Xanthophyllomyces dendrorhous
cgacaggatctggcgacgcactcgaattttctctccctcctccccgaccaatttcgatcccacgaaaacaggcgcttgtgctgagttcattgcgaaggatctgggaagccggccaagcgtcatcattccagtcggcagcagcagcagcggctaccttggtcgtcaaagtggatgagcatccatctgctggtggggtcggcgcaggtgagggcgacgtcgagattcttggtacagcaggtaggggtgtgcagatgtgggagctctggatggtattaatcgcgagactggtcacgagaggcaaggaacaggagactgaagacgccaaggcggaagatgacgttcaggggtctgttggggctgtcgaggcggaaatgagaagagcacttgccaagtttatcgcggatgatttctcggctaggttcgtgtctatattcctccttttccttaaccccggacgcaagagggaggaagagagatcttgatccggcgtgatctgacaattatcttggttataaactacaggtgtaagtttgccgcgctctggttgaacgaagagtggtacaacgatgctcagatctcatcaacaggagagcgcagagtaagtagagtgatggaaactttatccagctctcctgagagttacacccacccttgttctctagtccgaagatgctaactttaacaatcgtgctttctatataaaagaaatcgaattatcgatcgtcgttactcctcctgatgaatacataccttcccagaatatccggtaccagccttattcaattcattcttgaccttcctgaaattccatccgaagttctccagatggtccaaacactttgtgccgatcctgatcgaaccaagggtagagttggaatgaaaatcttgaaagatttgactgtagaaagaccgcccgtacgaggctcaactgtggaggctctattagagctatgtacgcatcctggtaagttgtcattgataatccgtgatcttcttctcctctcttcttttcaaaaagaaaaagtatcaatactatgcgtacacaatgctcatcgatatttctttcttctatttcttagacgtcaacgtccgaaatcctgcgattgccaccgttcgcttgtggattccagattcccaacccatggctttgtctatcaaaacatttgctctccatctcttggggcgtcttcgaaccgcgatggaagtacctacatctatatccgagccaaatcctgctgctacacctaacgaggagactgcagaaagctcgtccatggatgctgatactaactctgatacaccactgaaggatgtggctgaggaacctgagcaggaagaagttaggagtcggtatttgccagcgaagctccaggcacctgtctcaatcgacattgttaggcaacacgttgagcttttgttcgcgttaacgaagaagattccggagttcttggacgagttgagtttacctcgtattgcttgctctttgttttcatttcgtggccgtttgatgttgaccaacgttctttctctttataggatttttaacgcctacgttcatttagagtcatccgttcaagatgcttttgcgcaaataatcacacccctcatccggtcactaggacctagtcacggaaagctcttgacagttcttcgaaagttcccagctggagcggaagcgctcgcgcttaaaactgttcaacttctcacagaagctaaagacgagaagaccaagttgtcggttccattggtagcgcttgttaagagtctagtggcagaacgagagctcagcccgaagttcatcttgcatattcttgtggaacttgacaaggttagttttgtgttcttctttctgatcaacctatccatttatcttctctctgctcgtctgttgtccctcataacgagagaaacaagagaaagagaacgagcaggttcatttctcaggggaagaagacaaaaacaagcactagcccatctgtctgctgtttgtattcgtgacctgatcaaacgcacctttctctttttccgttctctccatcgcgtatctgtttatcaatacttggatattcttccgcaaaaccaggctgagatccggaagcagcttccgcgaataatttccatcctaggtggccaagtacctgaaccagatctcgttcatcaaatcttgtctcaactcttaaccaccccacctcagacgttttttgccgaagggaatgggaacataccgagggtcaagccgtcagagcagtttagtccagcagaattgatggttcttttgcaccattgtgagaaggacagcggattgaaagctacgagggacggtacgtgcaagatctttctattctggtctttttgattagtttgtaccatgctgatcagcggtcatatatatgtttcaattgatctttctattctgcttttttgaattacaacagcgatcgatatctgtttctcaatgacggatgtctatcgatcggaagtcctcgccgttgtgatgcaacagattgtagatgagcccgagcttccgactcttttccttccaacagttcgtttcttcattattcctatctctcttctcggcgaagcgcaaattgatcggatctcaactttcttctcaaaacctcagatcatcaaatccgttcgaacttataaatccctcaccgggtttgtatccacaagtcttctctcccgactgatcaccaagaaaatttggacttcaccccaaccatgggaaggattcttccgctgtgccagagtacttggtatggccagttacggtgctctacttcaactcccaagggagcaactcaaagagatcgtctcaagacctgatggaaaagcattaaaggctggtttgagagacttcgttctcaaaaaggtatggctgtctctagatttgatctctatcagtagttgtctaactttcttttcctctgttgtcctttattcatccaggccggaggaaataccaacaggctacctgcttggtttcctgaggtttttgcagaagatccgtcaacacctacatcgaatgtttccgaacctactaagagcaacacatccgtgcccgcaccgtcacctggatctgaatctgtatctgaactcgcatctacgactgcaccttcaacccctactgcataacctccctccactccatcagtttcttacgccactttccaatctatctttaaaatatatatccctgggtttgatctcgaaaggttacttattcacctatatcatatgtcttctctttccctgtacccggtcgtcaaaatcttgcatcttgcttgtccttctttattgacttattccatgaatgcaaatggaagatgatagaggagaagatctttttgtccagtgtcttgagaatcttagtatattccatgttatacggtttcaggctcgctttgccctttagttttaatgcaaatggtttccgtcacactgagataagtaatgagaagagttaatcaccacctccactaggacctcccattctcgccatcttccgatcgtgaccccgttttctagcttggttggaatgtcctctactccctttgttttctccacggccgcgactgccacctctgttcccatttcctcctcctcgaccacttcctcctccgttactgcgaggtgtgttcgaactgttaccactgacactaccgtctccttttgcccctcctcctttctggttggtgtttgcttgtgcagcagttctagttgggggtttagatgttggagcgaaaaggcccagccgggcgtttaacgatgctagttttcgtggctgcgcgagaacaaaatgtgattagttttgagctcataagatgagaacagttcctaagggttgtctttaatatcagttagagaggatagagaggacgtacgttccgttcaagcatgatcttccatccttcgatttgttcatccgagaggcctgccgatccaacccaaattaaaattagatataagacttccaagcttgagcagaagagaaaagaggatataggagagatgagagaaggaaggactcaaccggtttgttctttgagagctgcccgtggtttccctcgtcttatgttagaatctctatcgaaaaccttcgtgtccgccatatatgtctgttccagcagagattcgatatccagcggaacattggtcgggtttgatgaatcctatcaggaaagaagagcaagcggacagggacatgggcagagacgagaaaacggaggtttgagaaacagttgacggaacgcaaaatacaagaggaaaacgctcacctcatcttcagatctgtcttccccactatcttctccatcatttccaaatttctgaccgacaactctcgcccccggtgtatctccatcctcgtcctcgaaatcaattgcttccttctccttgttctttgccttctctagaacctcttttctggcctcttttcgttctctctcctccctttcttcctcctcctgttcttctcgttgagtctcaacaagtcttaagattgcactacgcattgtatccggaatctctgaagatagcgccgggaagtcttctttaggcgtagccagggaaagtgaatcaaatgtcttgcccagcgcggactctgcttgaagtcgacgttgacgagccatcgtcaagtatggatcatcttctgctcctgtttcagcttcttctagtacactagatgtatgatcggacacggtaggggggacgtaggttgggtcgaggagcggtctaagatgaggaggaaccgtgtcctccaaaacggactgaataatcgcctcttccatcgatgacgatgtggaagcaccatagtattcgtcttccatggcggttgagatgaattggctaggaaggtcgggaagaatttgttgaacggacacaacggacgctttgatctgcgcggagagagcgagtcttgaatttgatatggacttcgaaccagatgccgacggtgatgacacctgttctcgctctctccttaaagcttcggtctcccactctgtcttatctccctcagtctccaaaagtcggaacgccgttggactccattcctgaccgtcgtccgacgtcctacctatcagtccaccagaaacactgaacactgtctcgaagtctgaccatagtgattgaaatggtttgggcagctcccctgtagaagttgaggtaggcagacaagctattacggcacctatcggtggaagtgggatggttgaactaggtgagagcggaaataatcgagcgaggatgtgaagatatcgaaaggaaagattcaggtcggacagcaaaccatacgtctcggtgagcgctttgaagattgtctgaaatctttcttgaggcgagaacggtagagaatccgattggagcaggtcgacggttgaggaacctcctatccgaaggagggagaacagcaaaacagccgctctagggacctcctccgaacctcctattcgatatagatccagaatctctttcaaatattctgtaagatcatctgtgtctattacacctccttcagcctgacgagatcgccggaacatccctcggaggggatcctcttctcttgaaagtccagcttgttccgtttgctcttcctccaatgacgacgaagaatctccagagggtatcgaccatggaggaaggatcacacccagattgacgataacatgaaacggtagtgagtccggtatacgaagcgctaaagccatgagcgattttgtatcatctgagaacgggattagcctcgaggacgagggcggggacgaagcgtggatggaaagggaggacaggtagcttgaagcgaggtaggtggaccatcgatctacagttgactcggccatggtgtgtctctcttgttcctctataaagatgtctgtctatgagagaaaggaagtgagagtatgctatttgatgaccgtctgtacagaggtcaagatgaagtccacaaagaacgagcagaccaaggtgagggaaagatggagtaggcgaaagtgagagtatcaggaaagatctgtagtcgttacacaaaacactacgactttctttcttgtctccaccttcgtccgtctgattgtcgtcatcgatgtgttcatcttttgttcgcttacgacagcaaggtcggtatatatatcgcatagtcgctagtctcggtcaagtacagctggctaaagcgtaggttatcgcatgttcaaaatcggcagttacactcagactaatccatggccaattagcctgctggcatatacactctgatcactggtcaaatactccaccatctgctttctaacacacatctaaacccgatagcgactgatgttttccgtttgtgactgtaaaagacaaagagtggagaaaaaaacgagaaaacaatgtatttctgcaagccagctcatcatgccatagtcccagcaacgacaaaaagaaaagctctgggatttaagctcggggtccacctcgaccggcaccgaaggcaccggcaccgtcctctcgtcgtcggtactctcctcgaccggcaccctcggctcggggagctcggtaggcacctccgggaccctgggccttggcaggtcgggtgggtcgcttgagagtgttggggacaatctcggagggaaggtggaggctgtaggcatatgcaggcgttttgaaaaggaacaggagagtgtcgaaaccgcgagtattaacaggcagaatgagcgagtcgtaattttgaaatcatgagaccaatgatgaggataaacagagaacagcgatgaaaagccaatatgtttgggatgaagggaagagctatgtgtcagtttttctctctgctgtctatctcaagaacgaaaagcaacacgtacaactctcggaggtagtcaagaccctcaggggtgagggtgtagtagtagtactgccacgagactatcgttcgtgtaggcccaagaacaacgtagtcagcactgaatccatccaagccaaaacatcgataaagcagacatacactgggtcttcacgtatcccttggaggtcaaagactgcatggccttgatgacctcaaggttggagacaccctcaatctcggggtgggtggcagcgttgaagtccttggcggcgacggcaactccctctaatgtacgataatttcacaaaaccagaatcacattaagatacagtttgaccgtttgaggaaaaaaagaacgccggagaaaagtggaaacgaacccttgaagaggttctcgaagatggccctcctgttctgtttagagataagcatattggcttttttctgatgaagttcggtagcacaagttaattgcttgtactaggcccggctctaatggagcgagaaacataaaaaatagggatggctggattagtggacagagtccagaggttgcaggtagtgggtacagggtttcttctatggcacaggacggcttgaacggctgggatgtttcttctttctgagacgactccggagtgggagcgtgttgggataatcctaaagagggagtagatccagtctcctgctcaataactcgtcctctgttcctttcatccgttccgtctgcctgcctgaatcccctggctcttccctcagaattgacaagctcaatccctgtcaagatgcaaatcaaagcgattcgttttctcgaaagggaacaaggctcgtcatgcatgtccttctccttcctatgagtgttggatgttgtcgtccttccaattaatattccacctatctccttctcccctctgtatttctatcggacatgagttccctctccgttatttttcattctttcggctgatgtacgtgctgtttgaaacctccatcaaaaccgaaacgaaaaaagcgttctcccccaaccgatccaagccgtgtgtgtatatgtacgtgtgtacgagcctgcaccaaagaagaaacccatagagaggaggacacaaccaagggaacaacactcacggagacttgaagggatgaaggacttggtaggaaaaaatccactgtggctttggctttcttcctacaaggcctgtgcacggggagcaggggggaccgtgcgcaaattctcgttgagtgagttagtaacctcgagaaattcaacaacgaccgttgctagggaaatcaacccgcggccatttcggccagtaccgcctactctgtgtatacacccacacacatacgcatccacaatatcatttatacacgatccatcagatcatgtcttcactctgataagatcccaggctgacggaccagccaacgaacggaatatctgctgatcggtcgtcgctaagctgctgacatatggctcgttctctttagagacgacgatgtattttccctgcgcgcgagggagacattctcattttggatctatgttctctcttgagctccgttatatccatgagtctattcacagcaaacacaatcatggaaagaactatacatagaagtacaagccgaaaatcacaaccgttcttcctatctcatgtcaagtttgaacctctttatttctcacaccttccttctcactcctgctcgctcgaggatactcatccctccactcttcccaactatcggtagagctatctttccttcctgcctctgattacctcggtcttcacacactgatcctatgaccggaaccaccggtacccgcgcgaagcttcgctcttgattttttggaactgcacggacgttgaacgttgttttgtcccctcgttctgtaccacctgcgctcccagtatcatccggtcgatctccggctacagggttccatgaatcatctctaaagccagctactctagctgctgaatacttcaaactatccttcctcatatgtcctttcagaggatctgtcgagcctgctcgagtgtgagtaaatagcgttgatgatggagaaggagaagaactgggtacaccccggtatgtgcttcgggcggagcttcctaatccgacagaagaacaaggagcggcatgagaccctgtggtagtatgtccatgataagaacgggataaatcctcgcttcgcgcatgttggtgagatgctttaggttgcgacctggcaggctggggttccaatcggcttacagaccgagtggaagagggcaaaaccttagaagctgataaacgggataccgtgttctatttgatgaacaggaaacaacgtctcagttttcttcttcctgttatatctctctcagctaaaaacaagaagaatacaaatcgagtaaagaaagatgggacgaactacgcaacctcgacaccaaacaccaccttcatcatcgacttttgcacccgaatctaaaggtcttccacaccctgctctagaatctgactctaccagcgggcttacaagcttggctttgtttggtttttgaggacctcgattagttcctcctccacaagacaagcaactgcaagcgcaaggaagaaacccccattcgcatgacaaagaaactcgggatgtcaacataccaggctatcagaaataaacagaaaaacatgagatcgagagcaaaaaatagaacaaacgattgatgccacctctcttctccgcttgtgttacatcccaatctagctggaccaacaactgaacctctctccattggacctatcgactttgcgcatcctggacagacagtcattcctccgaatcggctcgcacgaggcgtcgtgggctcatctcgaacaacagaggtctcggccaaagatacaggcgaacgagaagcagaggtgatgtttgtagaatgaagtgtcctggacgagaatcttgctgctgaaggcatattcaaagatggacggggaggggcgatattggcggcggtgttgctgacgagaggcaagatatttagatcgggattgcctcgagtctgagaatagattataacacatcaatcatcagatgagcatttgatagtagacctccggaaagagaaagactggaacaatcaatgcgaaaaactcccgtacctctttttgaccgatttgttcttttcctccgctttgatagtctctcttgaatccaccaggcgtccagattccgtgtggctcatccttgctcgccccttttctgattgcgagttcaccatgcgcatcccgtacaaccgccacgcctacggagtgactttttccgtgtcctctatttggtttgtcaaatttacgggaagaaagaccggtctgttcaactgcgggtgtgaatgaaaacctgttcttgaggttctcgacggatggggcgctttcactccatgatcgagcagaataggcatcattatctgccgttgttgatgccgatgttgagagaggagcaatccggagtatggctcgactcgaggatgaagagatagagttaggtagcgcgtatccgcccaagttgctgctcggggagtgtcgaatgggttggttagcgagacccggagggaaggcggtagggatgaatgttggatccagatgaaagcactgctcgcaggttgggtgtcgatgtatattcaacaatgtagccttccccgcacatcctatatttccagtgcaatgatgatgagtcctgagccattcagattcggatcgcctggaagaaacctgaaggaagagaagagtggacgtacgtgtgcactgaaaacaccgttcgtgccagaacgagttacctactcgaatcgacggatcgttgatgattccgagcaccggttgtgtgcaaagtgtacagtctcctttcttataatctttggcgtagcagggggcacataggaatctggcgtccagactgagtagggaaggaaggacagttgaggttcgttatttggtgagcagaatccaatatgatatggctcgaaaaagagacgagagagatgaaattctagttaccaacctggcagggtctgttccaggtaaagggaagattcttccaccaccaccaccaccgccaagtttaccaaacagatctttacagaccgagcatttcgcactctccggagtacgatcatccaataccgatccgaacactttttgaagtgaagcggttgacgcgttggatgaacctgtgagggaagggataagaggctgagcgtcgtcgatagaagaggccgtaccggtagaagacgttgacacgttagagattgatcggtgaaagccgggtggacgaggagtagaggaaggtagtcgggtcgcgccagatgaggtattgttatcgtgagtagatgtgttgatagacgagatggcaccagagctagatgaggcatgtgacatgtgtaatcttctggatgaagaggctgtgggaggggtacaatatctgtcgagagaaaccagaacgaacggaatcgttagcaatattgaaggaacaccatgtctagctccagaaaacgtactgctgggcccatcgatctttctttgagagagagcttgaggactctattcttgctctggccaaacctggaactgttggcgggaaagggatgtgacgcagtaaacgatcagtccgatccgttggcccgcaagagtgatcacaggacgaacaaggccatcaaacatactcttatggaagcacgattgacaacgctcatgagaaaggtcaaggatagtaccgcataccgagcaaaacatgattgatctcaggctgatgatcgtatcggtgatgcagggaagatgagaggtaaagtaggagaagtaagacggaagagttcaatgagaaatgttaaatgagggaaagtgaggacgcgtcgaaagacgacaggacgcgacgcgttcaagatgacgtaagaaacacgtgcagctagttctacttctctctctctctggttttggggggggaaaaagaaaaaggagacccctcgattttgaacaccaacaatcaatcatgatctctgttccagaactcctcgaaaggtacaaggacagcccgtttgtcgttctgtctgactttgatggcacgatttctacagagttagttctcgtcctctgtgtgtgttccgaacaccaagtctgtgatctccgagaaaagcgcccaaggctgattactatttaagcaactcagagactcgaacgatcatgttgtacgtcttcatgcctctcgtcagatgagccaacataagatgcgctgaaacgtatatacgtactcatactacttacagatcgacaaatttggtatgggcgaagccaagagacgaattctttgggacaaggtcgtcactggtgacgactgcttccgggatgccttccgagtctctctccagagtgtccgagacaacttgacgttccaagaatgcgttgacattctgtcaaaaggttgtcgtcatccgttcgcatcatgttgatttgtgtccagcaatctgagagtctgtgctgactgtacttgaacgattgaaaaacgctgtactccaacgacttcttcaaatctcgaatcagagattaagcttgaccctggcttcttgacgttctacgaatggtgcagagcgcagactccagccgtcccggtgattgtggtatcatccggtatggagcctatcattcgaggaattttcagcaaccttctcggaaagttagtctgcatctctctcgcacagataatggaatctcctggatcggccgggcgcttaaacgatgcctatttgagtgactattctctatatactaatactgttcaatgccaaaccaacaggaaagaggccgacgagattgacattgtttccaacgacgtctcccttgggtttgttccgttttctttctttcttaatcttctcgaattgatacagaaatgtgaccgaagtctgaccgactgagctgttttcttcgtcatcctttcttcaaacaccagatccggcccacacgactgggagattgtgtaccggcacccggagagtgggttcggacatgacaaatctctggctatcttgccgttcaaggagctcccccatcgacctactttgttcttctgcggagatgggatctctggttcgtgtccttcttttgatcgtcagtgcatctgattgtttctttccgagatctaacttgcgggcttcgtcttcctctcgtatatatgtgtgtgtccctgggatgtagatatgtccgccgctcagcatgccgattgcttgtttgtgaagaacaaggaaggaaatgacctggcgacgtactgcaccaatcaaggattccccttcaaagttcgtttatcctcttttctctctttcccttatttagctcagaccatctgaccttgatctgtccctgccaataacgacacaattttctttctcgtactgaacgacaatacagttgttcgatacgttcgagtatgtgttgaaagacgtccaggacgtgatcggcggaaggaagaccgccgaggaagtgatgaagtcgtaaaaggctttttctttgggttttttttttcaccactcaagattgaagcaagccgggggttgaacgtgctgtttctttgtttgtttattttctcctttctttttctccctttgcatgttctcatctgtcctagactttctgtcgagttttctcacgttggtttcggtttctcctgactagatctcttctctttcacataaaataaggaagataaagaaacaaaaaaagaaaacaaaacaacaaatccttccttatatagactatccaagatttcatacggagccatagatgttgattagattttcacttgacacgtcgacgtgaccgatcgctcaaagatcggacagatagagaaagaagaagagaagatgcaggcatgatgggaacaggtcgttctagttatcggccaacgagatgacgacctttccgtcgttatctcctttgagcatatcaacgatcgcctgttagtcgttttcaacccgaagggtgtaaaggtcacaagtcaacgatcagcaatggatgacatagaaggggaacaaaaaagggggatcgaatacatcatatgagaaagcaagaggcgggttaaagaggaaagagggatttactaacctgaggaacggtcttcagacctttgtacacgtcctcctcgaacttgatctccccggtagccaacgtcttggggacgttctcgtagaactctttgacgtaagctgcttcgtgggagctgacgatgaaaccgttgacggagagttcctgactgacgatcctcatgatgttcttgaacacgtacgtcgagctcgagtctgtggttgtttcatagtcagaggagtagccggtcacacgaggagagacagagaaagagcacatgtcagaatataagggggtaaaaaaacaaaagcaagaaaagaaagagaggttgaaattcaatgaagaaaacaaaaacgtactgtatccggagatcataccacactcgatagctcgaccacctttgttcatcgctcctagagcactgtattgatggtcaagccaaaatggaagaggacaaaagaatgtcagctcatgtatcatcgagagaagaagaagaagaagaagaagaaaaaaaagaagctcaaagagaaacacaacaaggaaaaaaaaagggaaatcgagtggactaacgcatcaaagacctctccaccgacggcgtcccagtagatatcgatcggtccaaacttctgaagctgctcgaccgtgctctcggtcttgtctgcatgttccggcccgggcatgatccgtccgaacgagtgtcaaatgaattcttctgtgagaccatgaaacgacggcgaaagacagaaaggaaaagaaggcggcaaagggaagacgtatatgtgtctatccatacacgcaagagaacgaggacgaacagttgaaagcggtcaccccgagctccttcctcaaccactcgaccttcttatccgatccggccgaggcaagaacgtccaggccttctctctttgcgatctggcagacgagctgtccgaccggtccgtaggcggaggtcacaaagatcttttcgcccttcttggccttggagtaggccttcattccgtacaccgcggtcttaccaggcataccggctgctcccacccaggcggtctgggttgcaaggaagagggagagagacggtcgaaagcaccaagtcagccttccggaaccacactcgcgacactgtagaaagcaggtaagaacagaaacggagggacataccacagggatatcctcatcccctatggtcttgtaagcaggcggggagccagcttttgaatccgtttgaaacgtacgccgaaaggagaagaaaagattgggttgggttggttcaaatcgtgtcaagggaaaagtagcgagagaaggagatggagtgaaagcacatacgggaagcagtgatgatgttgtagctctggaactggaagaatccatagagcttctgtccggggttgtaggccgagttgtttgatctgacgacttcagccactccgaagtttgtcaaaggtttacccaactcgaagctgtgttttcaaaaggaggaaaacagagcgcgagagaacgagtgatgatggcgatgacgataacgaggatgacgaggaggatgacaaagataacagcatcgttagtctcatcgtgcaaacgataagaaagaatgagcagaaaacatggacttgcgcaggggtataagacttgatggaagcatccctcatccttcctctcatgtaaggatcacaagacaagaccagcagcttgacgatggcctgtccgtcttcgagagacacgttctcgatgtcgatctgttcggtttcgtcgtacaccacatcttcctgtaagattggcgcaaagaagagggtccccacagaagaagaaaagagaagaagacgaaagccgacgacaagaaagtcagtttagcaactttcccatccccccctccttgatcatgaaaagctggaactatgaccaagaacaaaggacgagaaggacgtactccaggaacagggcatcccttggggacggatgcgaaactacagagtcccgtggcaagttgatcagaacaaacatataatcagtccagaaaagtgtcggtaaacaaataaagatccaatcgtatgtattgcacaacatagtttgaacactgagaacgcacatgactcttgggttggcgatagcgggcatgatggagtggggggttaaaggtgggattcaaagaaaaggcgcaaggaagagatcgatcaagaaagatacgttgggcgtacgaaagagcatcggacgacttggttttttttaataggctgatgtattttcattgtggtcgatcttttttctgacttactgatccaaaaatcaccggtaaggaaatcgccggacatacgtcggtttctgacggccgttccgggttcggcgttcgtcataagcggcatagggttacgccttacgctgatgaaccctccagatgtagggcgcggggatcggagtatgacaaaggtaaagtacgcttgggattatgaagcggcgcttggagtcggcgactatgagcttgaaatcgagacgatgactaaagtaggccagactatcgataagagaaacttcgagaagaaggtttcaactcgaggaatcctcacgtctaagcaggcgcgagagcgtttcccttcgtgtcgggggacccgtcacacatctggccttgccattcggcggtctcgttgttcatcatgcctttccattttgttaggctcctgctctttattcggtgtttctcttggttagtgtcacgcctagtgatctgttgtttgacaatcttctgcttgataatcattctgcttagcgacctcttgcttcttgatcatcattctggtcgataatcccgtcgttttggtaatcgagtggcaaccagagcatccctcgttgactgcagtaacaactcgtaacctgcgtaaccccggcctctaagagtcgctcagacttcaaaagacgtgatacgcaatccgttttcctagccacttgattcgttaacccccattgaacagtgcattcgatcagtctttcagagggcatcgcacgtgccagttgttcatggagaatcacattgtccatcatgaaaaagaaaaaaaagggaaaaagatatgtagatgtatgtatgagagaaaaaagaaaggcaaacagacaagagctataggaagaaacaacggatgcaaccggttaaagtccgagacggtttgacgaaatgaaaaggagaaaaaagtacgagaagagaacgaaccaatggtgtataagtaataagggatggatgaagaagagatgattaaagaggggaggttggaaaacagacacgaacgagggtagaaaggaaataaaaaggtaagtggcaggggagcgttgattatctatcgcccgatccagcctcgaacgattatgctgactggacggtcaaacggtgaaaccatgaccggtccttagaaggcggcgaggaggagggatccagcggcgataacaccgagggctccgacgggggcggcaacgttcctgaaagcgttggaaacggcggaggaggcggcagcagcggcagaggaggcggcgctagcagcgaccgaggcggaggtggaagccgaggcggaaacggcagcggaggctagagaacgagttgagatgatctggtatcagtgaggagaaacaagatgacttgggagattgtatgtagggtaggaacatgacatacacttgctagcagcagaagcggaggaagaggcaacgacggaggacgacttggctgtatggtttgtcaaacaagagtcagctacgagttcgggtgtttactttgaaaaggaaaaggacagaagaccatggacgaacaggcagcgacgatggaagacgaagcggcgctggaagaagcagagatcgacgaagcagcggacgaggcggccgaagtggcagaggaggcggccgaagagacagaggcggcgacggcggctgtgacgaaaggacgaaagcaagtgagtgttctggctagggagttgaaagcgatcaaacgaaaggaaaggaaaagaagagaaaaacaagacatacaagagacggtaccagagaccgaagaggcggtggcggcaacggaggaagcagactgggcggcggaagaggccgagccgcaggtggtagctccggtggggttagcggcgacggtaacggcctgggcaaagttggtggctccggtggagtccttgatggcgacggtgacggaagtggcggcagcgatgtcgacgatccaggtgtacgaggtggcagaggaggccgagagaagggtctcgagctgatgaaaagatgaggaagcgggagcgggtgaatatgggaagaatcggtagtacaaaattggattttggacttacgacagccgaggtagatccaccctggttgatggtgaggtagtatggcgcggttcctccggtccacgactaaaggaaatggagaaagacaaaaaggggagatgggcgtgagaaacagatcgagaagaagaggaagaggaaaaagaacaagaggtctgataaagtgaaaacaaagattgacgcgtccatctggtctgctccggtaccaccaattttttggtggtaaatcggacgacaaagtggtggcaatcgccgagatggggaggaacaacaaaggaaaaaaaaaaggataaacaaagacatcgaacttacaaggagggagggctggcagaaggtcaaaccaaaaggagtgttgactggagagatggaggcaagacgttaatcgtgtggtcaagttagttcttgtcgttagcatgaacggagagacgacagaaggatagaagacggaggaaaaaaagaaaaaaaaaagagaaaaaggtgtgatggggactgcgtttttttctccagaaagaaaagaaaaaagcaatacacgacgagaaacttaccagtaagtgcggtctgggcgacggccgagacggcggcgagagcggaaacgagaagagtggaagcgaacattgctttaaagtgagttgagaagggaggtgttggtgagaaagttttttttaatctgtcaagtgagagtgagagaagtggttgagtgaaggaaagaaggaaggagaaagaaaaaggaacgggaagttgaagaaggaagaatcgacgaagggcgcgaaagaaaaagcaggcgggaggtcgaaattgaaaagagaaaagagagagagcgagagagagagaaaaacaagaagatttcgtatttattctcttgtgggggactgggaaggcgcgcacagaggccggcagggccgtgcacaggaacaggcaccatgacgcaggaacgaaacaggacctagcatgtcccaacaggcacacgtacacacctcccacggccgttgactctggtcggttgcgcgactttccgcttgggcacgtcgacatcgattggggtgcggcaaactagccgcgcagtcggacggttctttttctctctctgctttttcgcctagactgccagtttttactacgcccgcgctcggatctgacgttcacttttagcctttccgcagcagtcggtctgtcacccaggatgaggaaaataaccttgtttttgaatagatcgttgtctctcgccgacacgtttggttcggttgtgggtgtatggtccggatgttctgcgtgtgtgtgcgttgtcgtttatgtattcttatactttatgcccgtgcccgtgtcggtgtctgtgctatgtctggtcttgtgcctgtgtgtgtgtgtgcctgtgtgtgtgtgtgtgtgtgtgtgtgtgtgccc

SEQ ID NO: 830 - DNA, 342 bp, Xanthophyllomyces dendrorhous
gtgtgtgtgtgtgtgtgccctgaactgtgggatgtcactctgggttctctctctctctccctcgcctccctctctcctagtgcttgcgtcgccttgcctcggctctttcccttccctggctgttcgctctgttctctctgtggcctctctctgtagtctctctgtagtcactttgtagtctctttgtagtcactctctattgcctttctctagtcgctctgtctcttccctctattgcctctgttgccttcgcttccctccctctttcctcccctcctgctctcgtgcctctctctctctgaggtgtctgtcttccccccccccaaagctgggtgactaacc

SEQ ID NO: 831 - DNA, 494 bp, Xanthophyllomyces dendrorhous
gcttcttcttgcgcttcttccccattcccctccgttcccctcccgacccagcctccagccaaacagtcatagtctcctcctcaatccccgcaacctcgaccgacacactctctgtcctaccggtcaccacaaccttccagtcttcctccgccatcacctctgtcgactcttcttcttcctctacgcccgagtcaaccccgatatccacctcaatctcagcctcaacctcgaccacaatcgctgatacaaccaccctcacagttgaaccctcttcggcgtctttggcatcatcggccacctctactctagccccagtgtcttcctcaccctcaccctcgcccacgacctccttggcaatctcacctacgtcctctgcgccgccgcaatctaccataaccccatctagcacatcggcttctctcgatacctccgtatctctcacttcctccccctcctcctcctcgtccccttccccttcctcctccggctccaca

SEQ ID NO: 832 - DNA, 1383 bp, Xanthophyllomyces dendrorhous
ttcctcctccggctccacatctgcgctcgtatcgtcttcttcttcctcttcctccccctccccctcagccacagtcgaatcaaccgtagccgtctcgtcaacgccgtaagtcaaagacccatcgctctcttgaccagaacgagattgtcttcatgtgtcgtctctgccgtcattggactcatggtcacacctcgtttcgtccttctcttcctctctcttcctctcaaccatccttcttcctgcaatctcgttgccagaatcccgtctgactctactgttccctcctcctcgtcctcgactgcatcggtgtccccgacgtcttccgcgctctcttcacctaccaccgaatcttcggtaacgtccgtcccgacaacgatcatctcctcgatcggatcattgtcctcgaccatcgtcatcgtcctcactccctcggcctcctcgtaagtacaccgttcaccgttttctccctactcttgaccttcccttccttccccccccctctccatgaccctcaaaagttgttccgcgtctctgaggaaagaaagagctcgaaagactcatgacaaccttgttactgtgttgctttttgtctggggtgggggcgaggaccggttgactcgatagttctccttctgacggcctgtcttctacctctacactcttctcttctccttcgtcaacattgaccacaccctctccgacggtgtcgctgtcgccgtcgccgtctctgtctttatctccctctacgaccctctctacgacgatatcggcctctacatccgtctcggtgtctgctctctccccaacgtctacctctgcttcttctcctgtaacggcatctatctctccttcctcaacattgtcggcatcatctgtcgctgggtctttcaccggatccctatcaaccacatcatctgcctctgtctctggcacggctcttctcaccgtttctggcgccaactccggctctgtgacgatcacggtccctaccaccactgcctccgctatccccctctctgcttccgtctcaacctctactcccgcttctacgcctgcttctacttcaactcttacctctatctctaactccggctctatctctacttctatctctggctccatctctgctctcatctctttgtccgtgatccaaccctcggctgtggcctcgcccatcctgacatcctccggttctgttggacctgactcgtccgggatctcgacgtcggatgtgtctaccaggtctagcacatcgtctttgatcacctcggccattgtgacatctgtttccgcttccggttctcttatgtcagtctctcttgctcttatcattccgttccgtacgaccatcttggaaagttctccagtttttgacaaccaaat

SEQ ID NO: 833 - DNA, 14059 bp, Xanthophyllomyces dendrorhous
ctcctctcagaccgtcaacaattgtgcccagcgcgacgcctaccaccgttccttcctcggttgctatcaccgtcgccaccgctacagctaccgccaccgccaccgccaccgctattgcgactgcaactgcagctgcgaccagtctgccacagacagtgtcgactactgtttcttcctcgaccaacgccgccggctcggtcatacccgtcaccaaggtcgtagtcgtcaccgtaacgcctgatcctcaacagaccaactctgtcataccgttcacgacaacactaacgggcggcgcgacaggcttaaaggttgtgacgataaccaaatacttcacttccaatgggtttgtcccttcatgttctctctctctctctcactgcctatccgaaacagttgctaacgttctcttccttcacaacgttgtctttttcatcccaaatctgatccaaacagagcgacatacacatccattcccatagcggtggaaacaataacagtacccatcggaggcattgccaccagtacacaatccactgacgcagttcagcgttcgtctctcttctgtttctttatctcccgatcgcgcaagagaagactgacatcaatgattggatcattcttttcttctcctcctcttatcaagccgtcatcgtcacaatttatatcgaccctacggattctaaccaggctacgacagggatcatgacacaggatgtgacgtacaccgagacttatatgtctaccggagacggatccgtcggggtcgtcgttcaggtttgtatttcctacccccttttcttttccactgtcttcaaacaatgaaggtagaaaagaaggcctcggaattgaattcggttctcctctcttcccaattttggacttctcacctcagacattgacttcaccagtcatcgtcacacgtaccagccaagctaccgacacccccgccctccaaaatcacggagtccggtcgatcggctcgacaagcgacatccacaaactcgtaggatgggcagtcgggctttcagccggcttccttggcttcggattctttctataaggacatcttttaaggagaaagaaacgatggactttcgctaagtttttttttcttcccatgactctttctttgctgtttctcctttttttctttctttcttttgtctatggtctggaccttttcgcccgtatgttgaactttgttctattcgtctatgttcttgatcgtccatcttgtctgtttactttgattgtcttcgtcgtattcttcctcccccccctctttcttttaaaaacttttttcttcttcaaaatccaaaagcgaaacttgaaaagtgaaaaatcaacgttccgtttccatcggttggaacgaagtagcttgtcattctttcgtcttcatgtgttcatcttccgtactttgcaggcctcctcgttcttcctattttgctcatacatgcatcacacaaacatgcatatacatacatacatacatacgtactttacatacctacataaataaatatatacacaaacacaatatatacaatacatacgatacatacgatacatacatatatacgtacacacgcacgcacgaaacctcacctctcatccctcgttgtccgttccgttccatcgcatcgcatcatgttccgttacaccatctcgcaccgctcgttcacttcacgttccttcaacgctttccatgtctttcacgttctttcaacgcacggtcttttcctttcttctagattgtctgcccatgtctttttttctcttttcgtctcgtctcgaggccttcccggcggcggcgcttgctacttcttcaacctgatcggttgctgatgctgatgatgatgctgacggtgctgaccatcaacgcaagacatacgctgtatacatcgatctcttgtcgcctcacccacagatccgttccaagaatcgagtcacagataaatacatccagatcataagtccttatctcctttcttttcctttcttcttcttcctccttacatcagaatgataagacgacagattcaaaaaaagaaaagaaagaaaaaggaaataaaataaaatggggggtggaaggaagtagctagataggtggtggtggatggtggtatggaacgagatgttaaatgggtataagagcataacaaggaagggtgatacaacggtctgagacaagacgagatggtgggaagcacccgacggatgttcgtttgtccatgagaaacaaggtgaaaagacggtaaggaaaacgaaaggagcagaaacagagacaagaacgaagaaagactttcttcttcttctcttcgcgagaggagattggatcaacatcatactaaaacaccacgggatatactctctctatcggtcgaaccgccagaccggaaccagaaccgagcagagagaatctatctggacagacctggttggataaagatcgaacgtcaagccggtcaacctatcgtctccacaatcgattcaagcgccagacgagacataccaagaagtaagattccattctgtttcgacacgaaccgttgtcgtcagtttggtcatagttgccttggttgtagaacatatgagcctaaacttacgcatgttcttgaagaaaacaaggcacacatgtacacgatgtcagcgtcgcgctcgaaatagaaaagagaaaacacgggccgactaaccaaatcgagctcgatactgatcaggaggaatctatcgaacatgggttcatagaatccagagagcagagcgctgatcagatcaggaggatagtacgagtcatcaaaccagataacctttgagacgtacaacagtgatatcagatccatccttcctcgtgagttgtttccctttactctccaatgccttgaacagagtgaaggcacctaacaagagtatatgcatcaacagaagaagacatcgccggaaataaccttccaatcatctatatactagggaccgggaaaggagaacggctcacctatggcgtcgacaactcctacagccagctctttacgaatttcatcgatctacagcagaagaggacggtaacaaattcggactttagttccgaacccaaagcacggaagaagcacggtacgtacgccgaccagaagcgaatagtccattacaaagttcgttgactgaacgaaagaccaagacaaaacgggaatataagtctatgtgcaaccgtccgctcgcaccaacaaagcatgacgtacaagaaacttggtatcgttcaagatagcgtcatgaagtatgctcttcccgtacggatgaatcaagagaggtacagctttaagacctatcaataaacaagcaatttctgccatcaataatcgattgaaccctcagaaagtcaaaggaacgatctccaaaccttcaacccaatccatatcgtgtccaagggtcaattgagaatttccatccaacacattcttgaatcgacggccttcgatgcccttgaggtcaaacgttttggatatagtttgatcgtagaacaagttttccatcacgagaaggtcaagcttgcgcgtctggttggtatcaagatcgtgtactaatgggtaaagtaatttagtacaagatattcttaggtctgatcatgacaacaaaatgaacgaacccttgcaggtatagaatctagtgagatacgtgggagtacggtcagtcgagccaagtcatcccgtgaactgagagattgaatacagcctacccaacaattttggctaacgaggttggcttggccgagccgctactgagaataaagtcaaaatatgccggtgcgatatcaagaagaccttgctggaaagagtaacgaaatatcagcatatgtcgccaggcgctgagcagagtgagaagctcacaatatcactgatgttccatttggagaccagttcttttacgacaaacttatcatccgtcgttttgaagaacgcggctttacctaaaagtagagaattagcgtcgacgtcgacaagacaggcagtcacaacaaaaaggatcctatcagaacgtgaattaccaactttttcctccttgggcatcccatagattcgtgttctctaacgactcaattattgagacatctatcccaagtctacgtcttaatgtctcgaacgcagcagcatagtagatgatacaggtgatctcccgccttttgtttgttccacttcctatggtggtggttagatgtacatgcggtttcgattcgatggggaaaaccgggagttgagcttcggatccaagaagattatgcatcgagggcgtccgggaagaactcagattcttcatcgaaggcttccgacgggtgttatttggaccatattgtagaatagcagatactgaatcacccaatgcagaggttaaagaggacgtccagccttcacctttatacccgaacgttgccgaaagaggaggtgtaggaagcggtgtcgagttagccgattgagagaaattacgtcggttgaggttgatgctgagagttagaggggtctcttcaggaatgactgacgatccatttggggtatgggaaacctccgaaaaccgctttggcaaaaaatgatgagaagcgggagagacaggaacagataagctaggggtgacactgccagagtctagagatgaagctgaagtggattgagaaatagaggttggtattgatgaccctttgtcttccagcagacgatgcagcttctgcacgtctaataagacttcatccggattcttctcatcgctcttcaccgaactactcaaaggtcctctagaggtcagacacatccgtccttccgcttcctcaaacgagattgtcggatcattcccagatttctgtgtaccaaacgcgtggctggatcttccatcttgtggggtggaactgaaagccgaggggacagagaggagcgaatcactacgtttccgcctgaggctgaatagggccgcagaaaagtctttagcgtggtcggcacgagtaaggttggccgtacagtgagggggagcaaagcatgaattgggcaagacatggtccgtcttcatttcagatggagatattgaaaattcgctgcttgtaatcatggacgcgcgtggagcactgatctctagagatggtccgatactgatggactgggatttcgatagctcctctaaatactttgtggacgacagagcatgagctataagacttgcaggttggtctttcgggtaagatgaatcaaaccaagaagaaagggaatgttagatgaaaaaaagaattccatgcatacatgttgaagatctgacaaaccttctttgtaaagtacggagctccctggaagagcatgagcatccttgtcgaggaaatattttggagatcgtagagtcaaatccatgggcggcaggtttcctaaatcgaagcccgacccatctgtttcctcccacgcagtcaacttttgcgctgccgacctagacttttgcatgaatgttcgacggacatcatttaaccctccagatttcaagctggactcatgaatagagaccaataggctatctttttcagtacagatgtccatgagcagcttgtgaagtttggagtaatgatgtgcaggatcatcgaccacatcaagaacttgcgaggtctgagttctattcttcatgacaaatgacaaccgctctttctgtataagaacaacgaacgcaaaatgagatgatgggataacttgattgcctaatcccctagggaaagacttagacgtaccagcatatcgattcgttcttccagaatctcataaaatccctcgacctcccgtttgactaatctttttctcttcaagcgagctctctttctttccgtgtcctcgctacttcctggtgatccatcccttctggtgttagccttgacggtcttggatttaggaacaagcttgctcaagcttgtctcgtagacgttcaaagaggacagcgatattgtaatcagtacattctgatgtttgaactgtcgcaaaagattcggagaggacttttgcccgacgttcgaaaaggctgatgacatctcgggtaccggagggactatatgagaacatataggcatcgttggttgtaggacacggtcactatagacaagtatctcgaggtactttccgaatgggacatgtctgagtccaagtacaataggacttcagtacaatcccacattgtcattgacgtaactctggtcgataaaaagaagcaggacttacaaagcagcatagctcaaccgatggtcttcacttttcttaccacacattcgacattcaacccagcacaatacatcgttcccttccacgtgttctctccggatagcacacctgctttctatcttgacacctccatggatccagacctttacatgatcaatctcaggtttaccgcaaccagctccatcacaattctgacctttgctcgctcgatccgacgttgctcgaataaagccacccagagaagggtgattaccgagaacagggctggtagtggctgaatatgggaggtggatgagagacgggggcttgcactcaggctggtcagatgttgtagaggatagggtaggagtcaagggatctgtgggctgtctattgctgtaggtcgaaatgttgggagccgcacgcagacctacagcatacaaaaccacgatggtttctaaacaagttttgagaaatgcgtcagacagcggtagaacgaacctcacagctaagagataacatgaacttacgctgtttccagaacccatcaggtccaaaatctccattattttccgagcagtcagtcaagttgatcccactgaaagcactcagcccacttcgtgcttccgctgaaagtctaaggccctcgggcgctttctctccccatcggttattatatgtactgttattatggtttgttttgtcagagcttgtgctcttgagaatagacgcgctgggcttatccgaatcgtccgactcttcgaatagagaagactcgaccttaggcgggttggttttgagtagttgattttcggtttctacaacgtgaaacgtatgctcagatggatgtcaaatgctcaagggaagaagcgtgataaagtaatgacaaaccttgaagatggagaaaaataggagggacaggaaaaggaccgacagccggagaggtagaaaagaccgtcgttctgaacagatcagcaagccttgtatattttagttgtaccttcttttctttttcctttgctgagttcgactcttcaacctgggctttttggtcatccttggtagattcgagagtattacccctagaagacggagcagtcggttcgctctccactctggtcaaggccgtatctgagtcttgtatatctcgaaccagtgggctctgtgctcgttgaccgacaatagcttcccagaatcctcctagcaagttgttcttctgtctgccccgtttccgtgcgaaaaaagtcccccatgtccggcgtcctagagcattgcaatcttctttctctctaatcagtgctctggaagacggaaggccgtcgatagatctacttctagataacgcctcgttggaagtcaacgtgtatcgctcgtacggcattggcattgggagaggagggtcgaggatataaccatgtgatttgagaagcgggatctctagggagttcatagaatgcgtgtagatctgtttcgcgaatggggcatcagcaattgagtgtcaaatagtgatctaccgacgagagataacctctgtgcagagagagctcacagctacccgaagtgtttcctctaggaaagaccgaaacttttggttcttgagctctgtagcttgaataggatttcggacgaccaaagatcctcccaataggtgataatcctctggtgacgacgaagaaaaacaatgggctgttgaagaccatgacaatttatgagggtcagcatcatctagaaaccagtacactcattcttcaatatctgcacaaaggcaaaacgaaacagggacctcctcatttgcgctctggtttgactaggaacaagtatgaaaggcaagatagaagaaaaactcacgattcacgcctgatgaacagaataaaatctttcctttcatttcttctatttcagcatcatctacccttagattatcggacgaaacgatcggtcttggttcatcattagctgccgccggttgtggtcttcttccgtctcctgacccgatcacccattcttcagagacccaacgaatctcacctggcccatcatcaggctcaacgcatgctctatcttcataaagcacacaaatcaccaatacgaccttcttccttccttcacgaccgggcaaatgatcttcttgttcgtccggaatgataggcacggcatcatcttctgttgattcgagattcatggggattctttctggtcgaagagctctatccgatctgttcggattctcatctctgatcctgttcctaagctcactggtgcccagctctccctgtttcctcgccaatggacgagcatcaccacgtcctgaagcaagcttgagaccggcaggtaggcggtaggacgtgtaattggggatcgatctgataaacctatgtcggtctccttttccgtccgttccctcctcaccaatcttctgctcttggtcccccttctccgaagcggacggcgtagatcctccgagagccttttgggagtccctggacacacggtagcggtcacgttcactggttagaatcaacgacgtctgagcgagatcatcagcccattcgtcaagaggaatggattgcactgatcttaggataggctctttccatttcttgattgacaggccaagggatctcatggtttgaccgatgagagtcgattgatgtgtagcgtaggacgccggtaagggttgagcttgaacatgacgttgaggtttttctgattcagtcatcactcgagattccttctgagtgagcagggatgcgccgagaagacgaagagattaagaataaaatagcaagaaagcaggctatgctccctaccgtacatcaatcgaaatgagaaactcttgtgatgacgccctagatggaggtgatgggtaaagcagacgacggcttggcttcatccggtcgcggcgggcagccattcgataagcatataataatcactgcgtatgttttgcgtttccctgcaatctctcaaacataatcctactcataaaacattatataaatacacttaaaacgtgatagacagataaacaaggaagagaggaaccagaaaagtgagtagagaacctagtatgacaaagagagagaagaaagaaaggaaagaaggaagatcaatccagccgaaccccaatatagcttaaccgaacaagacaaacgagatgtgaacgggaacgatgcagaaatgattacttatatgattgttctcgagagaaaacaggaaaagactacgaaaacagaaagtcaagaaagagtaataaagaacgtacgggcctgccaaagcaagatttcaagaaaaggagaactagatgattatattttttttttggaaaaggggcgatgtttagatatcatcataacggcggtgaaggacagaaaggtacccctactgagtgggcgagaggttagactgtacgtgccaaagaaaagaaaaacaagaacaaatcacaaagaaaattcttcatcagcggatgttacgcgatcgggagagagcaacgaagaaaaaaggatcaacttacatccatgagaccgatagtcagcatcccatccatcatccttcaccattcggtcgagcgcgccatgatgtgtgtttcgcctcttgagcacagtggcggggtccatcttatcctcgtcctcagagtccgagctatcgatttcgaacggcctgctgggcgttctgtgaagcccaagggagggtctagcggccgaagtccctacgtcgaacgacggccgcttccgctgggaggccgacgcgaagaaggaaggatgctgtacaggatggggctcggcagggactcggttgatcgaggttgatgttaacggtcgaagcgtgtttgtgttgagcacaccgcccgttcttttcaaaccggccggaggttggaccggattgattgaaggaggtccgcctgatggtggctgttgtgctcccgaaggtgattgcccacgagcgttcggtttggattgagcgtgatgaccctctgtggccgagcttctgacgacgttcggtcttgggccggcctggttgatctctgcattcaacttgggagtcgaattacttcggttgatcatcccgccgccaaggatacgctgtctggacattcgttcccagagcaactgcttcctcaattcctccggaagttcggccgccaacatctgacgtctggtcgtccttggagactgaggagcggccgatggggcgggcatcagctgctggggcattgtcactggggttgttggtgaaaccgaggcgggaggcggagagacaagggcgacatgtccagtcgcaggaggggatggcgtgctcggtcgaggaggaagcggtcttgtggtcggcgggtattgacattcactcttggacgatttcgaagacggggcgagagcggtgagaccagaaaacgcatggttccgaggtgctgaccgactggaattcttcgaagaaagcatcgagagtcgacgttgagcctcagatgttccgagtgtgagcttgtcggccgagccaaactagtgagaaggaaggaaggagagagaaagaaggaagcaaagatcggtcagcaagggcgtcaatgacacaggctgaatgttgagtggcaacaaagaaaaactgacttctccctcgctgtcgctctcgagatctggtttcttgaaatcctcgcgtccaactgagaattcggtctctagaggcaacgcgacggcactcctgttcctagagagcgcgagaggcgcccctccggtcgacttggacagaacgtcccttcggtgttgacagagattctgctggctctgttgtagggaaacgaagagaacagcgcaagagagcaaacgaagagaagaagagaaacccatcaaaaatctgatcaaacggcagtgaaaaggaacaaagaagaggaaaccacacaaacctggtgagtcctactaacggagcgctctacctctctcttctctcgctcagttttaaacatatcactcaacaaaccggagcttcttccggctgcgatacctctgccgggcgcatcctgaccggatcctttggaatgaactgagctatcctttccttctgtctcagacgagtgaacattggaggagaaccccgtactgattgcgctatcccggcacaacccatacaaatcggccgccgatttagaaatcggtactttgacaaacatcgttctctgccgctctgcttctttctccgcgaccttcgcctgcgcgagcgccctggcggccgcgagcgcagtggccgcactagtagactgtcgtcgcatggctatgcctcccggtccaccggcagtgggatgagcaccaggtccacctgtcgtggtgctggtggtcgtcgagtgagatgtctttttcatctttgacaagccagattgggcgggcttgtggattgctgacttcttaggagcaggctccgagttgtcagaagcccaatcgccatcggattcgtttccgtcttggtcatcttccccctcggtatgggatgacgaggaagacgcatcctcataatcctcgtcgttgtcctcctcctcttcggcatcctcgacggtgcttgccgagattgttctaaataaaaataaaaagagaagagagagaggctcagaatgtgagacgttgtaatttcggaagactgacgcaaggacagacgacggtacgaaagagagaaatcgacgtactttgtggaagaaccggtactgttcgttgtcgtaccacccagcttcggtctcactgtcttgatctctgcttgctgattagtcttcgatctcaatattccggccactctagctttctcgattccgaaccgaccagccagaggaaatccgccacctgtacctctcgcatgggacggagggaggggcggtggatgcatgggaccggactgtcgtccgaggcccttagcatttatagaaacatctgaggtggcggcggtagacggggcagtggtgacagagggggcgacaggagcggcagaaacggtagcaaaaggtcgggtgggatgatgagcggccgtcgtggacgatcttctcggtttcaattttccgcttggtccatgggctactttctttttggtcggtggtccggtctgttgggctggtttagacagatcgggagaggacgacaaggtggttgttacttgggaagccggcgcggtggcagcaacaagggcaggagtagagtcagaagcagattcagaagcagttgagagagcagatgcggaaggaggtggagtaggagggagagaggtcaaattgacggattctgtagaaggaggagggggagtaaccggttgaagtaaaagaggtctggtctgaatagaaggagagccgatgggagtagcttcgactgaggctgatgccgaggccaaaactgtatttttgagaggagaggatgaagtgagtgcatgttgctgttgttgccgctgctgctgctgctgctggtcgacttggtaagcagcaattccgctctcctcttttggcggatggccctttcgtttaggtccgatactgagaatcaatccgccgtcctcactgtcacaatcatccacgctctgaggagaacgtgccaaagatcgatggtcgactttgcggtggacggcctccggtatcgcttgctctgccgaactaacggacccaacggtagccgacccaaaggacgagccttcttcaccgcaatcaggagattgaatgaagaacatgtttcgtctgacagcacccgacccgacgatagcaacggaggatgataccgcagaggaaggaccactgacggccaaggtcgaagacatcgttggtagaggagaggttattctcggaggggactgtctgggccgtctagatagtctgtgattcaagttggactctcgttgaacaagttccaaattgtttgacgtcaacggggtcgttccccctccggctgggaccaatggctgagtctgtctgataaggccggcaccaagctgcctgtcgagctctaggatcgggctcgaggggatcgagttgaacggggtcggatcggtaaaagtaagggtaatgtccgaatggggatgatgtggtggggtctgtagtgaagtaggtagtgttggtgacgagccggtctgctgttcgaccgtctgctgactgtcgatcccgcgttcggacggcccagtgctcctcctaccgttcacgtctgcaaacgaaagatccttcttcctggccggaggaaccatgccctcaagaaagacgtgaccgagaagccgaccgaacgagacgacgccatccgcatcggcgaagactgctctgtttgtactaccgaatgagctatgtgtggaagaatgcattgagcacggggtcgagtgagctctggtaccaattgatggtctgggtgtggcggtgcccgaaccggagggtgtgccgtctgagcaagaaggctctctttgcggaatggaagcgtgggctgaggatgatctggagatggcccgtctgtcaaaagatgttgaggccgaggtcagttgagtttgccacgatggtggtggaggtaatggaggtgagcttggatgggggactttaggcagaggctcaattgatggtgtaggggtggctgtttccgagctagacttgggtgacgtagtggcaagacggacagaagaagatgcagacagagatgatgagatgggattggagatggatggtggttggaaatctctgtccgaatggtaggaagcgatggaggacaggatggatgacgtggacgaataggatgacgaaaagtgggagggatctgtagttaacgagtcatgatcggagcaggaagctgcatgggctgttgtcgggtggaggtgtctgtaccatagtctgtgtttagatcgagaggaagaaagagagaacagcctcagtc

SEQ ID NO: 834 - DNA, 6366 bp, Xanthophyllomyces dendrorhous
agagagagagagagagggaaaggcaggactgaccgattcgcatctcttcgagcaaggcatcatagttctcgagcgtgctagcatcgcccgacaagaagtactcgatcttgaccttgacgggggtagggaagttgggatcgtcgtggtgctcaagccaggctattatcgtaaagtacaaggtcgaatatgagtgtcttcaactctttcacaaccgggataaactgcagggctcggacggaccatcttcgagaatctctatgatttcttctggcgtcaacgcaagcgcctgtaaataacggatgagagagaagtctgaatcagaatgatgtgtccgaagacatatgatataggatgtctcatggaattgatgggcttactcgatcatatacctgatcaacatcagatgaaaggatagctaggtcatcctcgaccacctgagattccgatcccttagtatatatctggtttccaggagtggtgataccaaagaccaaggacagcggtcagtcgcccggagtagggaaggaagaagacagggcaaaagagtaggaggagaggagacgtacaggatctatcttttcatcattaacagggtagacatcagatacgatgtcttcatctttctcgagctcatattttaacgcgggcgccatgaggaggatttattcaggatatcaaagaaaattccttacaaaagccggcgaggagaagaacagaaggaaagcgtctaggaggatggtttttggaataggatcagtctatcgacgcgttcttctctgttctttaagaagtcagtacactctccggtcctctttgcaatcgtccacaaccttcctccgtattagtagtcatcttccttgcaagatgacacaatctcaaatcacccaatcagtctcaccatatggactacttatcgacaaatactcaggacgttctcgccataaatatcatatcaaagggacccgatggggaaccggtggggaatgaatgaatgaaatcaagaaaagcaaaggaaaagtgacaagtttgctttcgaattgagcagatgagtgaccgggtttgcaaatcgcttagttcaagcctcaagtcagtgttagtgcggggagtcgaaaacaaaattagtctcaacatcttcatcaagtcatgtttgattgtaggcgaagaagaaggaggaggaggaggagcaggttacaataaagaagaaaagtaatgagaagccaagaagatcagcaaccgatcacctaaccgaatcctacctctgaaaataaaatcaattatgcttggctcctgtattctcacccctcacaccccacacccaatcacttgcaccatccaatgtcgaacgcacaccataccgttgttccctcgcaccggaccgttgctatctaccggatcttgacaacctatccttcagattaagagcatcaacttctttatccgtttaatccgattttatactctttaaacggagctagaactctcaactggcacgttagattatcttggtaagtagaaaagataaccaaatgtctgaaggctctaaatatctctatatgtacaacaaaggaaagaaaaatcaaaaacaagaaaaatactttcaaagatcgaaggaagactcgagatggagacaaaataagacgaagatgaaaacaggaaaagccgcttgagggatggaagctggcttggtcgtaagaagataagggcgttaaagaaaaagaaaagctcgacaaacaagatatgaggagggacatgcacgagatgaacaagattatttattccgaggtagatactctgttgagagatgaaatattagattccccactggttctgaccgacaccagctcctccttgttgttgttgctgctgctgtcgctggttatgggcctgtagcaactgctggatctgatctgtggatagattaatcaaattcaacccgctttggccaccttgaccttgaatttgaccgacaggctgtccctgtccaggctgaccgacgttcattccagggattcctgatgtatcaaaagaattacccagatgggattgggtagcaaacacagaaggagctgctaacccttgattaggttggaatgactgaaccacttgttgttgttgatgttgttggtgttgttgaagaagctgttgctgttgctgctgttgttgttgctgctgctgctgaagcataagctggagttgttgctgttgtgaaggttgaagaggagattgaagaagattcgaagaggtcgatgaagtagggccaactgcagactgattaaccatcgattgaggtggtgtcggctgagtcggaggtagagtgtttgaattggatggtccagagggtgagaatggaatctgtacatgttccattgattgtcagacacattcagttccgtcctttctctgcttcttccatagctatctggctaagagggacggaaaaataataagaagaagttgacttacaggtactttgaggaagagcatccccattagcttcacaggtccgttctgaccgccactcatcggaaacacgatcataccagaacccgggggaccgaacctgatgtggcccatctgtatatatacggtaaattaaaaacgtaaatacgagtagtcctccttgagaaaacaccttttaacatagggtaaattaacacgcactgtcttcttgccctctaagtttttggccagactggtatagctctgttcgccccgctgggcctcatccttcgtggctccgggttgaggagaatgatgcaagctaacgcaaggcatccgaccgttcgtcacataatttcggagctcgttgatcatcaacggggataccgctgacaaatgaagtctactcggccagagatgcttttgacttgaaagagaagatgattatgaccacaatcagcatctgacctacgtccatacttacacgcgcacaaaagagaaacctctcaacgggagacttacaaatcttcgagaggaatcacatgtgctgcaaaagccgaaattttgcatcccaacaccgcgccgggtttccctccttgagaatgcacactccagctgatctctccgttccagaccaacagttttcctgctcctggctgacctccgcctgtattcgggccttggccgatagtctgaccagtcgctggtgtttgaccaatcttgatcccacttgatccattgtgaccgttcccaattccgtttccaccgacaggagcgggagcaggtgggggaacaactgcaggctgggcttgtgcttgtgcttgtgcttgcgcctgtgcctgtgcctgtgcctgtgcctgtgcttggagtttctgtcggtaatactgttgagcgagcgccgcggtctgagggttcattcctccttgggatgtgttcattgtcgttgtcatcgagtctgggttgtgtagaccgttcggattattgggttgcccgaggttcggtccttgccctcctatgacgggtgtaccgatgactatcgagttgggttttccacgcccggtcgaggccatgggtgattgttggagtgatggctgttgagacggtaatggtggtcgtggttgttgttgttgctgctgaagtgttcctctgagctgcccattcgaagtattgagagcggcctgggcagcttgagcggcttgagtttcccggatccgtttagcaagaagtaatctctgggtctgaatgtcttgaggtagctgtgtctgtgcctgaccttgagccggctcgttgaaggccgatgaggcggacatggaatattgtcctaaaggtaaagacattgatgtggccgttggggtcgagccagggggtttcgatcgcaggttggcgtttgtcgagactggagtggtcggattggtatttacactggaagacgtttcgagtgggggttgagataccggttgaatggagggcagttgcgatgacagaggggctggcgtggaggttgcggtaaccgataccgacaagggaagagcgttcgggggagccgtccttcctcttttattgttctcttcggaggtggctgggttgggctgggatcgtttatctgattcgagatcgtgacagttaatcagtggggcttagagagtaaggaataaagatacggggcaaaagatgatagaagaaagatcttacttgacaaagactggtcaaagccgttgaggataagaagatcttttgcccgggttccaaaccagggagagacggttgcttgtttcaaggactaacgaaccaaaaacgtaggattgttaaggctatgtggctgatattaattctgaaagagaagcggataatatggagcatacgtacacttttaatcaattgaataacttggcctgatccatcggtcggtttgccccagccgaggccaaagaaggacattttgatctctcttctctcgacctccgcgatcatctctgaccatctgagcccatcgagacgtctatttctgttccatcttgttctaggatctggtcgattgggggattcttgcttcatcatctttgtcggcgacgctggcggcggctgtgactttgattccgatgagcgaccggatgaccatctagacgatgtacttgcaggatcggacatgaacggatcggatcccagggcgacaaacatgtatcgttcgattgagcatggtacagccaaggaagatgtctgcgctggtgacggggatggatcggggatgatgggggaggtggtggtgctggtaggattgttatggttgttgggtttcggggtctgttgggatgccgactgggtgggtgagggagaaggcgccggagaaggtagagaaaacggatgggtagtatgtagatcaaagagctgaaggaaagaacacacggtcagaaggtgttcccttcgattcacagacgcgttcgaacaagagaacaggacagaagaacggaagagaggatcaagcaagggagaagaaccagaaagacaagaaatcaaactatctgcttacttctatgccaccaacgaagccttccatgatgccttggccaggattgacggctctggagcctggtcctctaccggatgacacgatctcacctgagcctatcggttcgtggtgttcctcctgactgagcggtcgaccggcccgaacggactgccagaagccggctggtgactggaagtactgggtgtgagtgatcggggatagcgccgggttccttgacgaagctgaaaacatcagcagtgctagccggagctgttggcaagggagcagaggaagtagaacgggaaaaggttggtgaggagaaagaagagagagaaagtaaaggaaaggtctaagccgtgctgttcttgatattcctgaagaaaaacaccggggatcaagaaatgaagctttcacttaccttggcagagccgacgttggcttgtagacgactaacacactgatcgaggtatccactctgtccgaacagttcgttccatctggcctgtacgtgtggagaatcgtctacgacgacgacgactgcgatctctttcggcaacaatcttggcgagggtgcggttgttgatgttgccggcctgatcgaccgacctgatgggttccctaacggtttcacggacgccatgggaggaagcgacgaacaggcgatagggaccgacgattgtagcggggacgatggcgacggtagtgatgagactggtcacgaagccgacaccttcagtcgtctgtagatgggttccaggaacaggattacggagaaaaaaaggtccgtgcggctggtgagagccgggggaattctgattacctaagcggatcctccagaagacaccccaaccgagatcccggctaggtcggtgctacaccaaacatcgctgtccggcatggctagcgtaaggaagattgtttgtccttgagaggtgtatggatataagtgtgcatgtgtgtgtgagcgtgagcgtgagtgtgctagtacaggttggcgagtgtgtggttgctgctagtgcacgggcgcgaagaacgttgtgaatgagatatttcatacatatacgatcgatctgatgtgtcggagagcaaggaaagaagcaacgcaagtatcaacactagcaaggatgatagcaagtacatcagaaccacagagaagggatgcgtttgttctctgccggaaacattctagctcttgatggatggactgaaagggagtggctgtagtcgctccttctactgattcattgaccatctgttctcttgccttctcagaatggaagagtaaaaacaccacaacgtatgctcacgaaaactctctgaccaacccatcgagaccaaagactatatgaggctgttctctccatcttccgttgtgtatcaattgttgatcgcctgtgggcttagaaatataagagaaaagt

SEQ ID NO: 835 - DNA, 100385 bp, Xanthophyllomyces dendrorhous
  misc_feature (80713)..(80722): n is a, c, g, or t
cactttgccttctcagaacacagacaactgtcgatttgtaggatgaagcagcgcccggatagatcgatagccttctgatcttaccgaccgtcatagccaacacaaaggacaacggcaacgacaagcacaacaagttcgcccacatggctcatcatcactcccagtacgacccggcccggccatcgtcccagtactactctcaatcgtttcttcattctcatccatttcagcagcaacagcagcaacatcaacagcaacagcaccatcaacaacatcagcaaatgatccagcaacagctacagcaacaacaatttcaccagcaatctcttgctcatcagccagatatctatccttcctatgctcactatcaacaatataacacctatccttcctccgctcctgccggccctccaacaaccggtctcgtcccgtcctcaccaccttatctgttcgaatgtcccaacgtcgcttgtcctagggcgtatagttagtatcacctcttcgcccttgtgctcttctctcttatattctcttcacttggacattatcaccgtcgactgattctttttcttgttctcgcgttttttcttggttttttctaaacctctcttatcaaattttcttgataaaaaaaactttcaccatctttttattctttgttctgacaacaatccattaaccttgcaaaccttctcctttcacctcgtctctcctctcccttcgtttgctcttcatatctgctttcttttacctggcctaattctcaacctggctcgggctcttcgtagaaatggtctcggagcttaacgcgcatcttgctcagacaaaatgccgaacggcgcttacaaacacatccggtccaccacccgctccgcgtttactagatacccatcccggtccatcttcctcgtctccatctttgtcgtcggtaccatcgtcgtcgtcgtcgtcgtcatcagcttctcttccgttaaccacttctgcgccgacgccatatagacagctttccggaatcgaagccatcatccatgcgagtttacgtgcggatgccgaggcagaggcaaaggccaacctgggcgcgagtccgggtctttctcatgctcagatcgatcgctctccaagagcgcaggtgaccgtcaaggaggagaataaaaatgatgccgatgtcgatattgatgctggtgaagttgagatcggagaggaccaagatgaggatgatgaagacgaggacgaagaagatgaggatgatgaagatgatgaggaagatgaggatgaagatgaggacgaggacgaagaagatgctagggcagcgggaaatcaactggaacgaacgttcaaatgccctaattttggttgcagtaaagcttacagtttgtttcttttgctcgtcttcgtctatcccatcctcacatccacgaacccacatgcttacaatttctttgttcatatatctcacctttcacagaacaaagcaacggactaaagtatcatttcaaaaagggtcaatgcgactttggtgtcagagatatcatcgccaaaggagcctcggaagaacaagcagagaaacaagtcagaccgttcgtctgtctagtcgatggatgtgagaggaagtacagacaacagaacgggttgatgtatcattacatgaattctggtatgtctcattcctttctactccgtctcagggtatcccgtttctgaaactgaagactagaccatttcttctttcatttcttacccttcaggcgaacacggacataaaggtatagctctgatcgaggctggtgtacatcctcatcccaagggagggatgatccctcgatatcgctcaatctaccttcacgcccataaagcccactatccagaccctaccgtcaccgtcaacgtacctactcttattccttcctcctccaactcgatcgactcaaccgccttgtcctcttcttcgtcttcggtagcctcggaatcatcaccttccatcccttcttctatactcgttcgtcaggcgacatcgattcaaacccagtcagcaatgaagcaacatgtcggaaggatcgacgacgatgaaggaacggaagacgcgctcatggctctcgtcgctctcgctggtggccttgccaagcctcgttctgatccgacccacccagggtacatctcgactcctgctatccaagacgatatcatgttggacaatgtgtccggcctcaacactctgccacccattgatggatcatcccatcgatcacctatcaatggaacgacaagaggtagaggcagaggagcaagaggtagagggaccggtagtgggactggcagagggaggggtagacctcggaccatcgggctcactcagaccacactcaaaaaaacggtctcgccctcgatggagtattcgccaatgggtgaattgatcgatagaccgaaagctagagacggaatcttgtttgattgtccaaataccaggtgtgttcggacgtatggtgagtcttccttcttctttctcttctttctctcagaccttgctcgtggtcgtatgtttgctctcagatttctcgttctcgatattgaaatcgcctttgtatcatggttgacataggaacaaaacatgaactcacttaccacatcaccctgggcagatgcaaatacaaaattttagacggaaggagtcgaggcgggaccggaaaaaatcaggataaggattcggatggaccggatgagattatggaaaaaacctcgttcggctgtcctaatcccggttgtggaaaggcctacagtgtgtccttccgtcttttctgtctttgttcttcactctaggtggaccgggagagctgatgaaatttggggttttgtcttgacatttggattcagaatttaaaaaaggtttaatcaatcatctggagccaggcgtctgtccatttggtgtcatcgagaaagagcataccccgattcttgctcgatcacttcctcacactctttcccagaatccgagcgggatttcgaatatgacgacgaacgagagcgcgacaaaaactttgatgttaaaagtcgcgaaaccgtatgcctgtcaggcgggtggaggttgtctgaaacggtatgctttgatgcatgggttgaggtaccattattcgaagtctggttcgtccttctttcctcatcatcgttcattatcttccccctttttcttgttcccatcgaaagaggcatctaacattgggtgcgggtttggggattcaaaccaatcgtataggcgagcacggagagattggtctggaattactccgacagggtaaacaccagagcgcgaatggcggtgtttttcccccaacgacgtactagctctcttcctgccctttcttcactagacaagacagaaggggaagtgagaataacgggtatcgcaaggctttttctttccaaccaccacatctatacatagaccatcatcatgtacatctacacacttacatacgtacacatacttttttgtcatataaacacatgtctttttacccatatctctcgttcgttctctccatgccaactctaagaatgaagaaagacacggtcttccaagacggaaggagctctcccaaagtcaaggcccgacgcgtcgaaaatttctggcgcgtcctgattttcgtcgcgtttctcttctcatcctgctagatccattgaagcccaccatcccaaccacgacgtccctccgttcagactcaaaggagaggagagatgaaaccttcaccaaaaggacattcgtttgaactgccaccgtcgatagatatcagattgatcgatgaaatcgttctgcattcagggccgaactcgacaacgtttctggatatctttagggcttataatcgagtgcttgttgaccatggattagatccttctgatgatgttgtgtatgccttctttcttcttcttcttcctcttcttcactctcttcttttcgtaatccgagtttaatatggactcgggtctggctccaggtctagtctttggctgatgcaaagttcacgagcatcgagaaagaccaacatcatgaactaatcatatcttatttacctctctctttccttcgttcatctattttccgaacaaatacatgttctgacctcccggaaaaaaagatactaccggttcattttaaaagtaggagaaatcccgggaacagactggcaagacaggtggtccaaatggaaatcaacctctcgactacctcatctacaaaaccgatcgaatcacatgaacggcggttctttgctttcttcgtcgtcgtcttcgcctcatacacatacacctgactatcgactcttgaatcaattcgatcgacttgaaatcggtagacagggcgaagaatatggcagtcaagagcaagaagaggaggaggatggagaagaggagagcagatcagatgataggtcccagacagcatttacggtggatacagatccgaggaccgtctcggcggtaggatgggaaccaacaagaggaacgagtaccgttcgcagtctcagtccaccgcagagaacaagcactcctctcgctagacaaaggcataatcgtaattcatcccagactccgttggccagcagaggagagcgtagaccgacaagacctaggtcaagtatggattcggccattccgcccaggccataccctcaacttcaggtccgggcgcccatccctcgtcatctgtcacccgccatccctcaaatcctatattcgcccgtccagatcgaaccaccgccgatagagatgtataatgatcaactaccggcccctcaaaagacgacacagtataccactggaccagacacaccagatatccttcctccacctcagtcgaatgttggtagggtctcgctgatgagagcagcaaaggacgcggcgatagaagcagaactgagaaaggaggatgagatgagagagcaagcagaaaggttctattcgcttggactcatgggccgatgttgggatgtctggaaaagaggtcgagattgggtcaaagtatgctttttcttcttcctcacagctctttcctcgctccaacgggcgtatgtatctgatctcttgtgccttgcaaatacttttctgtctcgattagactacagagcatcagattgatcgagcgcgcgcatttcttctcttaggttcatctttctctacctggaagaaatccgtccggatgaacgaatctctctcgatcttagcttcagaactcgcatcccgatctgctcaagcccgatctctcagcatatggcttcttaaactagaacaccatcaagatctctatgaacgagtagctaaagatgaaaacaaacggacgatcgctcgggtttggttcggctggaaagcgagttgtgaagctcgacgccgaaaacgatgggaaatctcccttggcgaacgcgaaggtagattcaaatcgtgggccgagacgaacgcgctcagaagatcattcgaaaagtggaaaattgttcgatcaaaaggattagcggtggatcattatgatgccaggttgattgctgagtcctttgcggcctggcgtcatctgacactcaaggtccaggatttgagaagcctctgggaaggttgggaggcagatacaaaaatcttggtcgttggtagagcatgggacacgtggaagatgaaattagcgaggagacaaacggaggatatcgtgggtgaacgtagggatcaaagacttctgaaaggcatactgagaacctggaaaactgcctggtatgtgacttgtttcactcaaaaccacggaatcaaaagctgtcgctaatttctttggaggtgcaattgattctagtgacgagaacgtattgcagagagagttcagacggaaaactctctcgcagtttgggtttacgatcatgaaggcacgaatgagccagataaatgtaagttcctctccgttcggtattctttgaagccagaggaaatcagtatatgaactcacgttcagccatgacttctcttttaccagtacaactctcagatactcgcacaaatcgtggccgagaaaaaagagaatgtcatccggaacgcacttaggttgtgggctcttgagactagaggtcggattgtccgggcgtcgagggaatcgaatttagtctcttccgtgttctggaagtggaaggatcaaacagattacatcacacaggatcttgacagtcagtactcgttcacgcttcatctttgatctgcttaaccaaggaaaagatttacagagttgtcatttctacacctcgttggtagacatcggaacggtttttgtgaatacgctcgcccgtcgcaaacttcattccaccttaaccacttggtcaaatcaattttatctcctacaagcgaaccaagcgaaagcagacgagcacttcttacgaaccacgttatcatcctgtcttcagacctggcgagatcggttgaagcggcatagacaacaagaaagagcggcggcgagagcctatcaaatcatcttgaaaaggagggcttggtatatctggaaattcaaatctcgaaaacgagctcaggatgattggatcgatgcacaggagagaaaagtcgtccggaccgctttcgaaggtatttaacaaattcttttcgctcggcgtagactggttgtagctaactgattaattaatcttactactcattttctttgtgttcaacgctgcctaaacttagcatggtctttggcatgtcgccgttctaagagtctgaacgctctggaggacgtcttcacagacaacaccaatcgtgtaagctctcattcaatttcaagagtagaggcacaagacacatctatcagtgctgtattgacccatatcgtcctggactatctagcgtttaacgaaccgaacgatagaggtctggcgctctcgtcttttcatgcaaaggaacgaagagcaaattcaggtgaaggcttacaaccagaagatagtctctcgagcgttcgctcagtgggtctcgggttgtttgaagcatctggaccagcagatgttgatggagtgtcacagaacagtcaaagctcaaggtagagttttcatatctcctaagaaagaatccatttacgactatctacttacagagtgaatatggcttatttgtcatcctctagaaacacttcggaaggtgttgaaacattggcgacgagcggcgaaagagtctgtttatgacaagattgaggaagctgagagactagagagaataaggattcgaacgctcacaaacgcgtgggtgtcttggagggataagcatatcgagtatcagttgaaacctattgtacgttctttcgtccgatcctgtttgtcttgttagacgtcctcatgttctctttttctctctttctcaaacgatgtgtttctcttgttgggcgtgctgctcgtcgctgtcgccatctgctgatttgctcaacttccatttacaggaagctcaagttgcactcataagcgatcgaaatactctggatgctgctcttttccgatgggagtctgtagcccacgtcgctgccgctattcacttctacaagtcgcacactaaacaaagagcaatgaaccggctaagagagcgtcttccagtgttcagggataagaaccgggcggccgtggtcgagcgcaaacgaattatcggtcagtctttatatttcatttcccatattttttttaccgagaaacattccgaatcaagtatagcttcctctaatccaaactttctaacaatttcttgggcttgataggtgtcatatttgaaacttggcagatgaaaacaaggagaaaaattgcagcacgaccacctccgtaagcctttgtctttattcatggcagtgccttcttgacagccgagaagaatatgccgcctaactgccccttcctcttcgattcatacactcctgtcactcagacgacttagaggaattgctcgtgctcggccaagactctcaacaagttttgcggaccagcctcgaagatcgagaggcgagatctagatgaagattgagacccatctatagccatgtaaagctcaaacggacatatcactcttgcatttattgaactttatctaattttatgttgggttaatttaacgcggcatgtgaaatactactggtacactttctgtacgcgttagaaagattccacaactcgaaaccccttcccgatagctcttatatcccaccactccgtctaggcgtacttcctcctaatcgactcctcggagtcgacccggccaaacgagcagctgctcctagaagaccacttcgacggggcgtcatacctcccacacctgcaatcttaggcgttgccgacggtacgacggcttgtttcttgagaagttcttctttgacagcgctatagagtataagaacgaacaaagtattgagcaaattagggatagactagactacacaaattcaaggttgacttacgcgtcgcgctgctgtgccatctccaatctacaagcacgcacaattcgacagtgaaaaaaaaacagtcagagagagcaggagttcaacagtctgaaaaacctatcaacgtactcgagttcagctttcttgctgaaatttttagctgcacggcttcgttccctgccatcaaagtttttctctcgaacgctgaaaaacacacttccaagctcggctgaattagagaatggagaggaacagtgggaaaggtcaactgaggaaaacgaaaaaaacgtagatatctataatgaaagacgtaccgagccagtacggatcaacggacgtgacacacatcatgtactgtttggaagtcatgacaactgacaaggagaacaggagcaaaacataattgtgagttttttttgcgagtatacaaatgaagaagaacaaagacctacgctcatgatacacaacgtagtctggcatgactgtagatgcaatacattttgaaatgataagtggatttaatctttcttacagaagaaggaatactttggagacagattcagcactgacatcctagaccatataaagcacttgttgggtgaaggacacaagaaacctatgaataagacgacccatgcgatgagtcaggaaagctgattgaaccgtgattcgtgcatagagacagacttacagcagttcggcaattcatgtattctccaatacccttgactcgagctgcctggtggaaataaccagcggtgatacatttcctgttgtcaaaataggtaaaagaggagatgttagaagatatcatcagcaagtcgttgctcgctaaatcaattaaaaaagaaagaaaaaaacagaatgatgtcaatgactgacctgacgatatcccaatcggtcccaactgacttgatatctagcttctgggtcttaaggatatcttccaactgagttcgaacttccctagctttacgcaataacttcgggtgtaggaaatgcttcatggcccaatcgtctcgatatctagatggtaagaataatcagagacaagaaatatgaattcctatacatctatcgaagcagcaagagcaattgaacgtacccgttactcttccattgagtataaacatgaagcaaggtaagatggtcactctccggaacaaagaacttttctcgagccgcatcactctcctcctgtctttccttaggtcgatagaacaccgaagggacagaaagcatcgatacaattgacaacatctcgttggcacattgatagtcgaccgagacgatcaacatcttcgcaagcgaaggttccatcgggtagtccgacatctttctacccaagggtgtcagattgccaatgttgtcgagtgcgccaagaacccaaagttgatacatcgagttgatgatgttttcctttgatgaggaaaaagaaagaataaggacaacaacggtcagaaacactctttaaaattgagatagataaggatgacacatacttgtggtggaggatccataaaatcgaattcaagggtgtttttcactccaagtgattttaacatcaaaactgtatttgccaaattcgtcctttggatctctgggatattgttcgggaagagttcattgatgaaggccatttcggtaaaaagtcggtaacagaatcttcattatgaagagcgattcgaaggcaagaactgatatggttagaacattctctctcttacgacacaggattgaagaccagtattaagattagacccacccgcttcctgttcgtccagctcgtccagtcctctgaccggcattggcttgactgataggcgtgatctgcagagcgtccattccgactttaggattatacactttcaactttgaataacctgcatccacaacatatagaataccatccactttttttcgtggacaaaatgaaattatgatgcctaattagtcaactttgggtcagatagaatagggtaaagataacaagacccacccgtcaaggaggtctcggcgatattggtagcaacgataacttttcttctaccatcgacagtcggctggaagattttcgcttgtagatctgccggcatctgagagtagattggcaaaacagctaacggagcgggatcatctaattgactcagccggtcttcaatgggatggcgacgcaggaagaggagagagttaattagggttgacacgtgaaataagaatagaaccatggagcacaacataccttcgactaccgaacaagtagcctcgatatcctcctgacccgtcatgaagactaaaatgtctccaggagggttcgacaaatgaatttggaggacctgtttaacagcgctatcaacataatcctcgcaaggcgctttgctatggaagatctcgactgggaaagttctaccaggaatagtaaaacagggtgctccgctgtagaagtttgagaactaaaccgataggttaaagagttaagattgagatcatggccatcgggagaagccaaaagaagaagaaaaaaaagacaaaccttctcagcgttcatcgtagctgatgttacgatgagcttcagatctcttcgacgtgtcaaaactatagtcgagtcatcgaacaatcaagagggaagaggacaattaagacgtgttaagaagcaaacaaaacagacgcatcgaagcagatacgtactttttttcaaaaggcccatcaacacatccgtactgagagaccgttcgtgagcttcatccaagatgatcacgctgtatctatcaagatcaccttcattcaaagattctcgaagtagcactccatccgtcatgtcttaaagcagggcgggagaaagagacggcaaatatcaatctcagtcctgaatatttacaaggggaaacaagataaggtattttcaaaagacttacacttgatagttgtctttggagatgtacagtcttcgaatcggatcgtatatccaaccaaatcacctagcttgacctccatttcctcactaactcgcttggctacactcatagcagccactcgtctcggttgggtgcaaccgatgatcccatacttgcagtacccgtcttcatacaagaattgagcgagctgggtcgttttaccagatccggtctctcccaccaccacgataactattgttccgaatcagagtcgatagcacggatgaagcaagtgccttatcaatcatttgtacatgcaaggaaggagctagaacaactttagagtgacaaggatataagacaacaaaccttgattatccctgatgattctcatcagatcctccctacaggcgaacgctggaagatattctctctgctctttcaacgatttcgtcctagagaacacagaggctccttcagctgctttcagatgagttgagaattgtgattcggatttgtagtttccgtcgtccggcttttcgtctatccatcaggcattttcgagacacaagcagatgttagggtgggccggaagaatggcaaggtactcagcgacaaagagaaaagatcgcataccagaaggggtatgtgtagcgccgtcgatcccatcctctccttctttcacacctagaatattcccgagtgccgtcccgcctacggaagcaagtttggcggccgcctgttctcgttcacaagaaaagagagcaatgatgattgggagacgactcgatgatgacaaagtacagaaatatgagaaagaagatatagatcgcaccttggcccgttcctgctgctctcttctctctctgacaagagcactacctttctttgaaaatatagccatatcacttgttggatccttgatcggattgataggttccaattgtctggtgtaagccgtagttccatccaagaaaggtggtcttaggtcatgaaccagaacgtgaactctagaatcagagtcgtcttcaaagtccatgtcaacggattctcgagaggttataccggaggtgtgaagtcgatttttctcccagagatcattatcggcgttgtattgggcttgtcgagctgtgacttttttgacagccttcttggtaagttcgtcctcttgttggtgtgtgaaatcttcgtactgagcgaacggattgtgatcgccatcaccagcctttgcagttcgggatatcaaatgcttcagccagtggacgaataatggaagtatgaggaaaaagcaaactcactacttcggattcctccccataccaatcacgatccagtctgacctgttcttcttcccactctctttgatttggtgtgaaatccaccccgtcctctccataccgcttttctccgctcctcggcgtagcatcccaaccattgtcccttctgcccatatcgccaagctgaccttctcttctccgaggagtctcgtcccatcctcggttaggaactctgactgagccatctcctgctcggcgctcagttgagggaccgcctctttcagatcgcggggtaggcgcatccgaccaggatttagtgttgcctctggagttggagtcaagattagggttttgagaacgaggggttgactgaggatctgaagactgagacgatatggcagaggtcgaatctcgagcatatcgctcttgtttattgagtcgacgttggaagtcgccgagacctcgaggttgattctccggtgcttgattctcgaccggcagaccctctagatagaatatgaaggagaatatagcggtcaaaacgatgaaagagaacaaaggaacgcgacaaacaaacctttggctttctctcgagctcttctgtgctcttcgagtcgcttcttagccgtgtccgagagtccaggaccatgggaaggtgtttctgatcctcgctgtcggatgtttgctgctctcggaggtaaagcggggactttgaacatcggggcatctccggtgtccgcctcgtcttcgttctgtctagatcttttgcctctttttgacagttcctccagccgtttctttgcggctgctgcctccttcttctgttctgccagcttgtcaagtccgagtagcgatgcctgtggtgctctaaaggtatgttgaaggccaccctctctgaccaagccaccgacacctctttcctcctctggttccaacatctcacgatcctctcctttggctctctcctcgaaccctgtcactctgagtccttttgtgttttcttgttgagacagatgaacgatgatctctgtatgaagcgcgtcaagggagtctgggggaaacttgccgaacgcggagcatgcccgaccgaacgcggtggaagatgggttagatttggcgatatcgatgactcttcttgcgagcagatcgttgggattagggatgttcaatagtctagaaatcgtgattgcagtgtgatggataaagtcctgatggacccctgctgatggtgggtccatgttgatgatggtggtggtaggttaggtgggtgataggaagtacgaaatgtttgtaatgctttaccaaaaattctctagtctctttttctattcgttcttattgatctccttcgtccctccgctcttcgtcaagtttgacccaatccacatgctcaccatccggtctcgtttcttatactccctacatacatttccggttcgccatacaacacatgctcttcatcgacgttccttccggtgttgtccttcacgctatgcgtcgttcaataagagatcgatagccagcccatcgaaggatgaagacccgtacggtagaatatatgatcctctcgaagttactgaagaacagaccgttaaggcaatcgatttaatcagacaagcttctggggttcgtctcttcttcatgcgctcggtatatggtgggcaggtgctcaaccagagtaatggaaactgacctgccaatcccgcaatatggcaaatttcaacgaaacagccggacgtcgatctcaagtttgcataccttccgttttggtcgattgcttatatctattacggcaaaccgctgttctacactcagtctggaggaggtctcttggcctgggataaaggagaccatccgttcttgctgaccgtcgaggtttcgggtacagatcaggctgatctcgcgttggttctttcctcatacctttcttattctccttgccctgtctaccgattcgtccatccgaactgaacgctgctgtttttgtcttgtggatatagaacacttcaatttccgatctctcctcatgtatatgtaccctccatagcctcctcttcctcttcctcagtgaatctcactgctcagcttccaatcccacaattcacaactccctccagtccgctacaaggggatcatgcagccgcgatcgtcccgttcacgcttggccctccgacagggcggctttcgaagctcgtccatgaaccgttttccagcggcaaagaaaagacattcagactttcatcttcaaccaacattctcaacagtgcctcaaatatgaggggttccacagacgagaggacgaagagaaagggaaaaggaaagggaaaggaaagggagaggagaaatgaacagaccgttggtagggttatggattgggatccggtgtttcctcaaggaggaagtatatcaaggatactacacgactcagtccatgtttgggtgagaacgtttctcacctctttatctgttctttctacgagttgcctttgacatttgcgcttgttgtacgattctcgcttgtctgacaacaggatagagtggcatttccgatcagaaagccggttatcgttgcctccaagacaacaacagaaggcagacagttacctacagccgcggttgacataaatacactccaaatcaaaagggctacgctacgaacccaacgaaattcgactggagaggatgctggaaggatcatctgggatgatgctgtgcgttcttcctttcttcttcacctctggctacaatttgtcgtcgttcttttttgaccctctttgatcactctgggacgggaaacgcaggcaacatcgtttcatcagttcaaaaaaatttctgggctcaagaccgaccaatttacagatgctcaactatccgctaacgttcgggataggctagattggtctagtccgttcatccattcctttcaaccgtaccattccagatcgcttcatgaaccaggcccgtccaacctctctggtgttcgaatcgaattgaccgccaagctaagtcggatcaagataggctcggccgtcggtatcgtcaacgggaatggtagtggagaagtcagagggatagacgacccagatagaatcttgtcgccagaggcgtggacgagagaagtgttgattcggcctcagaggatacgagaaaagcaggatgagaagcaaagactgaaagaggaagcagagctgaatcaagctcgaaggcagagggaagctcagatgaacggaagccgtcctaccacaccatatctcaggacgaatcatcagacaaaacagtctcctaatacacaattcaaggttcgttttcctgtgtttcgagaagacttgctcctccctctttgccatcgcatttacgactgttcttggttttctttgttcttcagaactggggatcgtccgcttcgacggactctcataccccaaatgtcgagatgaagggcatcccggctgtgaagattagatccgactcgttcaaattaaacgattccgataggttctactttcacttagggatttctctgactggtcgggatgccattccgacagatgttgaaatcgaagttgctcataagcaacagatcgagagacaccaccctgatagaggcggacttgcgagtatggcagcgtcgatcaatcaggctagggataacctcaagactggttcgtttttcttttcgccgtctttccttttcactgttcattttttgtttatttcggattgaactcagctgaattgagtttgattggactggaatattttggctggtttgtacccaaatggtgtatgcgcacgaaacagaggaacaaagaagagtttaccaggctagatggatacgaccgttataagtgatgaattataaatgacaagttacacgttatgagttatgaatgacaagttgtacgttataagtcatgatgtgatcagatagcgttccgatctgcctcgccttcttcttcgcttttcatctctctttcatcctccttctattgaccaagacagcgcacagaatagggaacaagacgcaagaaggtgtacacagaagcacgcgcactcgtacgctcgctcgctcatccacaccccacgcgtcaagagcccagaccctgatgacgtgcaggtacgtcatcaaaatcaattacgtaagaccactatatgcgcttcccctcgctcgctcgctcctcgtgcctgagaccgagagatgacaggattcgacatctccctctttaaaaaggccatctctttttttcctcgttggctttctttccctcttctctctttaccacccatcacagagcttctttcgccttctcttcttcctctcaccccatccatccttacatcagctcgcgtttccagttgaggaaaaatgaagttccctctcgccactgtggtatctgtctcgcttctcttgtcttctcaggctgaggcaagttggttcaaaaaagacaaacgtatgtgatttctagatcgtgtaattttcttcttctctttcttgccatctatcctgtatgagttgttgtccggatatgtaaagatgatacagaaaaagaagacgaaagaaaaaaatctactcgccacttttggtcatattttctactagtctgggtcactcactctctccttttctatcaaccaatagccgactacactacctgggactccaataagcttgcagcatatctccaagagaagggtgttaccgcgccgtccacactcacgaggaatgatctgttcgttcattcactttgcttttggaaaaatatcaaaaatgagattgaaaacccgttatcgtagcgtgtgatcgttctcgatgacgtatatgacgtcttaactcgatcgtcatcgccatgtattctaacaatcattgtgctgttctttcgttctcatctcttgtgtctcaacctttttttcagtgtcgcgctcgctaatgacgcatttgacgctgggttgcactacaccggtcggggtgccggcgccgctcaagctgcttttgaggccttgagcgaaaagacttttgacacgtatgtctccttcttctatttatcgggctttcgccacattgacactcaccacacttgcttcttttcactcagttggaccgagtctcagcttcgagagtaccttttggagcaaggcgtcatctcgccttcgactactaaagagaaattgatcgttcttgccaagcagcggtatgtactatgtttatatctgtcttgctccattcgagaaattgatccttaccgatggcattcgacctcaatcccctttgtatatgcagatacaaccaggcttctaccgccatttacggaaacccctaccagcaggccaccaaggccgctgccgctagtgcctcctctgtctctgcctctggatcatctctcaccgatgaggctgctaggaccgccgcttcgctcgcctctgccgcgtctgcctctgcttacagcgcctctggagctgccgcttccattgcttcggaagtatccgcttcggctgtcagtgcctccagcgttgctgctgccagcgcaagctctgcttacgcccaggtcaccgacggtacgcctttctggttgcttgcacagctctctttgtcaagatactgattccgactcatgtacctctccactacaggtgcttctaccggttccaggtccgccacctcagtcgctagtgctgcttctgccggtgtttacaacggtgtctcttccgtttcttctggtgagtagtactggtctgtcgaatttgtctagtctcctttactgaccagtttatcttccggaacaaactaaagctctcgctgccggagccagcgccattatctctgctcctcaggccgctaaggattacatctactctacctgggatgacaacacgtaagctattctctgtactcgcgcacagtactcaaatcaacaaaagcttatcggttcattttgtcacagcctccgagactacctagtcgagaagggtcttatcaagagcaacactgtggccaagcgagacgagctcattgcgctcgctcagcagccctacaaggacggcaaggccgctgtctatgagacctggaacgacaactacattcgaagctggctcgtcgcccacggcgtcatcaagacccctgttcaacaaacccgagactccttgctcagcagcatgaaagagaactacttcagcctcaacgataccgtttggtccacctggactgattctcagatccgagagtggcttgttgaacacggcttcctcaagtccaccgttgaactcacgcgggagaagtacgagcgattgatcggagagaattaccacaaggctgttgactcgtgggctcccagttggaaagactctgagattcgacagtggcttatcgataacaactacgtcaagaccgactacgaggccaagcgagacgatatgattaagcttctcaaagacaagaaggccatcgttacctccaccaactctgaataccttacctggcccgatgcacgactccgagcttacctccgaaacgctggggtcgacgacaccaagtacaccacccgaccttccctcctccaggaggtccgaatccgatacgttcaggcttccaccaaggctgaatctcgttagttatcttacaagttctctctccgtcggctggaagagtcgttgactaactcgttgcttctcgctttgtctgaaagttcttgcctccatccgggagaagttgaacagtggagctgcttacgctgaggacacccttcacggtattcttgatgctcttgccggtgtcacccgaagccccgaggagatctacaacaaggccgtcttgggactcaaccgagctgccagtgccggacaggccgaggcttccaaattgagccgagctgccgtggccagtgcctcatccgcttcgtcagtatacccttgttgaaccttcaatgtgattctctatcaagttggctgactttgcttcccaatcacttttacagtctcgctgctgagtcttcctactcttccctcgtctctgctgctgctagtcagactggttctgccgcctcggctgcgtctgccagcgcctcggcctactcgaagagcgcctacgcctctgcttcttccctctccctcgccgcacagagctccggacacggcttcttgtcgtctggttagtgattacgctatacacctgaacatgccatccttgagtctgaccatccgtctcttttaattcatttttcaaagcctcttccgttgcctcggttgcctccaagtctgcctacagcgtgtactccgttgcccaggcttctgccagcagcgcctcggtggctgcctccaaggagtctgcccgagcttccaagagcgtgaagagcgagctctaaacctgctgtgcttccctttactcctctcttgatttctatctcgcttttctttaatgtctgccctgtctgctccttttcaataagaaggtggtagctggttgagcgtacgtgcgtgtgtgcgtatgtgtgtgagatgtgcaaagttgactatactatttgtttcgttatgtactatcttccctttccaccattgatctctctaccgtttctcaatcctcactggtttttgatatacacatgtagccattgattttcttgatgttttccgctctgtgtggcgtctgtaaggatagggctgtgcttcgcgcaagaccgatgcaacgtcaccttctatctgaaatttggatttgtcgtctaaccatcatcttgaaacacctcgagatgcacaccatggaatctttagaaaacccattagaaagctcgttgagattcccgttctctggttaccttcttcctaacaggctcgtcaaggtgagtcgttgcttcaagtgaaggagacatctctcgactgatcgtctgttcgtgtttgccaggtagctatggccgaatgtctcacggtgttcggagggggaccaccgacggaaggtcatcacaggatatacagatcatgggcacgaggaggttggggtatgatcatttctggtaggtcagtctcttctttcagattcaaatggagacgtagaggaagaatgtcctcaatccgagccctggcctgttctcgtctttctcttttttggatttctcttggggtggaatacatcgtcgaacaggaaacgttcagattgacccagattggctagcaactccatgggatctagctgtacctcgatctcttgatccaacatcctcctctcttgctccctggatatcgtttgtcgattcaatctctcaggccgcttccgacgacgacgacgttgatgacccagactgtccttcggccggcccattggtgatccagctttctcaccctggccgtcagtcccctctctttgcccgccgtaaaccactttcctctcctctcgctccctctccgatacccatctccagcgaaggattgatcaactccatcctcaatactcttctattccggacacctagaaacgacgtatctgacgaagagatcgatgacgttctaagaagattcggacagacagctaggttcttagaagaagcaggggtaaagggagttgagatccatgctgctcacggttatctactcgctcagtttctgtcccctctatcgaacaagcgacctcctagttcgatcttcagtcttcaaccgggtcttggtcccgacgatggagatgatcatgtgagcggcaacggcggtggaggcctggaagtcttgaggagagtgttgaggtatgtgagggagaatacaaaacgagagttcatcgtagggatcaagatgaactgtggagactttgtcgatggcgggctaggtgaggatgaagctattgagcaggtcatagatgtcaggcagatgctcgttcgagtttgcagggaagggaaggaggaaagcaaggaaggatgggattttgtagagctcagtggtgggaattacactaatccaggtgggtctctcgttcttttcaaccattcttctccttctctggtgcctaaaaaagaggtaaagaaagctgaaaactagagagaaaatcctgcttttgaaagttttcgcatcatcctctggtccaaacattccgtttcaatcattctcgacccgtcttctcaagattcaaccttccccatccctccccccacttctcctctcatcatctcttcgttccgttccctcacttctctccgccctgcatcctgctccctctccttcagctcatctcttgggatttgcgagaccctcagtcgcttacccttcgttaccaaagtctcatctcttacgaaaaaggaaggagataagagaattcgagatgcctaatcttgatcacgtctatcgatggtccgatctcttcactctttctttccttaccggcaggctcagtcagcgcaatcacgccatcaacattagtaccgatatcgacagtacatcagacgagagaactccggaggtcaagacgaagaccagaaagaaggattcgtcaggtctgataggtgccggcttggggacggtttggtggacgttccagatcaacagactcgtcaacgaccggccgttcaaaccagatctaggaatatgggaaggagtcctctatcaatttggaccgagcgttgcttctatccggccctcttggtctcgatgggctttcatcgggctcgtcggtttcttagcttggtggctgggtttgacatgattcgatacatggctttttttattaactctctatccaggctcaaagcacgatctcggctcgtccttctctttcttaaggtaccgcacagacctgagttgtgcgcgaaaaagaagaagacaaagaaaaaaacgagagagagggacatgaataaagagggatatcaagaacatgcactagagaacgaaaataaggaccgatggattcctcaagatgaacagatcgaaaagacggtagatgtgtaagatataatgcattggtagagaacccaagatcaagagaaatccgaaaagaggcagaacagcttgaaggcaaaagatgacaagaacgcttaactcttctataacctcctcggcgacggacccaacatacttccttccacctggacgttcagctcagtgagccctctgatccgtttctttaagattgtcttgactctcctgacaactcgatcaacatttgcgtatttcaccgcgttaggctgaagatgacgaactgaagccgcatcggtcggtcggccggggtcggtgtctaaagtctgagcgaggtggatatgaattgagccgaccatcgtggattcatccttaggccagaaccgaggggcaccatatcctgcaagtccttcgaccgaggcgagctatagaaacgaagagagagacatgaggaagggctcgtctagaaaacaaggatgtcgcacaacgtacctcggagagggccagacggatgtctttctcgttctcgctaccagcgtccaagcagagaacctttccactgtcgatcaccagaggcaccacacttgccacgattaatgccgcaatgaacaacgaagcaatagggtcccagccagtccaaccagtgtaaccgatcagaagcgtagaaatgatgactccgacggaacccatcgtgtcggccaagacatgctatcgtatcaagagaagggaaaaagagtaaggaaggctctcgagctaacattgcaagtcgacaaaatagctactcacgagaaacacaccccgcatgttatgactgtgtccttggtcgttctgtataggatgacagttcgagttaagacgaatgccctgaatctgaaagagagaatttgaaaccacataccgaagcgtaatcgccgtcgtcattgtcatgatcatcatgctgtagattcacacagataacaatagaccgatggcacgtcagtcggatctaaacaactcatcagtcttattatccacttacgtcacaaccagcctgattatcgaatcatttttgcagtaaagaaaacgaatgtttagttttgtttttctttattcggtacttgaaggaacgatcacatgaataatttaccgagtgagaatgtccattatgcgagactggagatggagcagaaggagccgaatgagaatggccatgatggtcatcgtggtggtcctggtggtcatgtgcctgggggagagggaagcgaagaaaaaggtaaggtctttgtacaaacgcgacaagtaggctatgcattgattacccacagaaacttcatgtccatgactgtgtccgttgtggtcaaccttgttcgtcaatcaagaacaaattcaaagtgaattagtaaagttgtagatataatcgctgatcaagacgaccaagacctacgtgctggtcaacaggtgcggcatgagaatgagaatgagcgtgcgcattcatagtcgggggtgggggaggagcagctttgggtttaggcgtcggaccgtgcgaatgtccacctccgtgcgagtgctgtcgttccatggttcaaagttttgtttcagtttccaaaagggtcgtagagagccattagtaaataacagggttgaaaagtggtgtgtatttacagaagcgaagcactgatagaaagacttaccccatgatgggcatgacctcccgtcgcaaacattccaaacaggttgattgctagtccgatggaactgacaagcagcaatcgactggtgttcatctccgggggttcggcactatcaaaagaaaggagactttcatgtgttaattcactatcagcaggaaaccagcgaggaacaaaaacgcacattctctggatagcctcgaatacgatgaagatagaaatcaagatcaagaaaataccattggcaaaaccagacaaggtctcgactcggccgtatcttgagtatataattttgaaatccatcgcttatcagtgtctggtatccatgagaagataggacaaattaacatacccataagtgaactctccgttgggtttccagctagccatgacagatgcgaacagtccaactccgagcgccatgcagtcgaagaacatgtggatagctattcagaagcagtaaagtcgaagatcaattgagctggtctccaaagcggagaaaagatggacgtgaccaggatgtaaggcctatcagctcaccatcacttattagacccaaactgttggtccacacgccccaaatcatttgaacgagcatgtatcccagattgagcaacaagaaccaccagatccgccttgattcgggattgtcgaggatcactttaaggtatgtcttggcgagccggtacgtaggagatgtagttgaagatgtggtggaggagagggaagaggacgaggaaagcgaggtatggttcagaggtgagaacgtttgaggcatcgggagaagttggtatggagtgagatagatggctgaatgtcaaacaaacagtatcctgattgagcatctgtgttccaagagacaaaatgactggaatagagacgaaccaagccatacgcctactcccaatccaacttcactccagcttccgcggacgccatgaaacagccacccaacagccgctgccactttgatcatcaagaggaaggctgtgcccgcttttggcagactagcgttggcagccttgttgaggttcagaatcgaagggggtgatagaagaggctggatgactacaagggcgtaagccatcttctgaagagctggccaagtcgtgggaagacttgacgaattctgagaaggttagtcgtcatgagtcagctgactgggttggtttctagacacagcgaggattgctacttacaaggagggactcgaatccaaagataattgctgccacacacatagcccacgatcggatccgaccaacttcatccttaatctctcctttaattcctcctccgtttttgatactcatcaaaagcttatcttccaagacctctttcaagttccccgttgatatataaagcacaatagagaggtgcgcaaatagagaactcaaaaaagctatcgagcgaaaacggaaaagaaaaatgaagggaaatagatgaaagacaaaagagagacgtgtgagacatgaggtagatttgatattgcgcgatggcgaagaacacgtacaagaattaacgctgattgacatgagaattgaagcgacaaaagtgattgccagagtcactgttcctatgagctgtgaacaccgtcaatgacccgaagattagctgactgcttgcgccgagagtatccggaggcgcaacactgcgacccatcttggaacaagttgtacaatattgagtgaaagtatgcataccgccgactttccaaatgtataactgacagcccatatactgggaagcaatgtgaagattaatactctggagaattagaaagccgcagatggcgaggaaggaagaaaacgaatagaactttagcctaattcgagccatggcgacgacaatgatggaaaaacaaaccgaataacaggtagaacacttaaagcccagtagaaggaatattgatggaaagcaaagaggattatatacaatccgaataacggagactatatattgtgatttagaactaggcgagatgagcattgattcaaagaaacgagaacaaacaaaacagaacaaaacaaaatgaatgcaatgtggtcttaccaagatatcgtccagtcctttgcgtcttgctttgagcaaccctaccaaaccacatatacccattccacccgacagaaccaaagtcgttccgacgttttctattccccaagattttacggcatagcaagcgaatgctcgagtgagcgtgctcactaaaacgatcagtgttggttcagacttgagggatgctattgtgggtagaccgggtgatcgatgggagagtgtcgagaacggagtggaagggagagagtggaaggaatgaatcttggactgggaccgacgatgagaggaaggaatcgacgacatttttgttaggatatgaaacaggaaataagagagtgcagcagatgattcggatgtgcgcgaagagaagaggagggccaatcaatggtcggtcgttccggagaaggtccgaaggagcttcctgctttatctatcgtcttaagtcctttctttctttttctagagcaagtggttatggtagagtgcgaaaacagatgatctgatcgaatgtggagacaggcaaggatcagaacaaacgagggaacggcactgagtctccagatgtatgctacgcctatcggtcagatcaataagtttgggctaaatgtatgaagaacctacttacaaggatgccgtgccgtcttgatggcaatgagactctccagatgtccgaccgttctttccagagaacaaggccgagtagaaagaagcaaaggcgaaggagagggtgcgtgtgaaggtgagagtagaaccaagagagacaacacaagagaccgacgataggatgggagaggaaaacgagaggcacgagatggattctaggaacaggattaggaacacgggaggatcgaccggtgtggttacgaattgattacatttgcgaattcacacgtgctaaattgccgccacatgctgtgcttgctttgaaaatcagagaatctatctgttcaccaaaaaattcccattcccactcttgagcagtcagccagccttcctagacgttgaacttgacctcgcactctctcggactcacagacattctacactatggcgctctcttccctcaaacccgctcttatctctagaagctctcttccggccaaccctccaagaaagaaggaagttgtgccctccaaggtgtcgaccgcccaggccaccaaggctgtaaacgctctctttgcccacgccgagaaggagcgagtcaagaaggaatccactcagcttctatccaaggatgagtttgtctggcttgtcatcgccaccaagaagatttctcctgaaaaacgagtgaagcctatcaagatgtgagtcacattctctttctctttctcttaatttaccaatcaccatattgaccagatatacatatcactcgtcttcttcctttcaccctcggtagccaacttcctactcctctcctcgatcctcgatacacttcgatctgcctcttctctaaggatcctcagagagagtacaaggaccttctcgagacctcgtccatcaaattcattgaccgagtcgtcggaatggagaagctcaaaggcaagtttaagccgtacgaggctcgaaggcagttggttaacgagcacggcatgttcttgtgtgacgagcgaatcgttacatttttgcccaaattgctcggaaagtactggttggatgccaagaagtacgcgtctcattgtgttttcttgatcttattcacacggcttgacgctgatcatgttctttttggacacactctctaggcagcccatccctgtgtgcatgactcgaaaagacctcaagggtgagctggagcgagcagtctcgtcgacctaccttcacctctcccagggtacctgcacgtgagtatctcgtctagtccttctcttcggtcgctcaacccggctaagctgaactcttctaaccttgacgtgtcgttggttataatcttttcctctcctcacagctccgtcaagattgcccttctttcttcttccaactctagcaccagcccacacactcctgctcaggcgctcgccaacttgatcgcggcgatccctcacataatagctaatattcctggcggatggtccaatatccaatcgctcaacatcaagacttctacctcgatctctctccctctttggacgtgtccacttggaagcggtgagggaggaaggttcgaaaacatggctggtgtcctgctttctgacgatgaggaggaaaccgaggatgttgagattgggagtgctcttaagccggaggaggtcgaaaaaatgttgaaggaggagaagcagaacaggaagaatgagggtaagaagcgagctgcttctgaggagaagatttctgaagaagttaaggagaagaagatcaaggcgtctcctgccaagaagactgctgccccaaagacagaggcacctgtcgaggtcaagattgtggccgctcctgttgaagttgtgaagaagtcggctgtcagcaagaaggccaagcccactcaggttgagaagaaggtcatcagctcggcttccgcaggtgtcaagggtaaagagagcgtggtcggaaagaagggtggcaagaagggtggaaagaagtaatagagaatgaagaaaccgatcgatgatactcaggattctttgtcactacattcaccctattttttcactcgcattcttctcgcactctctctctctgtctttctctttctcttttcattttgtaaaacgttgttcttacagttttgacttctgggacccgatcgcctccgcgctgctctatcttggtttttctcctttacacttcccttcctcctgtcgtctttgtctctatctattctaaaaacgtcacttctagtcaatctgactgatgctctgtgactagtcgaggtcctggtagttatgtctacatgtctttatgctctgcattctgtgttgtctcactagtttcccgaacagattgggagagaggccagcaatgtgcttacataagacatatttcacggcatcttctccttcatactcgtcatttcatcagttcgcacatcaactttgatactctcattctcaaatcaacagcatttttcgccctctatctatcttgcgctctctcgccgcttctctcaacacagttacaagaaccagatcataattatgtgccgaatgacgaagatttccaacacgcttatggctgaggccgagctcaggttcgttctcgagaacaaacgagatttcttgccaatatatcgcagagtttctcttgaaaccaaaactgaaagcactgtctctgtccttaacttcacgtagcgatatgggtaataagcacggttcgatctttccctatttcttggaattttagtacttgtatctttgtgtactaaccgtctttctcggtcgatgtaggagccgctctcgtcaaaggaggaaagatcatttttcaaaatcacaatcagcagagaacatacttccagaataagtctcatcgttcgtccttctaacgctatgatttccactcctttcttagtaatatacctttactaattcagtaaaaaggttctttctgcccgaacgtgtatgacaacactaccgactgaattcagaatctatgcatgctgaaatggccgttagtgagtgccgggccattcactgtacctcacttatcgtttatcagagactaggatggcgctaacttttactactcgattttcaagtttctcaagcattcgctgcttcaaacattcatcgagttcctatcggtcgatcgacctctcgtgtgacggtcaacaagaaatcaggtgtttatattcccggtccttctgttcttaccataccctcgacgcctcctccaagccttgagcccacgacgacgaatataaagtcgggaggaagaacgcccggatcccgaactggcctcactgacagtcctcagtggggcgtttcagcaggcacctgttctgatgagtggatcgatggtgacaacgtctatgaggaaaaagagacaacatcaacatcaaaatcaacatcaaaatcaacatcaaaatcaacatcaacatcaatatcaacaccaagatcaacatcaacatcaacatcaacagcatcacgatcacgatcacgaccgtcaccaaccactttgcccatcctcttgcaggcgtttagccacgtcttctcaaagatctccgtctgcctcctctcttccaagatcgagcttgtcagtatatgagagacagcctggagaggacaaagagaagatagtgaagagtgggaggaacgatttggacagacacgtgaaggcactggatatattggttgaggagatgagagaatttatagaacggctcagccccaggttcgtcctcgatgcgcgagcagctgctatttctttcgaacgatgaaacgttgcctactctactttctctagcctgcctaacagtttgtggtttcttgcacaaacagcctgaacaagggaactaagaataaagcactcgacaagtcgtcgtctgtctcgcctaggcgtagaccaaagttgaggttgatccagggggcagacctctgggtatgtagaataaaaaaagaaggcgtactcgcttcttctaagccatgttttagatgtctggagtggatcatcaagtgtgtccgtcgtcttacttatcttcttctctcaagctcgcttgataagaacacgaactaaacatttacgccctcctttccgcacaacagagcgggtatcaagcgagtgttctttacggaatcgaatgaaaacggagatattgtctggatgagccagtccagttcgtgtcttcctcgtacctcacttctcccctatctgacgagagttctcaagtcacagtcaaacaaaatccgctgaaagctgaatgtatttgcttactttcacttgaacggattctggcgacagctcgcagtttgtttgcagatgttgagaaaagtctgaaacaacgtgagcttttgctatttcatcagtctgcgtctctttcctctttcattgagttggaagtctgaacgaactcctcctcttaaaatctttcgttattgaattatcgtagtctccgaagaaaagacctgcgcatgattaagggaacagtggtctttaaatactgccgcctttagtggaatttctgccgcccatcagaaggaatgggcgaggaaatatagattgttctgataacatggttcttttcttcaggtccatcagtatcatgatgatcgtccctccttcagcgaggagaagtacaacgtcagaaaacattaattgaacacagaaagcctaataatctacaaatcacttattctcgcctcgatcgcttcacctgtgcatcgacctctgcctctccgtcttcgtcgggatctgcttctgcatatgattttacatctcctcgagatgggtttttcctcttgattgaaggtaatggcgccaggctacctttgttccggttcgtcgaaggcggtggtgatgaaggtggtggggtcaggtcatcattggatgataccaagtcgatcgattccgattcacccataggctcaggttcatgtttcggtttcggtttgaaaaacgaggttatgctcttgctcgtcttggccctttctagtttcgtcttggaattcggatccgctgtcgattttttcgctcctgacttaatcctaggctttggtctttcctttcctttgcctccgttcaacaacttccaacagttctttccgcccgttgccatgcttagtccttctacttcatccttcccttcgacccattttgcacgatccattaggtcctgaggtcgtctgtcgtatttgtctcctgcacctaagatctgggacggtggaggagtgagtatcaggtgggatacatgatacgtcatgcttatatgtgagaactgatgaaagactgtatctagcctgacgaggttcttaaccactggtctgtcggacgatcgaagtgaaggaaacagataggaaagaatggttgtcggatctggtgaaggatcggttgacgagtgaggaaaagaggggaattcatataagcctgctaggagacctgatgtagagttcgagaaaaacgcgttcaagaagcgatgatgagcacgcaaagatggaacaggttcaaaagagaattgaagcaactcacctttttctggtcgtttgacaaccaaccaacttgattgttcgatagtctcactcacgcccaggccggaagactcatcctcctcaagttgatattcgactataaatacgtcctctgattcttctctcgctttctttttgatagctttcatcggaaacactgtgggatccagaccagtagcattcgttgagtttgtgtctatctttggagggaggggaacgcagatctggcacaagtcctcaatgtcctcaggtatgggcggaggtattcctgagttcatctacctcgagtgaatgttcgttggtcaagaggaggatgaatgggttaagaatacgggtggtcagaacgagaaagttgaaggaatgtgcgcaaactgattttgatggctataaatgttggcatagagcggacagacctcagcgttagctcgacaagagttcgctagcggacattctccgcactttgcttccgtaggtctacaaattctagctccaagctaagagggaccaagagcaaagaaaaagtcttacagtgaatgagcaaaatgatgtggaagcaaagacgcgggcaagaggagaggagacgagagaccaacctccatgagtgcctcgttccaatcacccggccggtctgaaggaacgagttctgccgccttttcccagagcgtactaacaagcggcttccctgttggattcgaatggatacccagcaatctagtgagcactctatgaacgttaccatccacgagcggtgttttaactccataggcgatgctcgatatcgccccagccgtgtatggaccaattcccggaatgtctttctcgagaatctgaggacttgatgggaggtggccactgtagtcggccataactttttgagcagcagaaagcaaccgagttgctctagagtagtagcccagaccggtccagagtgcatgaacctcttcagtcgtaccctgagaaagcgcatgaatcgtagggaactagaatagagagtgggagtttataaacgataaaggacgtcaaggacactgatatgtacagtcaaagaagcagacaggacgaaccttgaggatccatcgattaaagtacgggatcactgttgtcacctgggtctgttggagcatgacttcagagatcataacctaagtatccaatcaacagcgtgggaaagtccagttaatcggcatggtacacctacacatctttccacccatgcaccccatgaatacatgtatcagacagagaacgaacggtcaccaacctcgtaggcccattgtgccagctgatccctcgataactttgctctcatctgcttgaatgactctccctcggccggacgccgacgccatggcatcaaccggtcgtgacggacggtggagaaccactcaagaaaggctgctcggtcggagatgaacgcagtagcatgatagcctgcagaatgtggcctctggagagattgcattccaagaactgcgtttcggtatgcagcacacaggagaaatcgatggttgatgctatgttgaacgaagatctctattcctcacaaaaacgcgtccgatcttgtagtctctcaggacgcgttttcgtaatgaacgcgattcgaacgtaaccctaacattcaccgcctgtactgctcacttctccatcgctctagccgtctctcactcccaccgttaccgttccagtgccaaccttgttttatctgatggcatcactcacggcgtcgcaacaggtaggagagatcctcaagtcgtgagttgtgtttcatctcttgctacgtgcttccggtctagaacaggattgacgtcctctcctctttcactctacttcggctcagcccggacgacttgacaaaactcccttcacttcgtaaacgacttgataaggagaatgtcaccgtccaggcacagttatcgaatgctgtgagagatcagctggcagccaccagggatggcctccgaagactagtggaggccagagaggctgtagacagagttgagagagagatcagagcggtcgaacggttggtactcgatgatggacatggccagactggagacggaaagaccggaattgcagagtttcgaaagattagtcgagtaagcaaccgaagaaaggcgtctcttcagtattcaaagtatttactgatgctctcggcaagctcatgccatatctttcaataggtctcgttcattcatcgaaaccttgcacaaacaacatcgatggttcagtcgtttcaagagatctccgaaaaggtctctgtagtatcctctctcctggcgtccgacatcgaggctggcgtgtacaactctcaacacaatctattaatcgttcattatcagctgatcgagctagagcagtttaagaacgagacaatccaccaggcaaagaagacccaatccgaccggacacttgatgaagtacaagcatacttccagaacctcgatcaggtgcttagtgttttcgagcagcatttatgggagatggtcgagagcataatcgatatcgtcagacagggcagaacggatactgtcgtcaagattctcaagattgtagaggcagagggaagggaggatgagaaggtttgtctcttgccttcttagtcctctttttactcttctcctccgctcagcatattaggacggaagtgaagaatagcacgactgacaggaagcgcctttctgttcgaataggcagctgctatgaagttgatcaaacgagcaaagggagatgtggccgctcgattcaagtaaatgaccttttactacctctcaatcttcatcattcgcacatcagactaagtctcttttccctcttatttttttcatcagatcgatgcaagccgaagctcgccaattcaaacactaccgacaaaaacttctagccaccttgcgccaatccatctcaaatagctttgacgaagccttcaaacaggcgtcagacgacccaagcacttttatcgagaatcttggctgggtgtaccaggatctgatccggatcgaatccgatgtagtcagctgtttccccccggattataacatctacgcattcttcgtcaagcagtatcatatcaatttggatgcccgtctgcggaccatcgtggcatctgcgccagacgctagcgtacttctccagttacacgcctgggtcaaagaatacaaggtgtctatgaagcaacttgagattgatccagattggacggaccctccgttgttggatggcaaggagcaggagcttatcgatgattacgtcggtgttatcgtccgaaagatggacgaatggacggcgaacctgatgagggacgaagaacaggatttcatccgaagagaacaaccaccagaggtagaagaaggaggcgcatacgctctccaaggagcggtcatcatgttccagatggtcaaccagcagatcgatcttgctgctgactccggtcaagcagctgttcttgccagagttgtcaccgaagctgtcagagtgatgagatcgactcagctccgctttttgaccctcgtccaagccgagatcaagaaaaatgtcgaacgaccagaggaatcgccacccggactagttgaatacgtcatggctctcgcaaatgaccaaatcaaatcggcagacttcgcagacgcactctccgccaggttggaaccaatcgtatcggataagtataagcaggtgatcgttggtaaagtgagcgaggcaatcgatggatatctagatatcgcgaaacattgctctcaggcgctactcgatatgatctttcacgatctgcgttcagtcaccaaattattcttcgcacctgaatggtataacaatgctgaacgaccgatgccggctgtagttgaaacgctgcgggactacctgtccgactatcaggaacatctcaactcatcgatattcgatctcttgttgaacgatcttgttgaaacattccttgttctttacctatctgcccttcgacggacgacaaaattcaaactaccggcagcgatcgaacatatcagggatgacataggggacgtgatcggtgtgtttgcagagtttaaaccgagggaggaactagaggtttctttcgaattgatcgagatggtcctgcaaatgctagacgccgggaaagaaatgttcttcttagattattggtcgttcgcaaaggtccatggtccgaacttgtcttttgtcgaggctctcttgaaggctaggtacgcgtccggatgtttccgctttcgaaggagttgaataaactaacttacgttttctgacgatttctgtagagacaacctggaccgatcatctgtgaacgagatcatggagaaaatccgtaagaaggtcaaggaggaaggcttagaagaacgtacgtctcatctctcccgatggtttatctagatatggaacaaagaaaatgaacggaagatgccgacacgtactttgtctccttttttttcttcgttcgctcggtgaattatagcgcaagaacgaacagtaatgaacaagattgcagagataaaaggggagagtatatttgccagctttggattcggaaacctatctaccaaagttcttttgtcataggtttctccttctcttcatccttacgaatagtcttcttggccgtgtttctttcttcactcgcatttgatattactctgcatacccaaacacaattgctcacacttgtctgtattagaccattctaagctatgtattctattacgtttatccatctctcacgcatagatttgtttctatttgaattgcaattctctctatgcccgactttcaatgagctgaaaccgcgctgtacactaaagagaaaaacatatttaatcatcctctccttcagcttctctaatctctctctcgagccgttccctctcagcctgcctcatcctcaacagtgtcgcattttcataatccacgcttccttttgcatcaggtggtgatattccagaagatggaatgaatgcttctgctggatcaaacccgaacgatggcattgtagatggtcgagcaggtgcaggcgcaggcgtataagcaaaagtggatggatatgtctgtcccagttcggttcgtggttccgcagacgactcgtccactaccttcagtctatcagtatcggttttgccattcgatgatgataacaaggatgaacctaaacgttcgacccaatccggctcttgaccaagaccccatttgatcttgatgccttccagtcttgccgtcctctttctcttaccgtcctccatcagcgcccaacagccagctaaattatccgacggaaacacaaccatcgctgtaacctgctccgacggttcggaagaagtaagtgttgctgatgatttggacgatttagatgatttcttggctattcttggaggacgaagaacgacattggcgagggaaccatacgattcagagagaaacgccgataaagcagaaggagagcttgttgatgatgcatattgtggaagtggaaacgtcagcgtgagagttcgctcaatctcatcgacttgttttcctcccctcgaagatgaatgagtgaaatccgctcttgattttcctttcgccctttcactttccctatcgagtcgcgttctttcagcctctgtctctcgtcggagccgaagagtgtcgtctagagctgctaatcgagctgcctctgctgcctctcggagttttcgaccttccgattggactgaggcttcctgagctttttgacgtgattgagcggcaagatctagacgggatcgtttgaaagcttcttctttggcgacaaggtcctgtacatcgggatgtatgctgccatcagtatcgcagctggatgatctgagcagctctaagggagagaaatcgcaagtgaagaacggacctggaccatgtttcttttacgagactcaagaccagccatcttctcggcccgtttacgggtagcctcaagcttaacatcgagtgcagctcgtttcggcccgtcgagaaggagtgcttgggcgagagaaagcaggtggaactgatgcgctacatatcgaaaaggatacatagatcgtcagacatgatatctataacggtattaagaaaatatatacacaccagcctctggattatcagggttctgacatcattccatgaccacacacatcgaccgtgaaggcgaaacagtcagattagcgaccacacatggttggaagtaaaggaaacgtaaagaggaatggaacccactctatcgggatggcatttcaaactcttttttctgtaggcggacttgatgtctttctctgtggctgtatgactaagttcgagttggacatatgggttgaggtttgcttcgtcgtccatgttgtcgagaggatgtgtactagccaatggtgttggttactgaggaggaatcgaaataaagattgtaatgtctaatcaagttctttaatcagcgattacaaaatatgtgtagtttccctgttgatctacctaacttgtcgttcacaccatgtcgtccatctcatctggcctgccatcaaccatgccatccacatattctcaagactctaaattaacaaggatcacatccaccgagagtgatcaaaccaacttttcctcagagttcacagatgctgtcagttgtcgtcttgatcagtgtcttgctcgagaaacccttctttcactgattccgaccgatccgttataacatgttcttccagcctatgctttatgatctggtccctccacctccgcctagcgcttcactgttatcaacatcaaggtctacgccgggtcatgtggaaatcagaattgtagataatactgtgaacgaacgactgcccttcgctcaatcagtgtctattccgtcgtataatatcgtcggacagactaagaacccagtacgaggaaagtcagggactgaatcacccgttggatcggcagaatgctgggtagtatacgagattgagatcagatcgattcgaggaggggttgtggttagagagtcaaaacgatattccgagttctgtgagctgagagaaagtctgaaacagcggttcccggtgagtttgatcatttacttgttaagaatgattcttactgaaacttgagattccatcgcttgatcgaaaatgatggattcagcatctgagagggacaatccccaagctaccctccaaatctcctcttcgttcgtgtctctcttaattcgtaccaatatgagctatcaagttgacctaatcatatttgttgacatcttcctactttgtagataagttcaaaccgtcattcttggagacgagacgtctgagattgcaagaatggctctcggttatccttcttcattccgtacgtgaaagttcttctcgtcctctaaacaatcctccgcgcgtctttgccctattaaacatgtcatttctttctctggacggagtaggaaatgggatcatcggatcttatcagagattggctcctatctacttgaactctcctggtctcagctcgacggagtgaagatgctaaacaggaaaatcttcgaacttctccatcgagacctttcacgaccttccctctccttcggaccttaacccgtcttcatcccgttcatcagccgttccaagcgaggtttcaatgttcgaccaggagatccaccttctatcggtaaaataaactctgcagtacttggcatcaagggaaagtctagacccagcgcccatcggcgtcacgattggtctggtccatctacaaataaaaggagagttgacaagcagagatgggccgaaggatttagaggggttttcgcgtagtcttgctgtattgcaggcatacaaaaccaaaagcagaacacagatgtgtgtatgttcgaagacggtgatagccagagagaggagagtcagagactggcgagggaacggtagttgatagattctaagaacgtatctgataaatggaagatagatgaatgtcttatcggtataataagactcaactaagaatgctcgatcagctccctctgcaaacgcattgacactctccattgttcttgcctatctacctgtgaaaacgaatagacacgctaacacaggctgtctacatttatgaattacgtaatattcagaaaaattgttttatcttttcagttttatattttctatctgaccgataaaatcagcaactcctcgaccttttgctctccaaccatcagcggataacatgtcctctagctctacacccgcacctaccgcctcatcgtcatcgtcggcgtctacagagactcttgctctcggacactcttccggaggacgagtctctggaaagttctggaaagctagtagggctcctactgtgtttgtcctcatacttccattccttcttccagtttagtatagttgaagtggcacatcgagctgactcttccttcttttctgttgtttgcttttcggaatatgaatacacatttttttaaatcaatgctactgctcgcttctatctggttaatcggtcaaactatccagtcgatcaatgatgcctgcaggcgtcaagtccgcttcatgggaggctagacaagaaaagcgaaagaaggacgaggcaatcaaattgttgcagaaccagttgaaggaggagcgagaggctgaggaggaaaggttcgttctcttgttctccatccttctatcctttgttctttctatcatgtgtgtctgtattatttcaactcaccctttatctctatataaacccaccttcggtcgaccaaaataggaaaagaaccgccatcaaggataggcgaactagactggaggagaagaagcgattggaggagatggcagccagaatgagtgctaagaagcttcagaggatgaagaaggttcgttcttgatgtctcatctatctgtcaagattcaaaggtctattcgatgctgacaggttttcattcccttttttgtgccgctatagagactcggccgatccaagaaggtcaatggttaaatcttcaaaatctcgatcctcaacgtctcttcttactcgttcttctctccagttccaagattcgccctatagcacatcacatatacatcttctttcttatcttcctttttttggtagcttcttgttcgtttttagacattcttgcatgtacatctactctttgccaatctaatggaatctcaacaccatccagcttaaactctttactcccttattcgttctttcagaataaggcaggaacaagtcagatgaaagggcacgttaattcatatcaaaaagataccaatattaacaatgtaagcatttccacgagcagaacgatcgcaatttccaaggatgggtggattgccgtatacattcgaagaagggaatgaatgagagaaagaacgtcaaaatgatgtgaacaaactcgaagaaacgagagcggggcacagaaccaattcgattagagctaaatgtatgtatcgatacacatgcacgagtcaaatatatagacggaagaaaacgagaagagacacaaagcgagcgcgaatgaaagagagttgtgggtcatggactgttctacgtccaagaaggagcaggggcactaatcggatatctgtttgatcccaaacaaccagaaaggtaagagactaatcagcaaacttttcaaaccagctgacgtggaatattaaaagcaaaaattccgagagcgcaccctttggtctctccatcaccttgtttgatttcgacccgaatatcaaaccggagtgaactatcttcatggatgtagtctactatcgtccagtctaatgatcccgcaaaaacgtataccataaaatacaaagaaagagaaaaaagttaaactcagagctggaagcctacacgtacaggaatgaaaggagcttgagacatacttcgcttagccatgatctgaggatgcttcatctttgactcatcagtgtccaactcgaagaggggaaccatagtctcgtcagtgttagcatctttgataggtgaaaacaaatgaaacagaatcaggaatagatcagtaactttagttttattgggtcagcaagaacggaaatggcagttactcacagtctatatatggattaacgatgataggaaggattccgttcgtttatttcaaaagccaggttttgtcactactttctttcttcctttcttcgagacgagcagagagaggaagagagaaattgttacgaacgcaaggtcttgtgtctcttgcctcccaacctggagatcatcgctccaaccatcgccggtggaggcgtgttcacaatggccgacgtgacgacctgcaacatccactttgggtcctgttcggccgggatcggatcatgcttatggtggggaaccgtatggaatgtcgtggctgacgcacaatggacgtctccagagacaaaactgattcgaagccgttgttcgactgagattcgttgacattgctcgaccagccaatttcgctcatgctttcgagctagagtatgtgtgcgcgcaagcgtcaggtcagttttcgagagagacaatgacgattatagggtaagaaggtagacgaagaaacgaacagctcgcggtccagtgatcgttgcaatcgtccaaaagctcggcttcctcattgaatctggttgattctcacatgagaatagagtcagtgatatgtgacaattttgcatatacaagcaagggctgtagcggtcgacgtacttgttgacaaatcctggaaccagtccaaccttactcaacttaacgagcgggttgagctttgactctaggactttttccacaaagttcattcgggctgtacacggccaatttagatcacgtaccaggttcaacgcacaatagaaatcagtatttttcaaatgcatatcttcacaaagaagcaaagcgaacgatatgaggaacatacgataagcgatagggattcctaattggaatacgaggtgctttacttggttcggaagctgcttgatcgcgttgaacactcggtcgtatgtaagcttactgcagactacgtctttctttcgctcagctctatatcgatcaatgtaagaacatgagacttctataagcaacgatggattcattcagacattgaggggaaattttatggagctgaacggaccggcaatccaagagaagcatgtaaacttcaggtcccaggtatattagcatcgaactagggaaaacaacaaaagatcattggcgacagcgcagagaaagagaaagaaatgatagactactaactggccaggagagggaatccaaggactgtgcaaaaagattggatatgaaaccatcaatacgagatcaaaccaacactttgcaagacttgtcttgtgtagatcgatagcaaagactcacccatctcctccgataatcatactcgccatcgtatgaggcttatctaatgacgtcccatcgaaatcgtctgatagatatgggtacgtaaaaagagataagatcagtctaatcgtatagagattttggggttgaagacacaaaatacgtaccgacgatgaaaagctggaaaagaaggtaccagaagtaccctctgcttccaatgtgtttgaacactggagcttgttgaagatcatccgggtatgatccgaaaccatcaatcctgtgagggtgacaagggcttatgagtaatttgaaagaaggcaagattaataagggtagaggtgactcacaggtcgtggtcgtcaagacactggtgatgatcaggcattgttatcgcgcatacatccaaagttgaacgaggattttagaattgactcagaagtgatagtgattgaatatgagctatgcaagacaaaggcactaacgttgaccctacaccattaaatcccataagaagaaataggcttgagtttctatataagaatcctgcaggcgatgaaacggagaaaaagacaaacattgggatactggcgttcgcaagtccaaacttgccggttcggaagatcttgcagtagtgcgagaaataataccgatcgatgcagaacatgatatcattcgagagagggaagtcctttctcttctcaggcgtgccacactcgagccaatctgaaatggggcaaagtcaaaggaatgaatggtttatgaaagaccatcgaaggacgatagagcaaaaatcaaacgaaccttgcatctcaggctcgaacatcaatgagtcgcctgattaatgtcgaagcagagaacaccactcattcagttagccacaagtgatttcaagattctaaaaggagggaagaaagacgacaaacgaacagtagatctgatcaccacctccaacctatgatagagagccaaggagtacaaatatgagcgtgatatctattcctactaaggaaagatacgaaccatgcagtgaatcggcttttccgcgtgtttttccaacatgtctgcccatagagggtcgtatccattgtcgaacttgtctggattaaagaactgattaacgattcaaccaagaggaaaggggtatcagccgtttagaagccaagctgacgaacacgatcggaagacgcaaaagacgactgacgtcttcagttttgacacctccagagaatccattgcagctgtgcgccgcccatctgagattctcccctagaccagggatccaaaagttgagttcgacacctccattgacacggtagtcgattctagtcgagaccgtttgggtgatcggaattcgaatttggaatcgggtgaatgtgaaggagccctgatgatgtaatttacattgatatgaaagaagacgatcaagttccgtccataacgatacaaggagacaagttggtcggaaacagtgaggaaagaatgaaaagtgcgaacctgaggaccgtgataaacaaagatattctctccgacgatctttcggtcttgccttccgttgctcccctggggagtagctgcatatccgtttccattgacatccaacttttccattcctgcgttcactccgtcaacacccgtctcgatactatgtccgttctgaccgtttccgctcgttgtctggctggatgtccaggacaggctgagggaaggcatcggttcgtaaactgaccctgcgtcagcagtgaccttggttacgtgagaagaatgaagcgcattcaggtgaacaaccatccaataagagacaccggataggctctagagaacaagcagacgtactatcatggcagctccatgccagatcgaatctttaactgtgtggtacgtcaacatctaagaatccaattgtcccgagcaagtgaatcaagcgttagcgctcagggtcagtctagacgaatagacacaaaggtatgaacagatgaggagagcatcgtaccggtccagccataaactgtaaatgaggactcattctctctcgcacagaatgatgtctatcgcccatgctaggcctcagtgtgttctttgagtcttctagcgaatcttcctttccagtctgagcatccagtttgggctgagcaaccgtaggtcccgcgtgagactgtacactctgagcctccgcgtggaggttggtcggaccagggatcgtctcggctggtctgtagacgagtagggttaagaaggatgaccaggttagaccttgagaatagcgggagaggcatctggacgaaacattactcacacccacacaggaggtcggtaggaatgaactgttggatattacaaggcacagccgtccgaaaacgaaacacacaattaagacgacgcgtctgtttcggggtatcgagaagaaagacgcgtagagagaccaagaagaagagaaggaaactgaacgcgtaccctcataaccgttggccgaaatctctggaatgacaaccgattccttgacatgagcaggagccaaggtactgtcctcggtgggtgttggctgataagcttcgttcaaaggatcgaccgtttcgactccgtgagattgggaggaactaggatgggcactattggagtatgttcataagtgaacgcgaaaattgtctccaagataaagcaagaatgtgtacgaactaataggcagcttgctgttggatgaatcgatcgagaaagaaggaaggaagaaggatcagctatcgaacgcacagcgtggcacacgcattgggagtgttcggacggaccctttcgtttcgccatttcgctcggattcctaaacaagctcaatggatggatgtaagcatcacgtgggttagcgcgacgaacaaatccacttaccaggatcgtccatgttaagatgtaagtgagtgtttggaagggaaattattcggatgccagacgatcattctcaaagtcttctcaaccttttttcgccaagagttttttttgctgctataattgcgcggtggatattctctatcaggctgtttgacttcattgatatagaaagctagtatacaacatccgtttcgttcttgtgcatctgcgctcctatgtttgcttgttcacacgcccacaactcatagaccagtccagacaatcgttctctctaactcagtcgttcccttcagcgtgggttttgtggagtttcctcccactctaatctcaaattctccttgttctgcggcccagtgatgtttctgatcgtcccaatatccaagcgcctccctctcgagcgtcaaagtgacctcgattgattgtccaggcttcagagagatttttgtaaatcccttgagttccttttccggtcgaggtagcgaactcttccggtcagacacgtacacctgagcgatttcgcgcatcgctacgttgccggcatttcgcacggtgaaggatacatcgaacgttccgtccgatccaatctttgacggaagagagagagagctgtactcggctgccgagtacgttagaccgtggccaaacgcgaagagtggctcaaacgatgggtgtcggtatccgacgtaaatcccctcgttgtaaatcactttgccgttctctccggggaacgagatgaacgaaggattgtccgatacattctttgggaaagacaaaggcaactttccgcagacatctctctttccaaacagcacgtccgccatcccatttccgagttcatttcctccgtagaacgcttgaagaaccgttgaggcatcgtcgatccatggcatttctacaggcgttccagattggttcacaatgatgacattcgggtttgcgtccaaaacggaacggaccaaatcgttcgttgcacctggcaagctaacaagatgacagaagacgagaagaggacgagcttctatgagccggagtgccatcagaaaaacttgccaaccaagtaggaaatgaggacccactccatgttggctcgatcgtagccctcgctttcccaatcctggttcaatccgataaccaacacgacggctaatcgaagggtcgagaacagaacagagataaaaggttgttagttcagcatgttcgacaaaatgaaaaaagcgacggaaacccaccatcaacatttctagcgacatcgacagcttcctgaatagcctccttctcctgaatagtcctccacgctccgactctcagtgcgcctctcgaaccaaagatctgcgttgagcgcaatggtttctcgttggttgatctcagctcgagcgagtattccttccctgacttcaacccaggaacgatggccttgacctcgatcgaaccttgattgaagaagtattcgcctgggacttgattgtgcgtattatcgaccacgagcttgccgtcgatatacagatcacctaattaatgcgacgacaatgattatccaagtttagccatgcccgttgatgcctctgaacaagccaacagcgaccctggtgacgaaagagagaaaagaacaaaccttgaccggcgatgactattccaaactcccaatcgccatcctcgtcaggaacgaaaatcccagagtatcgatgccagcagatcatgttcacgtcgtccactgatgatgccctcgcccacgcataagtttaagaagaacgggtattattcaaggtcagtaccaagcggtagaattagagcgtaagtgcgcacatatacggggactctaggaagaaatggaaaaccatcactcaccgatgttgtcaaagagcatcatcgttgatgtcgtggtagctaccgagtagacagcctcggtcttctgtttcccatctttgtcgaaaggctcgttccagaactcgactgattccagaccacaaggatgtcagacgagacgaggctttttcaacctgacgagatagctcagcgaatggaaagagaagggtattccaactgacttttcccgttcttgatatagttacttgccaggggcaaaaatcgatggctggatgctcctagagcataagggacttgatcctgaccaaggacctccttgacagcagatcgaataccgtcaaaaggcgtgacggtgtaagtagaaagcaattgcgcagaccctccgccggatgtgtaagctagtttgacgttaggaccgatgactccgattgatttgatagaccttgaggccaatttctctcttgttaacggaaggagagaatcctcgttcttgagaagcacaatggcatcggcagcggatcgtcggaggagctaaatatggcaagagagacaggaacgtatgtattaatagatctattcagcgttgagtacgttgagtacaatgtcgcaagctcatacatacatcccggagttcaggggtatccacagctttctcttttacgtcaaaagggatgccagaagtctaatggaatcagaagcaagaatcggtcaacgcgtgtacaacagccgtggtgagagagggtatagagaggacaaacctgagctttttggacaagttcaagaacctgttgttgattaggaaacaacaaagagaagagctcagtcagtttgacaattcagtcataggatagaagaggagaaagaaagacacgagcctttaggacacgagcgtccagatcttcgatagatagtttgcccgctgtgatcgccctctggacgacatctacgctcctcatcacgcccggtcctggcatctagaggcaaaacgacagcaagcactccatgttacacaagagtttggcgagatgaatatgtggcagttaaggagaaaatttgacttgaccaacctcaacgtcgagaccggccttgatagaggtatcggttgaatagaccccagtcctgcgattaaggaagaacgaaggatgagccaagtggagtaagcgaatggtgttcaaggtttggatcacacaagaatcgctgggatggcaaacccgactaagaagaaacttaccagtcactcataatcaaccctttgtatccccattcctgaaatggtgaacgtcagatcaccgaaggagaacaccaatatcaattcaagatagtagttaaggagagagaggagggaggggcgaactttccgtaggacattctctaaaagatcataatcttcagaaacatggattccgttcactcgattatacctacgtttaaaatcccctcataaacacatctcagttccggcctctgcgctccttttaggaagaaagaagactcacgaagtcatcacagcctggggatcactatccttgatggcaatctggaagggtttcagataaatctcccgaagagctcgctcggataagacgctgtcaatcgactgtctgtttattacaaataaaagggaagaagaagggaaagagtaaacaccacatttgcttagcgcgcggatagcaagtgagcaatgatatgaacggacctctctttctcttggtcgttgcagactatggattgaaaattagtttgtaccaaagcgagcgcccttcaatcagcttcgattattcgattgaaaggctcaaagagatgattgaaactaaccgaaatgtttgatagtagcaaccacgcccttttcctggactccattgatataagcagctgctatcgttccattcagataagggtcctaacaaagtgcaaatagccaaacgaagaaaggcacaccaatgaatggcctggctatatgttgatgcatacccattcgtctcgcggaaagaacctacctcagagaaggattcaaacccgcgacctcctagaggagatcgctgagtattcacagtgggtcctagaagtacatgggcgccttgaggaaacaacaggtaccatcacgaatgaacttctgttcgactatcctgactggatcagatcaagctggacaaacctttttctttgcactcggtacccagagctagaccaatctccctaacaaggtcgacgtcccaagaagatgcgactcctgtggagcaaggaaagcaagatgagagtgtaccgttgaagacttgagagcagaattgaacgggtgcagaatgatcagccgaatgacaacaaggatttggactcttgtaccgataaggattagcttggttgagctcacaattagttcctcgaacaccattcggtccatccgacatctaaccattgaaaccaagccatcacgtagagatagggcatatgatcagatcgagcgtcacctttcgtgctagtctcaatgaacaggatgagatggctttcatgtgaaactcactcgaactgcaggaattccaagtcggtcgatcttatatgtgtgccaggcgtcacttccagataagagcttgatctgaacgatcggaacggacagagagaggttttccaatcagtatgacacagtgcggttgtgcgcgagatggagcgaaagatgaagaataccttctcaagcatcgaaagcttcgaaagagtatcttcgatgaccagagctgatttcaagcagagagaaaaagtgaacaattcagcttgctatttctcttccggacagatgaacgatgagaagccaggctttgatgaatagagaatgaagacagaaaggaatacgtacacatcatgagcgcgtttcttgataactatcagacgatgaacagaataacacaatagagtcttgagagaaagttgatagggttgagagagatgggcttaacgatatatgtctctttcccaaacttctcatctctcttaaaagactaacgaattgacagaaaagcctcaagatgttgaggatttgatggaaagacgaaccggcgaattaattgctaaacagccggtcgggattttttcggcgaaactctgaccaagtgacctcatctattatgggcgcatatgtgtgtgttgtgtgtggacgatatgttatatctgacgactgagactcatcagaagtaacgggaatagactgctgatgatctcgtataggacgccagagctctggcaaggagaggatagagaaaatactccgggtgtttggtctagtctggaggagcgagaagattctcgtgttctcatccaaaatgatgcatatatatccaagagaaacaagtagaagcaaaaagatggagagtgggcaagatatttaggaacaaggagagaggaaagagaacgaaagaaatgtcccgtctacgagactagaggtatggcccgatacgaacagaatttgcaaggatataacgacgtcttcaagacgttcactccaggtccaggcctctcttgtttaattggagaggcttgtcttaaaggagcacagcactgaggagaaggagcgcagggacagcagcagctccagtggtcaaccggttggccccagaggtagcagatggaatggcagcagaggcggatgcagcaacagaggaagccgccttggagattgatgcagcagcagaagcaccagaggaagcagcagcggaagcagaggtagagccggcagcgacggcagcagaggtagaaccgacggcggcggcagaggtaactataagaatggagtagattccagatacagagatcaatttcaacccaaagagtaaaaaagttatcaagaataagagatgatattagactgaccagctgcaacggcagaggacacagcagtggaggcagcagcggcagaagatgcctgctgagtagcggatccgctagggctgggaaggtcctcagtggtggtagggaccgaggtgagtcctgcggcgaggcaactctgagccaaagtctaccgataagagatgaagagataagattatagccaaatcacaagtcattttcaatgcgcaatatgaatttcacggatgatgaacccaaagatcacaagggaaacccccggagaatggagaaagagactctcttacctcatactgggctagcgaaacagttccgttcacgccgttggcagcgctgcaacctgcacagttgagaacatcttgaagataggaggtggtgcacgtgcaggcctgatcggtagcatcacaaaccgtaaagccgcctgataattcattcgcaacataagtcacacagctctatttctctttcttgtcctttgacacggagataaccatttgaccggacgtacattcgaaagtgcagtcctagatgaaagagagggcgcgtggttgcgaagaggagttgtcagaacgatgacatatggaacacaaacaacattggttgatatagatgtaacatcagaacttacagcgagctcggtagggcaagctgttccgagtgcagcgagctgagtggcaatggcagtctcaccgtttgagttgaggcaggtagcgcaagaggacaagtcggatggcaagcctgtagtccaatcaaaatttgaagagcgtggaagttttcagagggagcaaaaggccagtgttcagtcgggataatccttgaaagaatctctgtatctgatgtttctcaatctcatctcgctcagagctttgaatatgatgtacgaaccgttgcagacacacgcaatggtctggttagtagcggcgtactatagaatgcaaacatcacatttggtcagctatcttgttgagaaaagctctctaggtgaacaagagaggaataacaagaaaaggataaacaaagaagggtggctgtacataccagagtaccacaagtctgaacgacggataagctattgcgatcaaagcagagtttttaaacatcgagctcagcattagttctcaagtaaaatgacatgtctcgctcttgactctagtacaaagacatccatacaccgaacgatcggcgaacactcacgtctggctacagtcggaagtgcacgcggcgggaagggtagtgccagcaggaatagagatcgactgagccttggcggtcaaggaaagagcgagggtgaacgcgacgaatacggaagttgaggagatcatcttggaaagtaaggagcgaaagaaacctaaacgaatgtgagtgagttagtgtataaagatggaaacttgaagattagtagtcaaaaacagaaggaaagagaaaaaatcagcccgaacaggaacaacaccaccggaggcattcgccacgtggtttcatatggttacgaatttgccaagagcttgtgattgtagttacggtggcaacatattgcccgctgactaatcaggcgcctctcggctttcctcttgccggtctcgtctttacctgccgactcgctttcccactgtcttcaacccaaatccatcgacacttgagtagtgaggatggcgacggtagctcctcccaaaccatgggagcaacctgcacaacaacagcaacagcaacagcaacaacaacaacaacagcaacagcaacagcaacaaccggcagcgtctatgtcgcctgaggtacctaatcggccagcagagatctcatcggcagacaccgtcggtaaggactttttccgttcttttgattattacaggccacaagtgctctgatttcatctcgtttcactgaatcctttccttccactcaacccagtctcactcaaccaaaattcggctctatctccctataatagaatgggccagactggatattcatcagcgtatgggcaatctggctacggtgcgttggctagctcatacgggggtatgtcttcgtacggaaacagttattcgtctcgtaagtgggactctgtttcctttgtatttcctcctgttcactactttggagctgaggtttgcaactgactaaactaatcacatcttatgacgacatttcattaagcctactcccggttcggtggaggatacggaaactcgtacggtggttcttatggtggctacggaggctatggaggtatgggaggcggttatggtggaatgaatggaatgggagcttacgggcagatggggatgccgggtcaagaagtaagcacgttgtacacatctgttccattcgattatctcacaacaagggaagaaaactcattcttgaaacatatatcctctttactgtcctctgtcacctccgactctatcaacgtagggtatgccagtttcattcacgtctcaactcgccatgcagacaactcccgcattctctatcctcgagggctttatcaccagtatcacctcacttgcccaactacttgaatcgacatacatggccacccactcttcattctttgccctcgccggtgtggccgaccaactcggctcggccaaattgtatctaggccaaattctcggagtatttagcgtcctccgctggggacgaggcatactcgactttttgaaacgtggaaagaaccgctcgttgtcagggctacccggttcattggaatggggtgaagagtttgcctcgctcgcacagatcggaccaccatcgggaagaagtagaccctccggtccgccaacgccgaagccgtcggctaaaccattggtgtttttccttttgaccgccattggtttaccattctttatgtcgaaactgattagccatctctcgaaagccctcccgccagggtctcatccaggaatgcatgggcaagatttatcagcggcagggagtgaaccgataccgacaagtctgacgttcgcgagagcgtctttcaagtttgaaccaaaagacgcgctcgagttggcgttggaacaaggagagattgtggccgtgttggacagactgaaaaagtcgccagcagaagggggaggtgaaggggattggtggagaggtcggacgagagatggaagggtcggttggtttccaaagacgtttgtcgttccgtgcgtatccgcttgctttcttaatcctctttcatcaatgttcttcgtaaatgacaaagtgcatagagttctatactgatcgatcaaccgtcttgtgttcaggttacctaaaccggaagattcgactgctcctccgagtataccggctgcaccttgaatgtgaaactatgtatctatgctatgtactttaatccgctcactttggcatccgtctctttcttcctcgttatgggagaaaggccgaacagataaagagcacataaacgtatctccgtcttacccaatgtaggtcttgacgtggttccccggcaggtagaaacgcatgcgtggacacagcatagtcaaatcacgtgatcgtttccgaaattctctggtctctactatgataaagacgctcacacattcacactctgaaagaaagcccaagaaacatcagacgtacatacatatataaatatacacgtacctacacgatcaatgtctctatcggacaaggtctctatgatggaaggatctccaacggatctgaattccgagatggatccttcggctttaccagcgaagacgtcaaaaccagctgatggccaagtagacgacgaagaggaagacgaggaggccgctggagaagaccgagggctcgactatcgactacttagcaagatcaacaagtttgtcattcttctctctctgtctcggcagttattttatggttaacttcacaactgaacttctgggtgtccatgctgattcgtttccctctggcctcgaaatggaacgaactttccccttgtgttttggaaatctgacaacgatcagaaagaatgagatctttattccgaagcgaggcgaaaaagatttcgaacctttagagttgggagtgaacgttcaggaaagggcgctcagggaatcgagaggagcgatgtttgccgctcttcgaggtgtgcgaggaggtacaaagtacgtgtaatcgctatactctttcttaacctgatccttctttatatatgctttctttcctgtgttaacctctgccataaccaccttctttgcttcctttttttttctctcttcttaagcaaaacaatctcccatgctcatctgtcgttgccgaccgcttcggaccctaagccattaccatacactatcctaatccgtggtaatcacttcaacactatcggccacacttatcgtcctccgaaagttccaggctctgaaatgaaacctccggcgcgaactgtactcttacctgaggaagctttgtacctgctcgagcgaggttcattattcatttggaggggtgatattccatcggatgcggaggagagagccaaggaacgtgatttagcgaaaggaaacggaattggtttggtagaagaggtctttacagagttgggagcgaggaggatgaccgttcaggaaggttgggctctttggggtcaagacgtcacggaaggacggtacaatgtatgtagtcttctatttgttcctttctctttcctccaactttcttttgttttcccttctttcgagggcaggaaagagtctcactatgtttactcttgcctgagacttaggtgtacgcaagtttaaaacgactaggttatgtggttcatcgagcacctcaacatatgccttcccacctacttcctccaccagcatatgttccaccggtggttcctccgagtctagctcgtcaagcattccaccaagttggtttgggtctttctttcgttcggtcgacagcatggtcggtgtggaatcaactgggcagatcatggactgcattctggacgaggatcgataggttgaggcataagagattggagggagaggacaggtggaagccattaatcgaacagcgatcgacctgccagtttgagttttactgtgagtaattcgtctgtttgagttcgatagaagcgcgcgcgcgcgcgctgggcagcgtaactggagactgaattttgaccttccatccatcgtcctttcctcttttctctccctactaaacactcgtctggtaccttctacagccgatgtgttctctcatctccggattttctcggctcctcgggaacaaagagcggttacacaaggaggaaaccctgtagagtcgacaactgatcttggactaaaagaaccgaatccgtacgacgtgtattatcatgtatggaaaccgtcggggcaatacaagaaacgagagcctggggaaccagatttcaagattggagtaattgagtacgttatttatattctatttcattttgaaggttcgatctatgcatcatgtgaacgcccaggaggctaactcaaagttgttattctttatgactctttctcggcaaaacagtgctcagacgcttcctctaccttcacacaatgcgttccaagaaatcttttcgaccctgcctctactcggtcctccgaaacttcggtatccgcctcgaaaccctcgtcctattcctgctagcagcgagttgataaaagaaccgacgttcctctcgagacttgcaatctctctcggactgttgaagcctgttcgaacggagaccaaggcgagagggatgttgacgaacgctttcccttcgctcaagcagggcgataaggcgttcgtgttggctgttgtcgatggtggagggagtatcagctggctgaagtttgggcgaggcgtgtttggagattggacgatgcagtgatgcaatgatttctatgttacttcttggtgatagaaagatcgagatggtcatcgatttctatttctccagctctctctgctgctaatatcattattctccggggaaacactcgagcaagcagacagggtccgaagcacaggtcaagatgactgaagattcgcactctggctctctttgtctgggaggtctgtattgataccatgcttaagcttaatagtcccattccagtgcatgccgatcaatcttgctgatggtgtgatgaccatgaacggagatgtacgtatgttttagaaacagcgagatttgtccaccttatccgatgaccaggtggcttccttgcgttctctgctcggcggtgtctcggtccaacatgggctaagcagccagctccggcaattcgggccgggcgggccgagaagttgccttggctgatatccaaagagttttcccgagcatcgactttcttacaactaatgagagacctggttaaatggtttgttagaagtggtctagtgatctaggtttgagcgtttgtatgtctgtatatctgtactgaatgcgtttctgacgagtcgatgagtgtgtccaagcagatgagagacggagagaataggagaaatccgggacaaaaaccttctgatgccatcggacgtcaacatacatcaacgctgactgaacccagaatatactgattgaccgcaaagtcgactctcatccgcggagacttgcacagatgcatatacaagacactcagaaacgtatagaagtccgagagattgcacgttgctgacatatagatacatctgtgggatttagacatgtgttgtgcttgctcaccgtccatacttctgtttcacggtgtcggtctatctcgctttacctttgttgctttagatctatttctccgtgtctcctttctcgcctcgctccgaaaccttcggtcgagcggcctttctcgctaaacagaacctcccttctcgggaaaatactgaaaactcaaagctaatcctggtataagaacgtatggccatctttcggtccatcgacttctttctgtgtgtttgtactctcgtgtctcttttcgcacaacaagtcaggttatcgaatagaacccactttcactttttacaccaggtcgcttgattgctcatcatcaccaacgccgtcgtcgccgatctccccacaacgcttaaacctacatcggatcgcttgatatgtctcccacagccgcagccggtgcgacctccggagggaccttccctccagaagttgaggtgcgatctctctcgcacgctcttaaacatgttcgcgtcaactgaccaatgtcttcctttgcttgctctcgaccgatgatatttcttgcgccaatagccctacatctaccgaaaaagttggtggtcgcatcctggtatgtgtgatcatgtctgtgtttcatgttgatgcttagtctggaaacgacgctgatacattcgatctcttcttctccttctatttgtctcatcaggaattcgatcgatcaatttgcttcttctggttgctctcattacctcttcaacaaagtaagtcccaatagtttaccttcagagcttcgtctcggtcattatagttagacctaatcgttcggttctatcggttctttccctgcacccttctcttgtcccattccgtagcggttacgatggttcgatgatgaacggattgcaagtgttggataactggaagaacaaatttaataagtgagttcttccgcaagcagctatgtcgctgatcctgaaatagtacgaatgataattatacatttttttcttggttggaacctgtagcccacaaggaggaactttaggtttattgaacgctgtacagaacataggatccatcgttggtctccccatcgctccatatgtggtaggtcatattttgcctctcgcctgtctgtttgatatctaatagaatactgtctgaccctctaccctcgtttctcgcttcgttttctcttccctttttttcctatgtccgtagactgatctcttgggaaggcgagctggtatctttgtcggatgtaagttggcctcatctgatcaaccgcttcatctacatcacttctaagctgataactttatgttctcctttcttctcttatctgcagctatcattatgctggtcggagtgtacgtttaatagtcacaagaataagttctcgaccctcgtgcatccagcggttctaacttgcattttctgcccgtccttacagtgctatgcaggcttctagtgtaagtctttttaggtagctcatttaatgaggaatagagaatcagtctgatataaatgccatcttcatttattgtcaaatcatcatacagaacgtactcgctgtattcatcgcctctagagggttgatcggcttcggattgactttcgcgaccaacgctgctcctattctcatcacgggttcgtcttgtctctttctctacgttttcccattcttcttcattgccgtcggcacatgtattcctaacccgaagttgatctttgtcctttatctagagcttgcctatccgacacagagggcggctatgacatctctttacaactcgctttggtactctggtagtatcgtggcagcctggttcgttccctgactctcatcacacaccatgcgcacgtcgcagtcgctcacactgtctggctctgtttctgtctcttcgctccccttccctttctcctctcttccctttctcctttcttcccttcctccttctcgtcccctcaacccgatacaggacgacgttcggaacgttccggatcaacaactcgatgtcctggcggatcccctccatccttcaagccacgccttccgtcatccaggtctgcctgatctactttgttcccgagagtccccgatggctcgtctcgaaaggtcgacacgccgacgctcagcgggtcttggctcggtaccataccgacaacaacaacgagcaggacccgctggtcgagttcgagatggccgagatcacgcagtctctggagctcgagaagcagaacagcacgagctgggcaagcttgaccgccaccaagggcaaccgaaagcggctccggatcgttgtgcgtcacgtttttttatcgaatgtcttcttctctttatctctgtttggcactcatccttgcttgagcacatacacacacacagattgccatcgcattcttctcccagtggagtggaaacggtttggtcagttactatttgaccaaggtcctcgatggggtcggtatcacttctgagaacattcaggccctctacaacggaatccttcaactctttaactttgctgtcgccgtcggcgctgccttctacgtcgacaaactcggtcgaaggacgttgttcttgacgtctaccgccggaatgtttgtcacctggatttgctggacggcatgcgaaggtgttgtcggaagcaacatcaacaatcggtctgccgcctatgccatcctcgcgttcatctacatctactactttttctacgatatcgcctactctcccctcttggtggcttacactgtggagatcactcctttcaagatgcgcgcaaagatgctgaccatcatgcagctctcggtttcatcctcccttgtcttcaatcaatatgtgaacccgatcgctctggaaaagattggatggaagtattacatcgtctatctcgtttggctcgctttcgagttggtgtttgtctactttttccttgtggaaactaagaaccgaacgctcgaggagaccagcatgttgttcgatggagaaggtgcgtcttctcttttcttctcttttctcctttcttgcgaaagataacaaaagactgatcatcattttcgcgcgttttgtatatggtacatacctcgttcagacgctgtcgaagacatcaccaaagctgccaacacaatggtcaacgatcgtaccaacttcaaccattcgagctcgatcgaaaagaaggatgagtctgagatcgagcattacgaacgggtgtagacagcattcttttccgacgtcttcagctttttgtcttgtttcttttctttcctcctttgtccttctcttcttctctccttccctttatgtatatcctctcttcggtcctttcggctttctttagtctcccggttgtaacgatttcgccaatacctctcagagctcgatccgctgccacttgtattttctccatccctctgactactacccctggttctatgttcttgtactgtgacgtttcttttattgttgtattcatcttgttgcctctggcgctctttaaacgtgataacatgagcgtttcttctatcgttggttcttcgtccttttattattattttcttccttcctcttgagtaaaggaagcgaatcaggtaggattcactcgaatcgatagatgcatcttttgagcctcatctaagctgaacgtcctatatgagaacggacggaatgggtatgttctatgacatcgcttgtacgctgactcggtcacggccttttcctctttctgcccgaggtcagaccagttttgttatccaaatgatctccaaacggatgtgtatggtcatagcggcagggttctatttcctgatgtggaaactgcttttcgtgaatttctgtatgatgtctttctcttcttttcgggggggattcttctttcctgttccttccagactgaatcagttgagattccttctccctcttggatctttccgactgtatcctctgatatatgttgtgccaacttgtcaagagataaaccccgatatagaaaaaggaaagaggatgaactgaaaacccaacgaattggaaatgggaaaaaaaccatcaatcttgtagcaccgaccgaccacctatctaagcctcaatggcctggatggtagcaggggtctccttcctggcggtagcgacggtcgactttccggccttggcgacctcgacgtccggggtggcaaggacgacctcgatgtggcaggggtgtcccttgtaggggttgattcgaccgtgagctcggaaagttcgtcggtgagtcttgggggcctgctggacaacgatgttcttgatgacaagctcctcggcagagatctccttggcctcggcgttggactcggcgttcttgagcaatcggaggatgaatcggacggacttctcgggccatcgacctgacaattgatgaaagggggggaggaaaagaaggaagacatgataaacaccttttcaaagagagaaagaaaaaagaggatcgaaagacctatcacgtacccttggtggttccgaactgcttagcctgggaagctcggccgatacctccggcgtatcgtcggaaggggatgacctgcttgtgctcctgaacatcggcaaggtaggtgtaagccttggtgagcttcatacctaaattcgtttaaagagcatgacgataggtgttagttcaactttcgcgaccatcacataattttcttttctctaagaagatttcgagagaaggaaagaaaaaaaaactaaccgctgagaacagcggcgacctctcgcatgttcttgaagtgagttcggaggtactctccccgagacttggaggtcttctcggggttggcggcaacaagggcggaggcgtatcggaccatctgaagagttcgtattgacgcacatacaagggagagaataaaaaaggcaaaagcagtcagcattgttgattttcggacggatcaggttgatcaatcaattaggtaaaaaaatgtgcgtgtttctgaaattgctggaaagagatgaatatacgatgtttggaagggtctttgagtactgagttctctgtgagtttttcgtaggaagaagagggaagaacgttgatggttgccggaaatggtttggatgagtgcaaaagttgaatggttgagaatgagagattctgtttgaaggtgaaggatttttttttgggtcgaaagctagggaagagtctatcgcttggccggccggtattcttcctctacaagacacatgctctccctgttttcttcctctatgctggtggttgctccagtaaaccctccagagacaaactgttctggcatgcctgcaagccagatctctcgacagtcaccgagctgctctccatccgagctttcgaacactctctcgctgggcggaaattgaaccctcctcataccgaccgaccaactgattgacccgggaagtctgtacaatcagcagttcttctgtctttggaagaggaaggaaaccgtccagcgagtagaggtccatgtcgattttctgcttttctttttcctcgtgacacacactcgtccgtccatccacccatccccggccggcggaacgcgagttgatttgtcggagaaattttcgagaaaaaacccaagagagaaagtcgaaaagaaagatatcggtgtgtgcgtgtgtcgatgctgaatctgctgtatatgaccccgctgtacgttctatcgttcttctcgataccacaaaggagagaccaaaaagattcaccttgatgacttgattgctggattacgagtctcagtagcttcttcgtcctttctcgatcaagacacccaaagcgtttagaatctgcaggcagggcggggaccgtgcgcgtaaccacgcggatgaattctgacttttccaaaggtcatatgttacgatatgtggccgtaaccacatgacacgcgtcgcgtcgcgtgtccgtctcgcgcgtcgcgtctctgttggccggtgcgggcttgtgtgcgcatgggttcgtcgttcgagagagagagagagagagagtggtcctgctcggcgtacatcgatatcatgatggctcacatatatatatatatatcacactcggaaagaagattacaaggttttggttctgtctctcttgattctttcctcctcctccttcttcttctccttcttcttctcttttgtcctcttctttcctccactttagaaccacaaactcttgatgcctcctcggatggcgttccacccggtggtacctacaaatgcggcgttgtcgatctttgtctgcaattcatagtagttctcgagtcgacgtttgagaaagtcgcgcgttgacggcatcgacggttcgttcaacggaagcgagagctggtgaagctcagtggagaggtacaagagtgagagtggtaatgactcgtgcaagttctgaacagcgttatggagagatcgcgagatcgcgagattgacagagatacaacgttaatagagtcctgaagctgacgcatacatattttccagagaaagacattggatcgggaacgtacagcacgcgaagaagacgaaagggagagcgccgagtctgcaatgtgaagtgctaagatgaaaacaaagttggacaaaaggactagttgattagacgctcgagtcttcagagcgatacctccaagatcctactagtacgtacagtgattcaggacagggaatggagtcttgatcccgacattggccaccggaatatgcgtagccgtgatcgagaagagcgcgaacgcctggacgcggtgacagaagagaccgagccgagcgataggagagacatgatcaacatgaaattccataagctctcacacccacagcctcaacacaaggaaagtacaaaagaaacatggacaagacttacatcagctagccaaggtctaacgtcttcgttcatctctaaccgtcgttccaacacctgttccaacgaaggtcttccctccttttctttaccaacgtctttcatctcaacctccaatttccgtctcctctcagccaaccattctctgacgagcgctctctccggctccctacctttcccaaacaaggcgacgatcccggccgcaggcaaaggagccgaataatggtaaggtgcaggaagagagagcgaggctaaggagagggcgtgtgaggaaaacccatgggatggtatgtgaggaagagcgtaagagagaagaagaggtcggattgatgcgtgagctgccattgaacaagagttgaaggacgatctggatatctatgtctttaagcgagagtgttccaacacgaacagaacagaacgaaacggaacgaaagagaaagatcgaggtgatctgaaatgtcaccttgaaagttccggctgagatcggttagggttaagtgtcatgataaagctgaccgcgtatttcgtggtaaattattaacgcgcgatctgctttaataacggaaaaaacaaatcaagacgcgttcgaatctgcagcatcattgaccagcaacatcattcaaactgtcgttccgacgattcaagcacaggtacacacacacacatacacacacaaacacgcgaacggaagaacagagcagaatagaatagaatagaacagaacagcttagggattatatatcgctcctacactcggacttcaattcaacacagacagcatggacgtcgaatactcggcctctgaatcaaacggactttcctcgttcgcaacccaactccaacagtcccttcctctaacgatcgacgacggtgatgagaacacttacccagcagggccttcccaatcgataaaactggtcaaccattcaagacagttctcctcagctggtatgaccaatggaaacaccaatgggatggtcgaggtggacgaggacgaggatgaaggcgaaaacgaagaggtcgaaaggtcggtggtgtgggacaacgagttatcgagtgaaggttctgattacgattcggatgacgacgacgacgatgatgataatggggatggagaggccgtgttgagcacactgcatagtcagtttctctctttccttctttcctcttttctttcttgttccccctttcagtcttaattccgtcaatcaagattcatactcatacatttgtcaaaaaacaaaacaaaacaaaacaaaaacgcaaccacctagtcgaggttcgattgaatccatactcaacgttacgtcatgaccatctccgacatatcgtcgagacgtacatccgagagaacttttcgaaaatcgctgtggacggagtagaagttgacggatggcgacaggttcggatactcgaggaacactgcgagagcatcaaagcgactgaatgtggtatgcgtttctctcttttctctctctggacgcgctcacactctcgcgatcgtgatgcttcctaacgggttgctatgagaactgactcctgccgaatggcgcccacatatatacacaggtctcgacattccgttccctccactatcatcccttcagctccaaacacacctgtaccaaccgtccggatcgaactcacttcaagagttctcagccaatctagattcagacgacgaagatggagatgacaaggccgggatcatggctgctagtgtgagggagttgcctagtggcgaacttgacggtatttgggatacgttcgtcctgtctcgcgctgttctgtctagatttccttgtgtgtatgtgtgtgtgtgtgtgcgcgcgcacacacacgcgacaggcgcatacactgacaggaattttcactctttctttcctctaatactgccgtcaaatattctcccaccatacacacataacctagcctgatctatggagaagacatcaagaacaaactactgaactacatatatacaacgcttcttttctcggatgcgaacgtcgactttaacgtcgtcacctggaaccggtgcgttttcttccttgaggaacgagggaggagagatacataaagccgaggatccacgtagttcaggtcgctgatcacggtgttttcactcatcttagtgtggtccttcttcacggacctccaggaacaggaaagacatcgttatgtcgggcactcgctcagaagttggcgatccgattatccagccggtatgtcctctacgaccgtctagatcctttttcgtttctggctcggaaatagacgcatatatggatgtttgttggaaagaaaggtctaaccgagtcggaataattctgcttcgcttctagatattctcatggcaagcttgtcgagataaattcacattccctattttccaaatggttctctgaatctggaaaactcattcaaaaactgttctcgacagtgacagagatggtggaggatgagagtggatttgttgttgtcttgatcggtaggtcccgtgttcgcccctgcatatcttttctctctctctctctctctttcttcgtgtcttctcttccttgagcgggcaggaacataactaattggtgttgatacactttggaaattgatacacatcacagacgaggttgagtcactgacgaacgctcggtctagctcgagcggatccgaaccgtctgatgcgatgcgtgtatgcgcccctctatcctcctccccctctgttctcttcatcctctttcaaaagtatctgatgttgacatctggttcatgattgtgtgcgtgtgtgtgtctatgcgcttgtgaaaaaaaaaccaaacaaaacgaaacaaaaaccacccgaacaataatagggggtcaatgcgttactcactcagctggataagttgaagcatcggaagaacgtattggtgttgacgacatcgaatatcagtcatgccatcggtacgtatccattctgattttcttttacctgtagggcgatataaatagaacgaagcaggaaaggaatagatactgacgagtcatcagatctctttgaaaacttcaaaaatctatagactcggcatttgtggacagagcagatatcaagcagtatattggccttccacctcaacaggcggtctattggatactgtgtggttgtttgaatgagttgatgaagagtcgaatcattcaggaggtggtacgtcttgtgatctatccatctatctgtctttccgtccgtcctgcgcgttggctcagtttactgaaaatcgcgaaggaaccctgtggctacacatatacatacacaggacttgctagattggaagacggcagagttactttcaaacgccggtgtactgggcaatcagaaggaccgggctagaagattaagtctgaggttgttcaagcttgcgggaagatgcgaagggatgtctgggcggacgctccggcggttgcctgtgttagcgcatgcgaggcatcttgcttcaagcgtcttgccgagcgaggaaggcgccggcggtaacggagggagggctaccaagctttccgtctggatcaaggcgatggagaaagtggtgagggaggaaaacctggcgatcaagactgtcaagcttggcggaacgacgttattgtaaagttggttgcgtgcgcctgtccgtgccaaggaagggcgggtacttctagatagaaagagaaagagaaagagaaagagaaagagaaagcgaaagagaaagagaaagagagatctagaattggatcggatctgatcctctttccttctcgataagattgatgcgatctgtggcttatctgatgcgagcgatttttttcgagtcaacacggcgcttacagatatgaagacgagtgatattgtgtggtttcgtcgtccgatgtcgacgatcaagatggacgatgagccatcatgcgttctgtcgccggaccctactcgagcgctcgatgaacgacagacatcacattcctctgactcctcaggcttctagagagaaggaagcgaggagaccggaggaagagaacgatcgggaggatttctcaatttttattttattctctattcctttgtttatcctctccatcctcttctagctttaccgccaggtaaacgaaagcagttgatcccataggaatccacagacgggaactgaatccatcaaacgtgctgcctctcacttcctggaacgggccagttaatataacactctccaatattgcgacttgctctcgcgagcagagagtgaacgtggcaggtgcacagggtatgtcgtttgatatgatcacttatctgcggctctcaaacggtagaaacactgtttgtaccgactgcggacggagaaagtgtccgtcataagaaaccgaaattgcgacattcttcgtcagcccaaaaaaatccgagcacgtcttttttgtgtatctcaccgtccccaccattctggcctgttcttcatccttctttgggctctttctgccgtctccacagatgatgagatcgatagatgatcgactgacgcctttctttcccttttttttggctcttggactgatgctgatgtaaatgtttgagctgaccgagatcctataaggcatcgtcatctaaccatagttcctctcttctctctctctctctttcctttcgttcactacaccacttacctctctgtctctatcagtggctcctttctttagtcatacccagacgtccttcattgtagtcgtcgtcgccgccgccgttgccgctgctgccttctcctgttctcctgtcctcccgtcctcccactcaccacttcactcgttctcacactccgatcgtcatgtcgggcactaacgacaacaaggttgtctactacgcaaagcgaatcatcggctatgaagaagacgcaccaggaacggcgtcaagcaaagattacctcgggcaactaggaagcaatcctaagggcaaggtacgttcttttcttcttccgctcgagaaatcctttgctcggtgctcaccagacatgtgtcaaccctcaccgctctacaggcccttgaatacttcaagtctctcttcccgttcctccaatggctacccaactacaatttgcaatggcttgtcggtgatctgatcgccggtatcaccgtcggtctcgtcctcgttccccagtccatgtcctacgccaagcttgccaaccttagtcccgaatacggtctctactcttccttcgtcggtgtcttcgtctacgcgttctttgccacctcgaaagatgtctcgatcggtccggtcgctgtcatgtctctcgagaccggaagaatcgtcgccgaggtcttggcctctcatcctggtaagtgggccgcagaggatatcgctacctgtctcgcctttgtctggttagtctttcacttgtggcgcgcacctctctttgtctctggacgttgttcctgaacccttgtttccgttctatttcttcacagtggttttatcgttcttggcattggacttcttcgtctcggatggatcgtcgagttcatccctgttcctgctgttgccggattcatgactggaagtgctatcgttcgtcccttttccttgtttccagccgttctctatgctcgctatgcccactcttgctgatttacttgatctttaaactctcttgcctatagaacatcgtctctggccaggttcccggtctgttcggaatctcgtctttgttcaacacgaaagctgcgacctacctcgtaatcatcaacaccttcaaattcttgcacaaagccacgcttgacgccgcattgggagtacccgccttggtcggactgtatgcgatgaagtggacctgcaactatgctgagaagaggtacccccgataccgacgagtggcattcttcgtgtccgtcacccgaaacgctctcatcgttgtcatcttcaccattaccgcatggcaggtcgtcaagcacaagcacaaaggagctgccaacccggtttctgtgctgaagactgttccctctggcttcaagcatgtcggtgcgcctctcatctctagcgagctgatctctgctttcgctggaaagctcccggtcgcgactgtcattcttctcctcgagcacatcgcgatctcaaagtctttcggtcgaatcaacaactacaagattaaccccaaccaggagctcatcgccatcggagtgaccaacaccgtcggtacactcttcaacgcttatcctgccaccggttccttctcccgatctgccctcaagtccaagtccggagtccgaacacccgctgccggttgggccaccggtgtcatcgtcatcatcgccctgtatgccttgaccgatgcgttctactacatccctaacgccgccttgtctgccatcattatccacgccgtcgccgatctggttgtgtctcccaagggagcctacgctttctggaaggtctcgcccttcgagttcttcatctggctcgcttccgtgttggtctctgtctttgcaacgattgagattggaatttatacctcgctcgcctcctcgctcgtcctcctcctcttccgaatcgctcgaccgggaggacacttccttggccgagtccgagttggagttgattccaaatctgatggaggtgagaccggatcgatccacagagaatacagggatgtattcgtgccattcagtgggcagaagaaaggagtgaccaaccctcagatcaaggtcgagcagcccccgccaggagtcgtcatttaccgattcgaggagtccttcatctacccgaacgcttccttccacaacagtgcactagtcgactatatcaagactcacacccgacgaggacgaagcgaagtcgcaatcaagctcggtgatcgaccctggaacgactccgggccaaaccgatggtccaagaaggcaaaggcaaaggccgctgtttctatcgaggatgacgagcgtgatggcaagtacttgattcgagctatcgtgttggacttccaggctgtcgcaaacttggataccactggtgttcagaacttggtggacaccaagaaggagattgagcgatacgcgaacgcaccggtctctttccacttcagtggaatcgtctctccttgggtccagcgagcgctcgtcgcaggaggtttcggaatcggaacccaaactggtcccgcccctgcccatgtcgctaccgtcgttccccagttctcggacaacctccgatccgtccaggatgatcccgagggtcagatcacgctcgccaggaacaccaccgtgaccgggcatcagcgacgacgagaagaatacgcggaagagaagctcaaggctgagtcgctggacggacagtccgaggtgtttgagcccctgatcagctcgaagactccttacttccactttgatctagaggaggccgtccgagctgctacggctgatgctcgaagggaacgaccggtgtccgaggattttgacgtctcgttctctgctcactaaatcgaacgagtctttgtttctttcttcacgatctctctctctctatcttgagacttgcactttattgcttcatgtccctcctccaaaaaatcagtattcactcttgtccctgcttgctgcttcccagtttcccgtttctgtacatcactggcattgttttaatctcttctccaaaaaaaaaaacacactctatctttctctcttctccggtctcataatgacgtctattttcttgcctagacgtatggtgtgaaaacatttggtccttgctcctcttagttgtaaattcttccttttcttattcgcttctatcttctctccctcgagggaaaaaaccccacaaataatcttattgcattatgacgattataaccaagaacgttttctcttacatcacaaccgtacacacagaagcagaaggaaaagaaatagacgagaaacagtagcgacaattaaaaaggagaaaacaaaacaaaacaaaacaaaacaaaacggaacaggagtttcttttctatctcaataaaagatggaatcggcaacgaaccgctccatctgtctccagtccgctcggtcctttcctccagcccaaaggtaaccatctaatccggtatccgatagactggctctcatccattcgtattcttttccttcgtccctctccagaccattttctcggacgaggtccacacacgcctggagagcgtggacggaggatgagcggaggatcgtagcttgctctgtcgaaagttccggtccacctttcggactaggaccagaaccacgacctttctcgtccgacgatgaagccggcgcagggacgaaaggtctcaagagtgggttcgtcgacgccggttccagttttgggaattgcccaaggatcgatgaagacactgggagttcgactaggttcaggtagaccgacaaggaaggaatgacgttatcggcaaacgtaggtaggaacgttgtcgtgtttttggggagctcgggaaacgggttcgtcgggtcggttgtaaaccggagggagatggtgtggaggaggaagagagccttcttgaacaagtacacggctgcagtgggagaaacaacaggcaattaacatgggaacaagcactcatcggtctctgcaaataaaaggtggaacggagatgaagaaggaaaagactactcacgctgatcgtcgatcatgtacatatctctaaacgctgggaacgtttccaccaaccctccgatcaatcgatccgatacttcctcgtccttatccaatccttcggccttggcatctttcagcaagctcactatgaattcacctagactgccaaacccctgatcgagcaagatcgatcctgtctgagtcatcacgccatgaaccatgaggacaaactctcggagccttccaccgggttcaccaacgacgattcctggtagcgtcggatgaggcttctcgaccatcatcggtagtccacccatcaagcttgccacctcgttctcggtcagccgtttcattccctgtgcggacagatggtccgattcggtaagaaaacaggagagaacaaagaatcggatggtgtcgaagacccctcgtttgtagaacgcatggagtggggcacggaaggaagatccaaagtttaggagcgcgaggacggcgaggaggttgagctcttcaagaggtgaggagaacgagagtgggagtgaatgtccatggtcctgggagagtcggtcatagtctgcctgagaaattgatttgaggaaaggttcgattgttgaacgatcgatctatgtgtatgtgtgtgttgattcaaggaaagaaagaagatgattctgcaagtgagtagatggacgagcaagacagatctaaggatcgatgacccagccacacttaccttgatattctgggcggctaccagccttccagcagaccccctcactgacgagatgaacgttccctttgccggcaacggaggcgcgatggtgtgtgtgctcatggtgatgactcgatggacgttgagaagagaaagagatgcgaaggcgaaggaaactaaaaagccgaaggtcacgtgacttcggcgttgtccgattccttctctccatccttcggctctcttacatcctttcctttccattcctttgctttcctttctatccattctcttctctcctatctccatccacctgaacataaaccatcatgggcaccccgacggatgtccttcctgctaataatcatacgccgaatctcagaaaacctcttttgagagacaagttgtctatgcaatggcacaaggtctgcatccaaatcatcctcatcgttctgggtctaatcgctaaacatacctactttctcatcttcttgtttctggttctacctcgtctctagctcgacgctgttaggttcgggctactacggaaagccattgttgttctcacttttggattcttggcgggatcactgtctagatgggtcaatcagtcaatcccgccatcagcaactcattggacaccaatcctggaaataatcttgatcaattatgccatcgtccttatttgcgtctctcaacatgtcccttccattgagcacaacacgatagatcacaaggaagaggtcccagaagatacgctcccaagatcatggcataaggtccgtattcatatgactccctagatgtaaaggatcgaaaggctaaacgcgcccattcgccctacgatctcttcatctgatcgtaatctactcacagcctagtgctgcccagagtagattgttgtggtcagcattgctctggataacgttctattactggaagctcagagctccgccagtttcttcatcgttctccatcgatgctgctccccctctgatcagctcggccacgttccatcaacgacagctcactctggctcgaacgctgtacgcccaaaacatctcggcctatatatcggaaccatccccaaactcggcctattattacaacatctctgccgctgactggcatctatccgaacgatcgttcatctttgttctcactccagaggtcacgaccgagggttcaacgcgagctcgagtccgggtggttgtgccttcgttcgaagagacccgggcaaagacacagttaaatattgcggttcggtcggacggcatagagtatcttccttgggaagaaagtgaaagcccgtacgagtctctgaaagatctggctccgtctaaagctgaacaccgatcgacggtcctggtggatgagaatgccagagtgctagtagcaagtgagatccaagctgctttgggagacggggtagacgtccgagctagtacacgtgagatccgggagctgagggaacggaagacagaggaagagctggcgttgctgaagtatgtgaacgaggtaagatacttgtgtttgcccttttcgtttatctctaagttctaccgcttatctctctctctctttgcttatggacttgacagatgacactacacgctatccggcttctccgtcccaaactccatctgggaatcacagagacggaggcacaggcactcctcgtcaaggtgtacgactcgataggcttcaaagtcaaaagtagtctgctcctgtttggtcgtgcgtctgtttccttgtgttgcgttccggttatagtctaaatcaatcattcgtttgctttccaaagccaacgctgcgctgccccatgggtcctctgccgacagagtgctgcagaaggaagatcttgtgttggttgacactggcgcgagttatgggggatacgtagcagacatcactcggacgtttgcgctctcgaacagcgagatccccaaggaacatctgtatgtctttttacttggctatctatggtcgtggcctgtgagcaggctttgtgttcgtgtctcggatgttgacacccgtttgggatctataaagcgagatttgggatctcgtccgtcgagctcaacaagcagcctacgatcgggtgactctaggtgtgagagcatcagacatcgaccttgctgcccggcaggtgatcgccgaggacggtttggccgacaagtttacccatcgactaggacacggtttgtgtctttttcttccttctcttcttgtccacgcgctgtgactggatagctcatgcatgtgctttctcccggcacctggcgtgtcacgaatatatatatatatatctatacgtacacatagggatcggactcgaaggccacgaggcgccctatcttcacgccggtaacaccaacactactattcttcctgtgcgtcattgtgtggtccttgtccttctgtctctcggattcatcaggttctgaacactgaaaactgacgcgcgatgcaccgccatgtatgatcttggatgcgcatatctcattcttagggcaacacattctcgaatgagccaggggtctacatcgaagggcaggtcggagtcagattggaagattgctggttcatggatacggatggccacgcagtcagcttcaccgggcctgcaaagagtccttgggagatctgatgtgcgtgtgtgtgtttgtgtatgtgtaggcatcatgtgtatgatagattcgacatctcatctggagtgtgcagaggagccgcgtgaaagaaagtgactacaaagttcattagagaatctggcgagtttaatatagaccgagtgggaaaaagtgtaatgatgtgttttgtattccaatctcgaactttccctaatacacctactacaaaaaatcacaatccatttccctacaaaagtcagacaccatccggccgcctgacttttctcatcctttctctcaagcctgcggtaagctctttttgggtcttgcacgcgcttttgggaaagaaaggagtccccttgtcctttgaacaaagccctttgctcgacttgacaaaatgtgagcagctcctcttctcttttgttctgtatggtgtttcttttcgagtggatggtggcgtcgtcggagataagatgcttgaagaacgagtcatgttcttcctgggggagaactcgcttttggccatttttttccttctctttttcccgggaaggtgcatgttcttgggatatcaaaatcttggagttttatcaagaagccagaggacaggacagacgtgtttcagagcacctagacagaataagagacaatcgattcggatggctgaccttggtactcgtttgatttctcttttcgtagggccaaagtgagtttctctgtttcccttggtagcccaacgaacgactcgacttcggcaaagataccaaaacacgttcctcaagaagcagcagcagtagtagtagcagcagcagcagagtgatcgtgaagaacccgtaacgagatgagaaggagatcgccaaacaaatgcagacaggcaagactgttaaatagatagggagcgaacgatgggaatcattaacaggccagacgaggggtcgacggagaagggaatagggaatagggagcgaactcaggactgccaaccgacaagcaagcacatccatcaccagctcatacgagatcctttccaacggattccatcccagatacctttcttgatctgagctttctctcttgtctcgttaacgccatttgcaacgagccaatccttctcgaaacgaacccccatgtccttccaggatttccttttctcttctgaggaaaccatgccaaaattcccacaaaccgccgaaccatacttttcttcacaaatctttccgttcatgtcctccgaaacatatccttacgacctttcctctcgtcgttcctcgacttcttttttccttgtattttcttaaactctagtccaagaaccacaccgcccacaaccagaccaagaaggctcacaagaacgggatcaagaagcccaagcttaaccgacacccttctatgaacggtgttgaccctaaggttcgtattatgttctgattaacagagaacgcagtcagatctgtcttggagaaaaaaatctggcctcaaggtccatttcactgattcatgcttcttgactctcgatctacagttccgacgaaacttgaagttcgcccagctcggtacgcagaagctcctccgagctcagcgaaaggaggccaacggtgaggagcctgaggtcaagaagggttcgtctccagattcctttattctctcttactttttcttcaagaactcgagtatctaactggaatttcaaccccaatcctctggctatctctttctcccccctcttcttccttttcccctctaccaccatgtttcgaccggcctcacaggaaagggtggtttgaagatcgttgaataaaggactcttcgcgaccgatcgaagtgttttctttttttcttctctcctttccaatatttggaaaaggcttggatgactatggattccagacctctatgattctactgggaaagagaagacagaagaagaagaaagaacaccctcgagcgatgcttggcaactccttttattctatggatctcgttccatctcgtctcctctgtttctttgctctcctttccaagaggacgatcttaatcggaatatctggaaagacaggatgctgatcgagccaactagaggaggaaacggaacttgagagacatgggaaaagttgacttactaacagcttgggcctggattatatatatatatttactgactgactgatagatatcgtttgagctcaccttgctttagcatctgtaaattgaatgcctgccttgctcctgatacttttcttctctcaggcatacgtctcggctcgggtctcttcccatagtctggtccaatcataaccatgcctcgcacatctcttggagtcagaaccggtttgcgtttcgatctgactaaactttcaattaaactttctatatagaagatgtctctttggctcgaagagttggtctcactagacatatgcacttgtgcgagtgatagagaactggatatatcacccacctattccctcgtgtctctttccttttctcccagaacagacaagaggaagaacgaaagaaagaaagagagagaggaagaaatcggataggaatggaagaaaacgttgaacgatcggacgtatgacagtcgtacagggcgagcatgttcttcgatggatctagtgatatacatacacctgtacaggagaataagatgaacgacgatggtcatcccttgggacaaccacacatcgtgttgtcgctgccgtcatcggcttcggttttctcatctgtcaagaaggggcgcaaccagcggtttcttttctcacagagagagagtatgtgtgtgcgtgtatttctccccatcaatccgtgtgcgcatgtacgtcctactgcaaatatcgcgagccccgatccaaactcggtttcaagctcgcttatgggttcaagatcttgcgttcggttcccgaccgagacgggggctgggacaaaaacgccggacgtgacccgaaccggacttgactgacgatctcgagtgggacatcccatgcttcgggcacagcatcgtccgctacgaggtcgtacatcgtcaagttggccgactcgtccatcacatggtcatgatccgggtaggccgagtaagcggtcgtgtgggatggaatcttcatccccttttgatctgtgcgtacacacacacacacacacagnnnnnnnnnnggccaaggagaacagggttatcccccgtcggaatcataaaacgctcctgacaaagaaaaaaaaaacgattgagaggggagggacaaagcgggctgaaacgaaccagaaacgtaagaggacgatgagattggaggcgtgttgaataacatgagagacgcatatccgatgtatgtcgcccagatgagaaccatcgagtaggcgggaacaaggattgcccattctctgtgttccatttgacccgttaaggaaacgacgaggaggaggaggacaaacaaccgaacaaaaactatgaaaacgattagttttggcgttccgagagaatcgtaaacaacatcatcctcatacaccaccgtgatcagaccggagagggaaggagtgagcgaacgaaccgattaggataccatgagattccgtatcgttcgagtactgaactaggcaagaacgcccagagcaagtagacgactgcagctacctactcggatgaaaagtcaagtcatcatcgtcgcccaccggtttccaataagtccagatgttctatacgcaaactcaaaaagactagaaaggaagagaggcagatatatgtgcgagagaaagagaagagagagaaagacacacagtcgtccctatggcagctacgaatccaacgacctctgtttcattcggatggcttgcctgtcgtccgtcctcgcctgtagattgacgaggacgaggaggccaaggtgagatgggtagattggtgaatgccgttggcgagcttggggtctgaaccgtcatccggcaggcatccaggcaagatatgacgatgactgttcaagaggagaaacagaagaagaacgtatgtgcgtctgattgtgttacgtctctctagaggaggagaaagatatacgtctcaagcaagagagacagatgattgctcaacaggagaaggagaagatcaattcaggatctcatgaatgaatcacacatgttcggttggttttcatcgagtacagcagagatggcgagttgaatgtttttctcagcaggtctctgttctctagtctggatcgccagaggtctcaacgtctgggcagcagtggtgatgacgagaacggcgccgatgacgatgtagatgtaagtgacgatgagaccaagaactgtttccagtacatcaaacaactgtctctcaagcgggctcacacaacacacgtagaccttcaagaacacacccgctcgacagagtgccccatatggaactcccaggcgtgcattggagatgaagaagaaaagtgtgtactcgtcgatggcaaagagaataaaaactgaggccatgcacataacgatcccaaacccctcctctgtttgtccgtccttccttccttccttcctgctgttctttcatatcgacaacactccagttactcaaacaacttaaacggactctgtttaggggcaagacacaaacacagcgggatcgagattaaagtatcaaccaacaagccaagccaaaccaaaacacgacggtcagccaatcagacgtcatctcggaggaacaacgacactttcatgtttgcaaagacatgggaaccaaacaacgtaccggcaaggagggcgttaagcttgttgaccttggtggaagcagaaagatcgagggtcttgtctccaaagtcgacgatcaatccaccgagaatggaagggttgaccctgttgacgatcttcaaagtctttcccttagcactctcgcttcccttcaacgcagtctccaatcgagtctggacggccttctcaagaggctcagccgaggtaacgatcacctcgagctctccgttgtgtgccttgaagagggtctcaaagtccttgaggacctcggaggtcgaggtgagtcggccgttggcggaaaggacggagaggaggttggacgagatctgtgcatgagaaaagaccagtacgagggcagaggaaaagatggaggatggaacggtgacggcacaagaagaaagagaatgaaagtatttggtttgacaaggaaggtgatgatgatggatgtcgggcaaggaaatcaagacaaatcgaaattagatgtcgttgagaactctgggaaacaatctggcagaacgaacctcggaggccttggggatcttggagaagatggccttgaggttggcctctcgctcctgggaggagatggtggggttctctgtcgatggtttggtgaaaaaaaggagataaagaagaaggatagaatcagtctctcgctttcagtcaagggaggaaaaaacccctcgctagatcgttcgtccaaccagacggttcttccttgtgatcccatctcgtctgacggtttatccttctttgaacacgtttcctccacgagaaaacccatcgatccttcccaagatcaacaccgattgaaaaaagaactcaccaaggaaggcaacgctcttgtccttcttctggatgagctcggccaaggcagcgagatccttctggacttgagcgagggtctgggaggactgggagagggctccggtgaaggcagcggtagcgtacttgccggaaagggattggagctgaagaggaggctgtaaaaaacagagcacaagcacaaagagaaccggacacagccgagacagaggtcagccatcatcgtcaatcttggaggaaagaaggatgagagggaaaaaccaagaacgaaaaaaaaagtagacacgaaatagaagagatttctttgatgcagataaaaaccccatcggaggaggagaaagtcagggaaaaaacgggaaacaaaaacgtacggtgaccttggcggtagtagcgtaagaccgcttgatggaagaggcgacggcagatcgaacggcgaacataatagagactgaaagcaaacgagacgagcgtggtgagggagcaagacagaggaggaagaacgggaaacttgaaggtgacaaagtgtaggcggggtgtgcgtaaccatgggttgtgatcgtgacgcgtaaccaagacgcgtaaccaggacgcgtagccatcgagcgtaaccatgggtcaatcatccactacgcctctctctgctatactagagtacaggcagctggcccttctgctcgttctccttctgttcttgctgtacgtggatcttcttgcgttggtcgttcgtgtggtactgatatagtatgcgcgtgtctctgttcatcggttgtttcgtgttgacagagctgtgtgggcaaaggtttcctcggttgatcctcgcagacgcttgatctaccatcagccatcccttcggacacagccgatcaactcgcttctacacctcaccaaggatcagccctcgaaggatcatagctttcctcaagagatagacaccacatgtttgagccgtatacgatctccgaacattctgtggaccttcttgagggtgatccaatcattcctggtatcccttggaaagcttcgacgacatgtccggtcgtggtaggcaatctagagattcttctcagagacgctctcatgctgagatcgactgccggcttgcaagagagagcagaggaggaggatgataccgacggtcacagaagaaaacgaacaaggattcaatcagacgagccagacgatgcacaagtcgtttgtggtcgctctgaacgaggtacgaccgtttgaattaccggagatatcccagtgcttaaaccagacaagaggccaacgttgtctttaatttcggttttttttttcctttctttctttctttcttccttccttttatcttcgttctgatcaagtggaaaccctcaaacgacccaggaccaaatgtactcagcatcacctgttcgaccataccttcctcttgcactgcttcaatccttctctacaggatgaatcaatggaagtcgatcagtccgacgatcggttgggcgagctgatgagtgtcttgcaatctgaagaggctcaagcgctctttcgtagcacatcagaaagtaaagtcgatctaggaagagtccatcttagcgtagcacgtgacggaataggtctagtgtcccgtcggttgctagagatcctccaggaaaccctggaacaggccgagaacgaacaagacgacgagagcgaagtccgagagaagaaagcagggcgcagaaaaaagtggagaggtcccaaggctgatcgggacaaagagatttctgctctagttctcgtaatagacagattaataacgtattcagaatgggcgatcgcgagtggatatgactctgatttggattcaagaaaggtgagatacctctccttttccttcttagagacagcagaattgggtggtgactgatacacaaattcatatcactcggccgactagtccactctcacatggctgtcctctcttgtcaccctggccgcactccctgatccgccggtggttatatcgagcacactgaaactgagcatgcctcattgccgagatggcactgctattctgcctgaaactagattcactctcgagctcgacatgagtgtcaacttgctctggtctacgtctctaaatacgacttcaaacgctcttcaagctcagcatctactcttttcatcaatttttcctccaccggaggctccctcaaactacaaaaatcatcaccattcgaccaccttgccgttcttctacgatagtctccggccatctcctccgttcacagccgaggaaaaggtcgaggaagagtcaatgcagccatccgaactactgccgaatcttcttccttttcaaaagcggaccgtcaggtggatgttagccagggaaggttacacgttttctcctggcaataaagagttggccggagaacccaacatcagtgaatggaacaccaccgttccgcccggggacggaaccatcggttggcaacacatcagcctgcccctcaagtcggctccgccgatcggacgatccgtcaagcaagaaatggatacggtcacgcgcagtatagaagacgaccatccaggactgtggttcgatcgggtgactggctggattgtaaggacaaaagaagaggtccagtcatttgcgatgaaccgatcgctagaacgtgttaacggaggcatgctttgcgaagaaatgggtaggcaaacacatttagctccttgtcttgtgttttctctctctcgcaatgtggaaagaatgagtagcaccaattctgatagggttggcctgtcgtgcggcataatcattgaaaacagggttgggaaagaccttagagatcatctctctcatccttcttcatccgagatctgctttggccaacaacatcacgttcgaccaggaggctcagctttatacccgacagttcaaggtacagcagctctgcctcgtttttcttgttgtcactactgctatcacgaaacgaatgcaaacatgaagcagctaatgaattctcgtgtatcaggccacattgatcgtcgctcctcagacattggtaaaacagtggaagaacgagatcaagagcctagcgccccagctaaaagtgtttgtctacacgggctacaagaaccttccattcgaggtgacgacaaatgcgtgagtgactatgtccacggcacgatctgaagcgcaaccactagagagatttctatcatcagatagcccctttctgataatgcgttcttcctgttcccggtttcttttaaaaagatatatcaaagaattacaaagtcgagtgagccatgatctattatgccttaatgaagcagcgtccttcatactcactcgcatgcatctaatgtctgtgtcgcctgcggtatacgctcggtcgatgataatcaagaaatcaaagacaatagcctcctctcaaaatgaggaaggaaatgatgtcgcgcaaggagaaaaccgatggtggctatttctagaggaaggagattacgatgtggtcatcactacatatgcgtaagccataggtctgtcgtgcaacactgtatcggccctataactgaactcttctccttgggttgatgaatgttgggaggcaattccagtgtgctcaaagccgatttggaggttgccgttcatcatgccgcacggcccagaaggagttagtgtctactcccaagtttttgtcgtccagttgatggtaatggccatgttgacagttttatccatctgctgtagatcaagcgacatattcggatacgccgaaatctagatctcctctggtgatggtcgaggtcagtatcagaaaaccgttgctcttttccctcttcgtcgtttgtttggtcgcctgctagtgctgatcattggaaagttttaacctgctctatcagtggtggagagtagtgatggatgaggtaagggcccaatgaatcatacctgtctttctcgcaatgtgatttacctgctttgctggctatcgtgttcttttcaaggttcaaatgcagggggacggtaaagcagcagagatggtctcgcttcttcctaggcaaaactcgttcgctgtttctggaacgccggcgaaggatcacgtcaaggatttgcagcacgctttgaagtttgtcttgccaggtccttcattcccattctctgttcttgcagttctcaatgctaacgatagatgttacctcctcagattcttgcgggttccgctttttggatccaacatcaagttatggaatcgccttcttacacctgcgctagcctctgctttcgaacaggtatttgctaccatcgctaccagtaagtggttcctccataatccgtatagagcgtagttggtggaaactacatcacagatttggattattggatgatcaacaggaactactaaggcgctagttagacatgaactcaaggtatggaaacatcaggttgctcacgaaagtaatctgatttttagtcgttcaagatgctgtcttttccttttagataccccctcaaacccgatacttgtttcctgttgagtccaactctcgttgatctatagcacgaacaggccataaacgcttaccttgatatatcacttgaaacctgccagatcaatttgacggcaatcgagcaacactactactcagatacctttcaccgggcccttcaagatctgggtttcgattgggacggaaacggatttgagctagatctggccaaggcgagaggctgggttagcacgctccggcgtgagtcctttctatccactatgcctcgttttcttctcgaacgtctcgttcgaatcgctcatcttccttcggcgtatcttgatcagaaatcgctacgcactatcaggtgggcgacctgacgtcgaaccgaatgaccgatagaccgatcgctaggtttcgactcggcgggaatttgttgagtgtcgatgaggttcttcagaaaatgatggattccggagatggagagatcttgacacttcgacataaattggtcagatccgatttcttctctcgctacgatgcgagcaactcctaaccacgcgccttcttgttttccggtatgaacacaccgaattctatagctcaatctaaggataaatggtatcatcgtctcctatgtatgacaggtatttctggaggttgactaacttatatcatatccatgttttcgatctgtgtttcaacagatggatttttgctatgtcattcgccgcaagaccctcgagtcgagcaagaggaagctccacctgtcgatcaaccgaccgaggcggacagtgaggttcttccgacgtatgaccaggtctcatgtctgagggctgcagctgtacgtccatatcgctcttgggtttattccccgcaaggggtccgctctagccatgattgttgtgttctcacttccttctcggttcctccgcatagatatacgaaggcgttcttgaacaggtttcaaccatcgtttccgatcttacatcacgtctcgaacgggaccaaatcgccggtttgggatctctagtcgacgagtccagtctcgagattgacgacgatcgcatgtggacttatgaatccttaacgaggagaatatccgagttcaaattgacgaagcatcgcgttctctttttcctcgctaattaccaccatgtgatgaacaacgttgagttggagaatgacttttacgagaaagcggagagtctcagacaggatctattattgcgtgagttactcagctcttccccttctcgtatatcaacagacctgtcgtcgaagagaggtaactcaccgttcaagatttcataatctgacccaccacttgttaataatgacttatgagcacaggatacgtcgaggatgttgataaagcgaccaaagaactaaagaatagaaatcagaatgttcaaaaaactgactttgcgatcgaactttgtggattgtcagtgaccttctcctccatcttttctctgtcatccagactatcaagtttcgaaagacttagactgatcatattttgtgaatgttataattgaactaggagcggcattcgttcaagggatatatgcttgagagcgaacgtcgtgatcagactgttactgtcaaactctgtcttactgtaagaccttcttgatcttctctactgactaggaagtgttatctcttctgattggcttcgtactactcggccttctttatctcatccctcaccagttggtattggcgatccaagctcgaagaacttcttgccacacctatcgtcatagaagcttctgaacaagaagagagtattgatgcctatgcgcaaagtgaagtctctttttcccttgttttgtcgctgatgatcctacaagactgaatgtatcgatactgtgaaaatttaggtcttgacatacaaagcgatgtggaagcttatctccaagcctatacgtctgcgatcgcagagtgagtcccgacctttcaccgcaaaaatgcatcctagaggctgacatgatatctgtctctattcctgcgatcttgatgacagccgacaggagattatgctaggtgagatagtatcatgctgattcgcataccttgctatgttcgtcctattcactaatgtctccgtcaacagagacacgtacggaactggacgttgttgatagtcgggtcataaaagaacgacgctcaaagaactctcgacaaggcaccggagcagaatccgccttggaccagccgttgagcaagaaactcatggccgaacgagcggctctcaggttgaatcctgcccctccaaaacgtggagaagaaggacggaaatgtttgaaagcacatgtcttcagactcaacgaaattaccgaatacggaggttggtgtatattttgtcgcatgatagatatccatttaattatgacaaagtatgactaatccttccctcacataatcgcaatctatacgtctggatacctcttcctgcgcacttcaggtagccatatggagagagctattgccgaacaagaagcaaccagactacatgccgttatctccaaacagaccaagattttggaagctctccgatccgagctagtcggctttcgaaacgcatttaacgctcgtgtcaagtatttcaagtgagggggagtttcttcttctcgatcgacagagatgtcaaccatttctcatttcttttccgatctcgcttggttttcgactgtacaggcaacttcagcagatatccgactcagttacagatgttgcttacgagctaggtgacgggaagatgagtataagaaagcaactgagaagcaacgaaggttagtatcacctttacagaaccgaaagagtcagagtctgatatcgctagggttgtactgttacagagagagagcagaatttgtcttcggacatacacaatctggttgcgtgagtagtattctgatgtatctcgtttcgtggcttcagcactgatactctacgagggctttcgtcatcctcggttttctataagtttacaacgctatcgatcaaatatgcgtctaggtctggccgaagcaaacagaaactgtgtcatctgtctggaagagttcttcgatcgaggcatgttgttaggtaagttctttttgaaatagattttgagcaacgacctaccaattgacgcgtatctcttttcagaatgctcgcatatgttttgtcaaggtttgtttttcccttattgtggcttccagtgaacgcactaacctcactccgtatgctgcgtacatgcttacttccaccatttgaagcttgctaccggagtttgatccagaggagcaaggcctgtccggtctgtagaacacaaatcaatccgagaactgtgagcgatacctttcgtcccgtaagcgcaagactttagccaggagctgacttgttatatttgtccacgttgaataggctcatcgaatcattttccaaaaccgaccctcgcttgaagcaacaaaggaaatcccaattaagagcgacactgctgcttctaaaccggtcgcattcaagacagacactctctcgaatctgaatatggtgtctgctgacgaaatatcgcagatttcgagcatgtctctgtttggagactggtaagcacgctccgttgcaatagccaatcaatatttcaaggcctgactgcatggtaatgttcgtttgtattcgccgatcatacaggggtagcaagattaataccatggttcagcatttactctatctccgaaaaactgatctaggttcgaaagccgtcctcttcactgcgtgagtttgaatcatcttgtctgctgtcttcggttgggtggacttgaactacgaagatgacacaaacaactttcctctcttagttatcctgatgcattagtgagtcgtgaataccaaaacaatccgtctgagattgtcagaatgttgatgtcgtcgtggtctttttgatacttggaactcgatcagaacatcctggaacaggctttaaaatctaacggtatccgatattgtggaagcttcaaaggtccaaaagctgccagcgagtttaaaaggttggtcttctctcttcctttctcactctagtctgtatgatttagctattgatccaaggttattttttgactcagtgacccaaatatccaatgctacttgcttagtggggtaaggcccatgtatctggcttcttatccatttgtctaataactgactcggatacaatattgttcgtgcgcatatcaaaactaggagaaggaaagcgctggcctgactctgacggaggcacgatatgtatttctgatggagcctactgtctgtgagtcggcagtgattttttgttgcctgagaaatcccccttgatataatccggtctatttactagatctactaatatcatgtttccatcgcgatgtctcacaacagccccaagttttgagctacaggctattggacggattgaacggatcggacagaagcaaactaccaaagtgttctgtgagtgatgttgtttgcgaatatgatggcacgtcagttcgatctgtacatctgaccttctcttatgcacgtacgtgaaaggctactactctacggatactctcgatgaggccattgtacggttgacaggtgagccggattcatgtagatgctttggattgttagaatttcaacacgggctgaaatctccctcattgtatgctccgtcagctttcaagggtcattcaatctatgagcgcgaggccatcggttccgggctgcctatcgatgctacccgaccggacgaaggtgttgatggctacaaacccaagaaaatcggagattacatcgccctctcggatgattgtgagcctctatatgtcttatacatctctccgatcctgtattcgatcgacggcccacccttcgaatccatactgatgtatactttctgacttatctggtagtggctgcactcttgtttccagaccggcatcttccctccaacggagatgaacatacagctatagatctcaaagaatccaagactctggattctaaagtttctaatctgactcgggatccaagatttactgatcaggacggacaacccatcccaggctcttctcgctggatataattagtgtttgacccatagatattgatgtcgttctgagtgtgtcgcgggatcaagcttacttaatctttggatcggaggtgtccgcctgccagccgattgatgatgtattttccacggaaccgcacaactttgaaatctctccattcccgctctccatcattggagacattggtagcaaagcaggatgaatcaatccacagaagctgcacagtatacgatgctgacaatccctccaccacctccatacgacctcatcattgatgatttgacgatcgggtttcctccgtcgcgtaggtctcttatccctcaagcaatcttctccaagctccttgaaaagaaagccaatggctcggatggcgaaaagatgaacgaggacgggccgcctgaagagagctcgtccaagaaggggatcataagaaacgtctcagggagatgtgaggctggagaagtgctggccatcatcggtggagtgagtgccgatctaatctagacctggttagcttccactttggagagtacacgttcagatagagacttagacttatgtattgataccattagtctggaagtggcaagacaacccttctcaacctgattgccaatcgactcggaagtaccctcccgactctctcgggcagtatcgtcttccgctcagctcaagatcggctcgactctacttcttccactgaagtacagcagaagagcggccaggaagagaaagaggagctcaaaggtgaacacagtgatcaaaaacttctgaaagaggttggaaagagaattggctacgtcaaacagtcggactttcttcttccacatttgacaggtgtgtcatgtgtctctatttgtgcttcgagagatgtagaagtcaggccgttgactgaggcatatgtatgtctaatactatttgggtcgggtttggcttggcttggtcgatcgacagtaagagaaacgttgaggtttgcggccgctcttcggttacctacgagtgtgagcaaatcggagagagaattaatcgtcgaacagactatccaggagcttggtctgaaagacgcagccgagaccgttgtcggaggcgcctcccgtaaaggaatctcgggaggagaaaagaggttggtctgagtttctttggttcttgttagaagggtggtcctctgcacactttctatctctaatgcccgtcttgagatgtttttagacgtctctcgatcggatgtgtgttagtgaccttaccgtcaattttggtgctagatgaggttcgtacttcgcctcttctttcttctttttctctgtttcttaatctggctcgtatgattctcaccaacttatactgttcgtaaaactgactggccttcaaaagccaacgagcggactggatgctttcacgtcccatctcctcctcgaaacgctttcccagttggccaaaagaaaccgaacagttgttctctcgttacacgcccctcggtcagacgcatttgggctattcgataagttactattgctaagtaaaggaaacgttgtttacagcgggccaacgcacaagagcttgccttggttcgaaagatgtggatggacgttggaagcaggaaccaatccgttaggttcgttggtttcttctaccttctggatgaaaccaagcgctgagagcctatcctttcttttattttcgctatctcttgtctaacatattcatcttgtgtcgaatgcaaaactagatttcatgattgatatctcgtcagtcgacaatagagactctgatcgtgaagatgaggtgtgtagtttttcaagtgattcttatgattggcctaccaacgactgaactatggtgccgatgtgggataacagtctctaaggcgtgtcaagaagctagttgatgcatggaaggcatcatctatagaatacctcaatatcaaacctgtcgctccatcgcatgatcgttcccctgaatgcatcctaaaagaagatagatctgttgaaccggtgccgtcactcacaaggtctcctgttggcaacgagctctccgcgccgtcgcctagctcagaccaggaaggtagtaaccggcctggttggtggttgcagacgggagtcctgaccaaaagagctcatctgaacgtgtatcggaactgggtttgtctctgcttgtctaaatcatgttccagtctgtagacgacactgactgtatctttgaactggtcggcaattgatttcgtggccatcttcatgggggtttagagtcaacttatcgggtttgccgtccaagctatcgtcatcggagctctcatggtaagatcctatttgttgtgattgcagacgtctatcttcatgacgtactcacaaggtgtcctcaaaaatcggtttcttccctttgttagggtttcacattcttccggctcggagagactgtagcagatgttcagagtatgaagaatataagttttcagcttgttccggcttacttctagtatgcatacgtctctcttttccttacctgcttgacggactatgttcaagctcaaacttgcatctgtttcgtcttctatagcttgacgcaagtgtattggattttcaactcttgcaacgctctcattatttttgatcgagaaagggaagatggtttatatgtccgtatactattatcactcagaatgccttctcatgaccaaaaatactcaacgtgtgctcaactctaagggggttatcccttacgttgtctctgagttcttatctaacctcctcccttcaatcttggcgccttcaatatagtaaggctaaattggctcaatctcatcatctttttgctgtctgatcagttgcttgattatctcctagcgtcatcctggtgtatacgatggcagggctacgcgacgacgactatgctgccaacttgttcactatagttgcaagctcggtcattgtacaatgggccactcaaggcctggctttattcagcgcatctgttcttgtacgctatcatcacattcttcatatgtaacatacttcagtgttatatacagtgctcatgtttgaacacttgttgctctatcaaactcgttgaattgcttccttgtagaggccgttcgctcaagcttcgtaagtaatattagattctcagagatggcgaggcattcctaagaacgaccacttatattctggggttttgcttctacggatatagagttatatgtgttagtgctttcttcttatttgacatcaagtaacacatttagtaatccatgattttgtccttggatcgaatctcttagaatgctgtgagttattgaatattgacgttgtaacgacacggaagtgtagtaaacggttaacggtttccaccctttgttttgagtagctttcgctattccaaacgatgtctgcagggtttcttctggtgaacgttcccccttgggtttcctggatccgttggacgtaggtctaagccctctatcgtgttcacgtatactgctactaatcacaaccctgaatacttgtatatattctcgtccagcgctccacaattttattcatacaggattgttgcgcccacactactaagaaaccgcacattcagctgtccaggagttgtaggagttgaactgaatcaggtaacatcgtttctctttcttatgattcttgcgggtgtttatgttagctgagaatatcaactgatcctgttaattactgggctatcagtgtgacggtaacaaagtgctcgttgggctcaagattaataatgtcaatatcggagtctactttgcaggattgattggtgtggcattggtgtatgtacttcggctgaagacttcttctcagcttgttgtgctgatctactttctttctgttcgatctagcgaatactctctggcatgcctcatcttgcaggtacttccatttgcgtcaaatacaagagcacgacactggctatattattaatgttgcattcgcttctctcctcataggtgtaccatccaggaggagtaaagtttgcttcgcaagtcagtcctgaaggtcgagggaaagagtctgctgtgactggtgatatggacatctcgcgagctaggatcaatgtcgaggtacatgacttttccaaacatctgtgttgactagaaataatgttttaagtatgattcgtaccctcttcgaactctcttcaggtccgccatatatcactcagctggtaccgtcgctcattctggccgttcttcgaatcatcaaataagacaattttgaaggacatctctgcagtcttccctgcaggtacgttatttttttatgtctaaatcatttaacaataaggtcttatgaagaatgggttttcttgtaccaggtcaagtttctgccatcataggaccttctggagcaggaaagtctactgtgttacagttgctatcccatcgacatctgaatgctggatctctaggtggcttcaaattcgaaggttcgctgttatataacggcggacctgcgactaaagagataaaggctgccatagcgtttgttgaacaggatgatgactatcatctatcgtaagtgtcttcggtcgtcatgactatgcttctggttctaacagtgcagaatttcgatttttcttacagtgggttgaccgttcgggaaacgttgcgatatgcggctatccttcggttacccaacacgatgagccgtaaaaataagctgtacatcctcgcagactttgtcttagtattttatctttagttctgaccatacatctaatatgttgtttaatctcataatcagagcgcgggcagaggagtaagtgaacattttgtgtcgactctcaaacaggggcttacatagagattcaaattatttcgtagggtcctccttatgcttggtttgaaggactgcgctaacgtgctcgtcggaggcgccttggttaaaggtaagactttagatccagtcttaaatgtctgatgagctgaacactaaccactacgtttcataggtatctctggtggagaaaaacgacgactgtcgttggccgttcagatgataaacgatccgtcaatcctcatcgtagatgaacccacgagcggcttagatgcgttcattgcgtgagggtttctctctagagtgtaattgagttatgatatccgattggcatctaactcgatctgattcaattatctatcgacagtaacaacgtgatgcagtgtttagtgagtctatctatgatattaaattacgccgcacgtcgaaaaggatttctgagcagcgttctgtatggatagacggatattgcacacagtggtcgaacagtcattggtgagttcaaagatactttcttctctgaatcgccatgctcatcgctgcctctttcaacatgttagctactattcatcaaccccgatcagatatcgtcaaaggtcggtctgtatttcttcaagatatttctacagtcaattgacgtcctctttggtgtgcagcattcgacaacctatgcgttctagcaaagggtggtgccgttgtgttttcgggtccaaacgtagaggcaattccatggttcgaggctcatggattccctcttcagtttggtaatcctgcggatcacatcttggacgttatttctatagacaggtcagtccgtcaacaatgatactcgctatcgctgaaactcctgatttcttaaacgtccgtacatcacttgaaacagccgcccgggaaaagaagatgagtcgagagagcgcgtgaatgggctcattgattcttggaaagatcgaacaaccaagtccgatatcatcgccgatcgagcctctatccattcggatgacctggcgtctgaggcagctgaggttagaatgacaccattctatgtggccttgcctacagtactccaccggatggtgttgaacctttatagacaaagagatgtaggttgagcttttctttgtgctgttttggttcgatattcaatcggctgatcactctgagtaacatggtgatgtataggcattttggaaccggctaagtcaggcccctttactaggagtcttgttcctaattttttatactagactcaagagagaagaatctggcgctcaggatcggattggaatcactgccgagaatgtgaacgctatgccattcgtcggtctgctcagtatgtaaagctccatatggattttctcttcttcagttagacatactgttcgctgagccgatgagttccacagatggaattgccatctttccccaagacagaaatctgttctttcacgaatatcggagttccgccacgtattcggcattcactttgtgagtaccgatgatggtggtgctcgtctctatgactacaagatacttacccaccgacgactctaatccgaacagcatcgtcgcctacacgttcttcgagctatctatgacagtgtttgcgtctttcttctacggcctcctgatgaacgttgccgttggtctccagacgagttatcggatttgtgagtctagtcgtggtttactggtggtacaaaacacatactgatcgattcttgttctgtctggttcttagatatcgaattctgcgtttcaatatgggcgatcttgagcttcggagaggtaagatatgtcgatcgattgcacttatttctcggtattggctaacccctcgggtgaactcgttctagtcaatttcgatctgtctcgcctcgttcgcttcagagacagggttggctgtgagctatatatcgaccgtactggctgtgttctgtcagatttcggtatgttaacttcctctgcacgatgccatacaagcgaggtatttttgagagggtgtcttgacttggggttttgttttgtttttttactttctcttatcttagggtatcatctcactttctgtaccgaactggtaagtacgatagttgctgatgatgaggaggagcatcggtaggatactgttgactgacgcagagtcttctatgtacacttaggctcgcgggtattgcctgggttactccattaaaggtgagagagaaaagacaagatttctcattctccgagatcctctgtacagccagaaagaagaactgaccaccaactcgatgtgatcgatctaggcagcaacaaagattcaattcattaacgaggctcgaaacttgactgttcgttcttgattcttgtccaccttgtcggcgtggtgcgaatcttaccaagatttctcattctgtttttcttttctttctgttgggtagttttcgtgttctcctgaatcaatcgaatctggtgcggccagtcctttttttttctcttcatttccttctgtcctttgttgttgttttattttcttcttctctttttcaactcaaaaaagaagactttgctttctggatgaacgatggactaacaacgtatctatcgaccggacgggccatgaaatccaggcgcctgtgtggccacatctggtaatgaccttctcatctctctaggattttacgatctgaataccgaaaagtttgtaggtatcctggtcgctaccgtgcgtcccttctgcctcttccttttcttttctcttctaatcaattggctaagtcaacaaacactgatctaaaaacggagcatggtgtgggctggattgggacggaaatgcaatttgggatacaggcaatcggctggagaggtctttcatggctcgctctgcggttgaaactcgcgctgtcgacttgagttccgggatggaatgagggaaggatgtttgatttccttctatcc

SEQ ID NO: 836 - DNA, 2505 bp, Xanthophyllomyces dendrorhous
gtctagatgtggaccaatgtatcttgaaatcatatgtctgtgtctgtgtctctcaaatagagatgatccgatttaatgtactcaatgaaaaggaaaagtcacaaatgacacaattcaaatgaacgcgatgagtggaaatcaataaaattaatatatctttttttttccgtctactctatattttcctgcaaatagacaaacaagatgaagaagaaagatgggaaaggatggataggaacgatatatcagagagaatagaaaggtcaagtagggaagagggaagaaaggtgtgaaggagatcgtcagatgtaggcccattttgggtcaaaatagagtcagataagaaaaagaagagatctcgttacaacggatttaaaaaaagctaagggaagaagaaaagaacgaattagaccaaggaattgacaagaaaatgaaccgaagagaaccgaaaggatgaaatgaaccaaaagaacaagaaaagaaaagaaaagaagaaacggcgtcagattatagaggccggaagacatatggaaaaaaaaagagacagaaagaaagaacagagtgccattctacatgaagagagaaaagatgacaagataaataacagatggacggaagaaaaagaaaaggacaaaacaaaacataaacaaagcaaaggggaggaagaactctagagagatgttttgtgggacggcacttcgggctcggctgctcctgctaatccagccgggggaaagtagctcttccggttgagacttcgtttacggccaagggtgtccacttttgccaatgagtgtactcgcgggtcgaacgccttgtctgcccgtggatacgctagcgggaactcggccagagggccgtccatccagggctctctcggtatactcggtgagtgcatcggtgatctgaacggagacgggcctgttgaagcgatggccgaggtgacggcggcagtggccggtgggagagatgagagggaaagcgagagatcggtgtgctttctcgaggtcgaggctgaccggttgagggtgtgtgagcctggaggggaggacgctctgctggaagtggcggaggcgccggtgggaaccctgtcgtggtcgtacaggtcgtcatcatcgtcgctgctgtcatcgtcagaatcgctccggtcgttcggatttctgagcgtgcgtgaaaaactgtggaaggaggaccgacggctgacgggtcgacgttcgggaacaggggatgagagcgaagtcttgcagtcgacacaaactctggagggtagtatgtgagttgagggagtgagggtaggagtcgacagggagtttacagatggggtggaaacagagacagagatgttggaagccaagagtgaggggggtgattgagacaacggagtcgagaccgtgctgggagccaagagtgctgaagaggggaagagcaacggatgggtgacggccgaacaagcctgacagaacacgaggccacatctttggaggagagtaacaaacggaattatttaaaactacagtcaaaccgtgtattcccgaaaagttctttttcccaaacaaagtggacctactttcgacaatggtgcttgcgttctttccaaaagccaaacctggtgccgcaacccggtcggtcacagacctcggcatctgcatctgctttccagagatctttaggaagagcggcctgccgttcttcgattagcaactttattggcgcactcggtgaggacggagtggattccgtctgactgtcttggacggagggagtgaagccggtaacggcaggatttgagagtgatggggcgacagagtaggctggagacggtgtccggacggaagatgagctcgaccgggaggtcgttgtctcgagtgaggacgagttctggaccaatggcggtgtagacgatgtgatacttggcgatggggagcctggatgagagcgagcgggagagtagtgaatgagatgggggggtgagaaaagaggaaggaggaaatgaaaatgagaatgaaaacagggcgccggatttagcgagatcttcattggacaggaagaggaggaaggagggaagaaaaaacctgggaagggaacgcgagggaaaagccaagaaggcaggagaaaaaaagggaagaaaggcgtgaagaacgaacctgaacgacttgctctcgaaagatccacctgagacaacctggccctccgaagatgctctttcgagcctggctccggccggactcctctgggacctgctctggcttcttcgtgtgtggacggaagtcggtttgggtcgctcggttcctgaggcgacagatggtgaggtttcgatgtaagcagggtcattatatgtgggtgtgcggatgctgaaattgctgtgtatgctgttggagtgggtgtgtggacgtgggagtgcttgtacaacagggtgtatgcgttgtggaagagaactaaatgggatgtatgcgttcgaccggatctgggtggatggaggaatcaggttggtgggtgggtgggagg

SEQ ID NO: 837 - DNA, 52742 bp, Xanthophyllomyces dendrorhous
ggtgggaggatgggatggatgcacaaaagagatcaaggaaaagagaataaaggtgagaagctgagcgtatgggagaagggaaaaaagaaagaggccccaggggcaaggtgtcgttctctcgctcgctcgccctctctcgggaggtagaggcacctggcgagaggaagatacaggcacgttagagcaggaatatagtcagcccaggtacgtttttggaagatcgtccggtccttttccgctcgctctctccttctctccttctctaatgatgcctccgctggtctgaaggctgagtttggtgcatccgtagctgacggtcgacggccgacggccggatggatttcgtgtgaaaggacctatggccgctgcgcggctgagaatctgcgatcctgcgattcttccctgcattgagaatgcccggatcggcctgcgcgcttctccacttctccgcaagttgagggccgccaggtaaataaaaaaaagggctcaaccgaggatattggcttccccagtcaatgtaccagtagggcccgggcatggtttctttttttcttgatccggccatcggagcttccaattttaaccatcaacttctcagcgagccccgtcggggaatgggcggggacgtgaaattcccaaacaaggtttactctactttgtctaattctctttcttttcccctgatcgtcaatagttcattcgttcttccatccttgcttcctcccgggttgctttcacatgacatgtttaaagcccggttttcaccgagtcaatcccagccttcaccacagggagaggcaaagacaaacgagcgaccggtgattcgtctgtatgtgtgactggcaggttgaactctttattggcttactaacaaacgagacgatccctcttggaagccagtttctgttatcccacatatcttccactcttctccacagtcttctttgcattgcgtttggagtcaaaacgttgccgttgggcgctcccgggtttcatccctagccttttcctctggtttacgttgctttccatccaggttgctccctcttttggcccggacgatttattttgtcttattttggtcgtcaacgacaataataacaacaacaacaacaacaacaacaacaacaacaacaacaacaataacgatgatgagggtaataataacgatactaccagcagcaacgacgacatgaagaattggaagaacgaagaagaatggagcaaagacggatggtgaaaaaaagaaaaatacagagaaaatacagaggaaacaaatagacggaggcaaagaaatggagacaagatgagaaactagatcgtctcgtgttggcctttgacttgcttcatgttggtatgctttggtttgttctacttgtccttgatgtaattccttctcttattctttctcatgcgatctctcctttctcatctaccttttcactctcatcctctctttcctctcttttctctctttcctctctttcctctctttcctctctttcctctgctgatttgactgcgcgcgaacgagcgctgaaagtcgaaagaagtacaagtaggctgagaaagagtgacctcccggatggacgaatgaacgaatcaacggagatcttttaaacattctcagggatgacgatcagtgggtggaattggccgcaaatgttagggttacgattagtcacaccacggctcaggctcactctaggctcggtacctataaccattttttagccaggttactaacccttctattccaccttcagctcaatttcctaacctttaggcttcatacctcctggcttgaaatctcgacgtgagccatcaaacacgaccatacacaaggaatacagcgagcacatacacacacacacacacacatacatatacatggcattcgttacaatctctgggtttccttgctctgggaaatcgactttcgtcagcaagctagtcgaggatatagaacgaaggatggctcagccggattatgccggacctaccctcgatgttgccatcgtcagggatgatcttggacatgatggaaggataatctatgccggttcgttttcagcttcatctccctctagccatccttgtacttctcgccttcctccttctctctctctctgcttactcacgcctgatctcctcacccttgcttgcgtcctcttcgtttccaaagaaagcaagtcggaaaaaccagtccgagcatcatgtctgacaacagtaaacagaatgctctccaaaaagacaatcctgatatgtgacgggatgaattatatcaagggttatcggtatcagatgaattgtgccgcaaaggaggctggcgtcagaccttgtactgtttgtccttttctttctctccctttcttgtgttcacctctttctttctttctttctttctttctttctttctttctttctttctttctttctttcttttggaatcttcttctgttcttgtatatactcaagtttcttttctcactcacaaacattttccacctcttctctcatccagatccatgtggccagtccaccagagaagtgcaaagagtggaatgcttccagagatcaggctgaagcttatactgaatccacgttcgttctctcgtgtcttaagcagaacgtagtagctgactgagtgactaatgattgatctgtctcgaatggacatgcgcgcgctttctctctctctcttttttgtgctctctaaccactccccctccccctcttccaccccacaaaaaaaggcttgaagcactcatcatgagatttgaagaaccttcttctatggcccgttgggattccccattattcaccattggttgggacgatcagtctcttccattcgattccatctgggcagctatcaccagtggaatcaaaccaaaggcaaatccaagtgttgttcctgtgagctgttgtctcgttctcttttggcccttttcctcttcctttttctttcttccttagaagttctccttactcacccactcactcactcacttattctcttctgtaccttttctccctcggtcctttctgttgtcttctactcgctcgcgtatgcttgatagaacggccaaacggctccttctaccgtccaagcgctccactcgacaacatccacgttgataaccaccctactagcccacctgtcagacaacccgctttccacccatctccgacttccatccccaccgtacccatcgacagggttagccctgcccgcacggacgatcacgctgagtgaactacagagactgaaacgacagttcgagaccatccagctgcaaggcttcaagcgaggcggacagggcgtgctcagagcaggctggggagagagagagtggggagaggcctgggtcaagttcctagaaggtcaatggggtaccagagaatgggtcgatcaggtttagctcggggatcgtccttctgtaaagatctcagacggcttccctctctttttctctctgggcagtctttcctctttccttgctctttgggcctccttttcgattttgtctcttccctcctcctttttgtcaagacaggcaggagtatacaaagcagtcagtttagaaattattgtaaaaaaaaaatcaggaaagggatggcgacggccactctgttcaatcgtaccgactctcaacggagagcaaatgtctccggaagcacaagaaagaaagaaagcaagcaggatagagagaaaaccgcttgattgaattttatatcagggtacacattttatctacatccggcctgatccaaatgacaataaaacagaaggaagcaaagaaacaaccacccgatttagtctaccgatccgaaccctgttctgaactgttaaacacccagggcaaagaaaaagcattgggatactcacagtttcacaattcgaaaggcgttccgccagccttcaactttgtaccctgcttccaaccttttccttctccttttcctctcttcatctctgcctccatctcatcccatgagacgttcctgacttcgatcaactctttgatccttagaatcccaccggcagtagtcgcagaaaacggatggaagaccgttcggtcccgcttggtcaacccgagctgttcacatgtcgctctgaccttctcgggaagaccgatcgccgatcttctgagcgtgattctgtagtgagtgaccgggccggcggaaggtggtagctttttcttgtccttgttagatatgtggtgtaccgcaggaaacgggtattgtgatcgaagcgggtggtagtgagggaacgagcaattcggcggctgccgaggagcgatcttcttgttcaagtactggggctgtctcagccccatcgcttggagggatggtgtgagcctcatcttgggatgaggagattgagagccgagttggagggtgacgttaggagaatgaggatggtccgtctggttgtatgtccgagttggtagcgaagggaaaacgaaatgacccttagcgtgaatattcaagtattcaaatactgtcttatctaagtccccgccatctctcatcctcccatcctcccatcatcatcagcagcagcagcaacagcagcaccatcaccatcaccatcaccatcggcaggacctttctctctgtgtgtgcttttgttcgatgcccaaacagcccgcatccgctccatcggctccagcatggaggtcgttctcgttctttgagtcttctgtcgccaacttggaatctaccgctgcagatgttctccaggttggttctgacgttcttcagtagatagacatagaccaagactaaccctgtggttggttactctgttgctctctctctctctctctgtctcattcttggatcatttttctcacagatacctcaatcgatatctgttatcacaccttgctcggtctcaaaacatccaatccttttggcagattcggaaggtaacatttccactctatccgccacgttcagcccggtcttgtcctggctcgctttccccgaaggacggtgcacacatctgctcgaagcccgtggaatcgtcgttggtctaggagaagaacgtctgtctccgtatccgatcctcaagatttgggatctccttcatgttgacaaaaagacccaacgaccgatgttgctgaaaaatatcaagatacaacatggtggtcggccccatccggtctcggctgccgccctgacgacaaatctttctcatctggctgtcggtctgggagacggcacagttttactatacaggcatctgtcccaatcattggcttcgtctatctcttctacatcagccaccatctcgattgtcccttcatccacctcggcgtcttcctcgttgatctcgcttccgaaacctaaagtcttgctagacaacacgaacgagccgatcacaggattactctttagagaggaaccagcccgaccagccagcgcgacctccagatcgctcgtccctggtgatgtttacatctttgttgtcaccactaataaaaccatggttggtcaagccgagggaaaatcgaagaagctcggcggatcaatcactggtatgaccgtcggcgagcttagagtgttggatgatgtgggtggtaacttaggctgtactaccggcgtcgtcgtcgccgattcagacgccgaaggaggaggaggaggaggagaaggaagcggcctgagccaaactgaaaccaatgtaaactcgaaacagaccacaggttctggatcctcgaccgcgctcaatttagcggtcgctagagaagaagccatccatctatactccccctccggtcggctctcctcgttcgcatacgaaggtcccaaaagttccatctcaacattccctactataccgaccggtcgctcggttcccaactcttcacacacatcatcctcccttgtcatcgtctcgcctccgttcgttccgtcgtcgacctcaaccagtcagacggtcagaaatctggtgagggcacagcctgggctagtccaacatggtacagacatcagccggctcgctgtgctcgatcttgaaggaaagttcatcagctatagcggagcgttcaatcagggggtcaaacaggtcttttgcttgaacgacgtgatctgggttctcggaaatgacggcaaggtctgtcttctttgagctattctttctcttcctcttttctatcttctcttaccatgtaggctgacattgtggcctgttcttctctcgcactctttatctcgcagctgacaaaactagctcctctaccgctgaccgagtggttgacacacttcttctccaaacacttgttcgtcctcgccttgacactcgcccgatccaacaatctcggtagaccggtcatagcagatatccatcgtcggtatggcgatcacctgtacgcaaagtcagactttgaaggatccgtcgaccagtatatcaagacgctgggcgagctccaaccgagttatgttatccgaaaggtatgtctctcccttcctctggagtttcatttttgagggtttacgttgaaccgtcttttgattcttcttacgcgaatgggctcacttcgttggcatgtctctgtcgcgctggttctcttgtttcctttctttcttcctcacagtttcttgacgcgcagaggatcacccacctcacaacttacctacaagaacttcacgcggccaacttggccaactcggaccacactactcttctcctcaactgcttcaccaaaaccggtgatctgcctcgactcgaatccttccttcgaacttcatccttccccacatcgacaaattcggacaccaaggaactaccgttcgatctggataccgccatccgggtatgcagacaagccgggttttacgaccatgccatctttcttgccaaacgttggaagaagcatgatcagtattttgatatcatgattgaggatacccaacaatggggggcggctttggcctacttgaaagatttggaaccggaacaggttcgtatgacttcttcctcgtttagcgtgtcaacctcagctgacaagatcatcttgacactgtccgctcggtcgccggtccgatgaatacaggcccaagaaaatctcgttcgatacggcaagacgctcttgaaccaatccccgaaggaaaccaccgatctgttcattcatctatgtacccagccatccgcgccttcgccgagaccgtatcttgtccactttataggtcaccctgacgaactagttcgattcttggaagcggtagcctcctctcgttatgggttttccgccgaatcacccgtcaaaaacacatccaactccaccaagcctgctccgtcccaacctcctgcttacgacgtcgagctctctatggctgcatcctccgaaaaagacccagccgaccaaagggcagtgtggagcacattgttagagctttacctcctcttctggaagaagcagtcgctctcaagtctacagcgagaggtctaccgagccaaagcgttcagcttggtagaaaaagcaggggacgagcatgcttacgacataacggctgcgttgatcttgtgctcgaccagtgatttctccgaagggatggttctcctttgggaaaagttgggaatgtacgaggacgtcctccggttctggatggagaaggagaacgagagagaggtcgacgggtcgaacggacttgtttctccttctccatcctcacaacggcgaccatcagatgaagtgctgacccagctccgtatatatggacctatgaaccatcatctctacccgctcgtccttcggttcctgacctcttcgaacgcgcttctggcccgtcatcaggccgacgtagccgaggtgttggagataatcgacgaagagcggattatgcctacgttggagattgtcaaggtgtttggtagaaacgaggttgctagcgtgggaattgtgaaagattggttgaaagcgaaagtacaaggcatgcgtctggaggtagattccgtacgtggaacaatttatgtttctcctcttagccttcacaaacaagcttgtcatttacccaaccatccttctcgtctaatccaaatctcttttctctcccttcttccttcaggatcgtgttctgatgaactcttaccggacggaaacgagcgccaagctaaaagaggtcgaggcactgacggatgatactcaacctcaagtgttccaagtgacccggtgtgcttcgtgcggactcaacttggacctgccgactatccactatatgtgccgacattcctatcatcagaggtgcgttactgtcatccttggattgcggtttcttcttagatcctccatgttcgaggctttcattttttctttcctatgtgctaaacggtatctttattgttttatcaaacgaacgaacatcatttgagagaatcttagatgtctacccgaggttcacccagattgcccgttatgcgcaagtcagcacggtctcatccgggagatcaccgcgaaccacgctcgaaacagagacaatcacgagttgttcctcagcgaagttcaggagagcacgcatggtttcggcgtcgtcgctcatgggttcggccgaggagttattggtggatcgagcgcgacgagttagtcgggaaaatcgttcggggagacgtcttgcttcctcgttttgcttctttcaggtcacatcctcttgcttttcttgccttccctcattagattgtttgcattatatatataccctccgtcaagcttgtgagctcaccggtccatgtgcccacctgttggcgatgttcatactctgtctctctccggcatttctattcccttctattcttgaacaaaagaagaaaaaaaatgttgcgcatttgcacatgtactcttgttcgaattataacaagccgggctcattgggggtcatcgaatcgattgggtcgactcgaccgaaaggaacataaactcttcgtttatatatgaaaatatcacagctagactcgatacccgtcttattcgatccagaagtgttcaaacctgacatctgtaccatttcctttgggcgaacaacccatcacaccgacccaaacctcttggttgggtccactggaagcagggaagaaagcgttgacttctcggatcatcgaccattcctgatcaccgctattgccgctgttatcgtcgtcggcaatatagatccggacgtgcgatccttctctgttgagtttgaatctcctaggcctcgacgggttcgagggcttatacgggagcagagacctgaatcaagaaagaaccataggacaaagatcgctccgcgcgagtttcaaaactaagtcgttgtgcatcacggtttcgtcatatacgagtgatgtacggaccagtcagaataagggttcgtcactactgccgatttccatgctttgttgcccatgaactgagagacggacattacagccagatcaatgtgagatgctcgtttcagtgaaaacctctatgcatcaaggaagacgaagaacggcagatatacttcaattccggttttgatccattctttgtcagattgatatactatcagagcggcttgatcgctattctccgttcccatttcaaaagcgaaagcacatagatcccgagaatgtttttgacggaaaagagatatgtaatacaaggaagagtcagtagacgccgagatgtatcctgaggaataggagatgataaaaccgatggacatactactagatagacatccgttccgaacccaatcccaagccgacaaaatgttggtcctatgttcttcatcatcttaaagcggaagacgggggtactttccccctcttcggatacagagacgtacctcatcaacccaggttccagctatggaaactcctacagaccaactatttcctttctcagcaggaacgagcatccccaagaccggtccgctatgtctccattcggtcggtgtcctccaccaatcactcttcccattcgtctataccccagagatttgttcgggagcacagatccagggtacataataacggcaggatgaaggcttctcttcaaaaacagacacgcaatcgcggacagcacggttcatgtgagatacacatacctggatggtgatctttgacccatcggaactgatctctggcgtctggatgagggtctgatgcgcgccgttcgaactaggaagaggtcgaagctcggtgaaggggatgtttaccatgacaacagctgtatatgagggtttgttgtgttgcaaacgagacaaacaagaatgggagggaaagtgctgatcaagatgaagtaagatgagatttaattgggttttaagagatgtgacgaatgatgtctcgatcatcgcttaccaagagttgactcactccggcgttcttggcatctcctaagcattcgggatttctccgcacgtactactcgatctatgggataacatgcgtttcatggatgaatggaccgccggccaaaatccgggactagctgagaccgagaagaagaagcacgatagaggacgagaatgtatatgagcgatctaggagtcatacattggcacagtataagattaattgtggaaatgagattggtacatgttccggtacaatgtgagatatattaaaagatatcacaaataaaacaaaaacagaccatgccttcttcccgaaggctgctttagaagaagaagacgaaagtagatatatgcccaaaagaagaaaatgaaagaaaatgaaaatgagaaatacaacgaggaaaggaaaagaaaggaaaatcaaatagagaacctccgaaccgatcgagatctagctagtttgatctgatcgacgtccccgtcgcccaccgacaatgcaacgggttctgaaccaaccgagccaagctgctcttctcgaatgcaccgacctcctgtgattgtggagatccctccgtttgatccaaccatgatctcaacgagtcgctgcataggaaatccttcctatcagccgatttcgcgtgttttgccgttgcgaaaaagatgattgagtcctcttgagcctcttctgcgtcatcgtcatagtcgctgtcatgcttgacttgacggctactgacagactggaagtgagtctcaagaatcacgagtggagcgtgatctaagggagaaggtgagatcggggtatgaaccaatgagtaggaaggagaggacgagagtgttggcaagaacgggtgggtgtatgtgcgtgcgtttagtgaatgaccatctgctgtcgtaggagaatgggaaaaatacgacgaagaggacgaggcggataaggatgaaatctatgacgatgaaacatagagaattccatgggaacacagatctttcgttagccacagaacgttcgaccgtatctataaaagtagatatcgaacctcatcgagagctgattcacaaagactcgagtttggtatcggcaaagctttcatcagccgagacacatatgatcgttgttcgctacagtaaacggactattcgtgaaaaaaagaaacaaaaaaaggaaagcaagcatacacgaatgcgcatcagtcagatgaagagacgaaacaaaaccaaattcagctaaaattcagcgttccaagcacctttctctagccggagaaactggtcgacctcggacgaacactgacctcgaggtttgtgcacgctgatgatctttggagaggcatgttctttcaagtatcaggttttccacgtaatgccgatgtgggcgagtaagtaagaacgtgttgttaggtgaaaacgtgaatatgtgagtagataagaaagaagagatagagatggaaaggtttaaaagggagaagaaaatgggaaggaaagagaaaggcgaccggtcagtttcttgaaaacccattatgaatgaacatggtcagctcgggttctgttgaagcggagaacgactcaatcaagtaggtaagcgaagcgagtgatcggctgatatcctctccatccccaggcgggatcatcccaacggatggaggtttcagctgtagatggtggtggtgttatcgactggagccgtaaaatgccgggtgggcggacataaattccttgttcgggatcggtccggcgtcttgttcgtccgatcagaacgggccgttaaccggttgagtttgacagtctggacgaccggcagcacgtataaatacaccatacacagaatatataacaaaagatatgcgaccatacacattactacgctatccgtacaaaacataaatgctaatgatggggatgtaaaagagccccagaaccggaaatgaaagaacacgaatggagaaggaagaagagagaaagagactcggaaagtatcggataaatgtgcagtcaaggaaatgaatgacctctatctacctcccctctcgacatgatcgatctgttcttcttttttttctctattctcgttcgagagattagagtcttgtcggacatggctgatatgatgctcttcggtcaacatatgaccgcttgtatcgacttcttcgacgatgcctgattgaaaggaacaatacattcagcagaaaataggaataaaaacgctgccgctcgcagttcgatcctcgttcgtgttcgccacgagctagtctctctttagacgtaccgttggattcgaatagaagacctgtctcttcgagtgtccgatttttagtctcgacaacgaaaaagtagacaaacactacttcgatcgcgagccagacaaggtaaacctttcggacggttgagatcaaaccggttcgttcagattagtcgtgactgtgtgtatatgtgaggacaaagagaaagaggagacggcaagggacatacaatatagtacttccatccaatcttttccaatgcgatcggattaacgtattggttgaacacgagcgagccagaaatacccagttgctagagcagagaatggaatggagcaggtaagtctttgcgttttgtctctacaagacattgaaagagaaggaaaaaaaaatcccgaactgaccatgacggtcagcatctttgcacgcatcttgaaaggagtgatctccacggtgtaggccaccaagagaggggtgtaggcgatatcgtagaaaaagtagtagatgtagatgaacgcgaggatggcataggcggcagaccgattgttgatgtcgcttccgacaacaccttcgcatgtcgtccaaaactacgcatagaccgaaggatagagcatggaagaaaaagagcgaaacaaagcacaaggaaaaaaaagaaaagaaaagaagtgagacttgacagaaaaaaaaggcaatagagaatcacaagaaggtcagaccgacgtacgatccatgtgatgaacattccgatgttcgacgtcaggaacaacgtccttcgaccaatcttatctacatagaccgcagcaccaacagcgacggccagattgaacagttggctgtatgtatttcaaggcgaacgcaagaacgaatagcagacaacccgggttagcccatctagtaaccatggtttgtgttgtgtaacgctaaaatggagacggcgtacaggattccgttatatagcgctagcagggtttgaaacatacatggtagacgaatcagcatacatacgtgatagataagcggacgaaaccaattgagacttacactgaatgttctgcgaagtgataccaacaccttctagcacgtccgtcagataatagctgacctgtgaaggaaccgacaacatgagagaaacatgagttacaacgatgcgaggaatagacagaagaaaggggtacacaacaggctgaagaacacggaaaactgactaagccgtttccactacgaacgtatggtttttgggaaatcgaatagaaaggaaaagacagatggttgagcacatagactttgccatcatatagtcatcgaggcgagtacagcttacctccactgggagaagaatgcgatggcgatctgtgtgtgtgtgtgtgtgtgtgctcaagcaaggatgagtgccaagcagagataaagagaagaagacactcgataaaaaaacgtgacgcacaacgatccggagccgctttcggttgcccttggtggcggtcaagcttgcccagctcgtgctgttgtgcttctcgagctccagagactgcgtgatctcggccatctcgaactcgaccagcgggtcctgctcgttgttgttgccggtatggtaccgagccaagacccgctgagcgtcggcgtgtcgacctttcgagacgagccatcggggactctcgggaacaaagtagatcaggcagacctggatgacggaaggcgtggcttgaaggatggaggggatccgccaggacatcgagttgttgatccggaacgttccgaacgtcgtcctgtatcgggttgaggggacgagaaggaggaagggaagaaaggagaaagggaagagaggagaaagggaaggggagcgaagagacagaaacagagccagacagtgtgagcgactgcgacgtgcgcatggtgtgtgatgagagtcagggaacgaaccaggctgccacgatactaccagagtaccaaagcgagttgtaaagagatgtcatagccgccctttgcgtcggataggcaagctctgaatcgagaacagttgcagacatctatgagcataagaaccttgtgccactatggacctgataagaatgaagggatatatatttaccggcgatcaatataggcgcagcattcgtggcgaacgtcaggccaagcccgatgattgctctagaaatgataaatacactaatggtttgctgaatttccatgttccagggggtataatgtaaattgtttgttcgatcctgccgaacaagaagacaaaggaggcaaggcaacaggaacttacagatgtagcttgagtcgtactatgtatatttttgaaacgcgtcttaggtgtcaattcttgcaaacgagttttggacctgaaggaaggctgatcaagacacctacactccaatcagcataatgatcgctatggatcaggcgagatgaaaagggagttcggggatgtcagtggatcggggtccgaactgacagacagatcaagtattgtgtgacttacatccaaccagtattcccgctcgtcttccaaaccgatcggtctgttaggttcaaggacaggaagacagaggttaatatgaaggcgtggagagttagtggaatgtagcactcttagtcaaaatcacgatatagcttaccaccataggagcgaacgggacaccgacgatggtcccgatgttttgtatggcgttcaataagcctaacgtccctccttgaggactgttttaaggagtttgatgaagagagggcttaactcatcatgtctgactgcctcgagaccgctggcaagagagagcgaagaaacgacactgacttgtgaaacttgtccttccaatttgtcagcacttgcaacccgttcatcatcgagccatcgtaaccactaggtgacgaagaggagggtgaagatgagttgaattgagcccaggcgttcttttgatgtctgatgagacatgatgttgggctcactttgtggacgatgtgatgagagcgacaaagagaagcagactgatcgctctgattcctaatcaaacagaatgaataacgaatgagtgcagaaagagaggaaagtgtcggcaacacgtccgggtacacgcatcacactcgtaagtgatatccggggaaggatgttctaacccggaatgcgggtcacacgtaccaggatgtcggtaccaccttcctcggtagacatagggctttcgatcgagagagaacgagtagcgagtcttcagcaaacagagaactaaagggatagctataatttgagaactcacctcgagctctttaggcaagatatcttcaggaggggcagcagcctttgttgtatgtgacatgaatggtgtatcggttgatctgccaagctagatccagatgtcgtgggataaaggaaggcgtgaaaggccagctttcgtctctctcagtaacggctgctgatgagtgtcgtctgatctgacaaagagagaaggagaatgagcgaggaaaagaagtagaaacgacgggagatccaaggtctattaagaatgttcaggtcaacgtacccgacgccgtggtggattttgttctcttgtctggccaacgggagtttaatttcctctcttgtttcttctttctcttgttcttcactcttaatcttacataaagacatctacacgaactcgacaatcaggacgacgaaaggcaacagaaagaggaggatgcagagtacagacctgctctgaacagaaggatatgagcaagcgggcgtcgtgctgaagcagacaagagggtagatagcatacatagcatagatagtcgatacccttagatagattgctctaaagaagatggtaaatatatgaattgtgcctgccagggcgactcttagacaggttgagcttaggtagcaagcgggcttagacagcaatgaaggccgtacctatataaaatcaaatatagatttgattaggtaagcaccacggacctccatcgaatcccaccaaccaacaggccgacaaatgcagtagtttctttcttcctcgctctttccttcagacgaccatccactccagtgacttgaacgattccaaacacatattctcttgttcctcgtcatgtttgccagatctatccaaaaggcccttgtgagttttctgcgttttgttctgtcttttctcctcctccttgctttcttttgggattagggattcagaggagacatctcgctccgcttcttttactcactggtgtctcttcgtcttgtatggttctctttttcgcttttgatttctttctctttcacgtacaggctcccaggtcgttccctttgcttcgtacaccgagctctgctttcgccttcctcgctcatcaacgatctctctctcagcaggctcgatcggctatcgatgatgtgcgtccaggtttatccttccttctttgtcagcttatgctccaagagaaagatgtgtaacgtctttcatgtttcatgtgctaatcgactactctttcctcataggccgtcgcgtcgaatcctctggtagtattcatgaagggtacccctgctcagccgatgtgcggcttctccagagccgtcatccaaatcctcgacgtacatggcgtcgagcctgacaagctcaagacgtacaactgcctggatgatgccgagctcagagaaggcatcaaggagtactcgtgagtctttcatcatcgtcttctttgtcttcccttgtgcctatatacgttcctccacaacatgtgctcggatcgagtgtcttgtgatcggttagtagagaggcgaagaaggaaactgggtagaacgatgccctacgtcggtcattggtcaatcatgcttgcctgtcagccatcgtccaatcgtatcgatcatccttcttgcattttccctctcttcctattgcattcaaatctatcacacctctctgagatcgcacgtcatgaaaggcctagacattgatcccttctctcttctttcttcatcaaaccatacatatagtgagtggccgacgatccctcaagtttacctcaaaggagagttcctcggtggatgtgatatcctcctcggaatgcactcttcgggagagctggaggagcttctcatcaaggaagatatcatccctgccgtccttcccactccaaaggagggtgagagctcatcgtagtttaaagcaaaatcctctttcttcgtgcctcttcgagagtttatcttcctctctgtctccccccccccctcattctcactcaattcataaatcaatttataatattgaaatgtatttgttcatgactattaagccttgtttcctgtcttgattgtctatctgctctacatcatcacaatgctagaacaaaggagtggtttggaacctcatgtatattcgaaatgcgtgcttgatgaacaacgaaggaagagaaaaaagaagaggaaaaatacggatgggaatgtatagacgagagtcaatcgaggggttgtacaacaggatagactgggtggataaaggaaggttctttcgtttcctagagataaagcctgatgagtagggcaaaaatagaaagggaattggaaggtaatcagtatcaaaagcgggaacgaagagatgagcgcgagaatataatgagaaaaaaatacgcacgaagggttgaacactacggagttcggtcgttccaaaagctccaaactcttcataaacttgtcctccaactcggtgtttccgattgcctttgctgcctgagccatctgcctcagcaactcttgcaacctcctgaaagctctaatcaacgagccttcaaatacatccgtcatcttgcaaatctccgagaactttgaaccccgacaccacatcagcacgcagtccattagttcgaccttgaactgttgaacgtattcctcttctaccagaggcagcttgcactctcgacacactttcgcgatccgtcgggcgttctcctgcatcactcggagaggagccgccaactcttcctttagctttgtttgttgtgttgactgtgatattcgaaacaatgagcaaaaggagttaatacaaagccgaagaacaagagaaccttccaacacaaccgaaagagaagagagacccaccttttcttggaaaacaaagcaggaaagcaaagcggcacaatgctctggctccaacgtgttgaaaacaccaccaaacatcatttccgttaacaacaactcgtctcctgtggagatttcacaggccacccttcccttcatctcgatcacatcgtcggcggtggtgaagcccaaccgacggaggactcgttttcggcatttgagttcatccaactgaagcacgttgtgaaccgccgagatctttttcttcagcgctcggatcgaagccgtccgggcgagtttgtcggtgtattgagcgtataactctggaagcttggctgagttgtgaagatccgaagaggtcatcagcttctcaagcgttcggatcttttttacaagcgatttgaacgcttcatccttgattcccatgttttccacgggatccaatagagcaattccctcggggaatctcttcttgacttcgcccaaagctttcatcacgttctgtctaccttcgatcggcctcagatcttttggcataaacactcgaatgtgactcaagctcgagatcgtagacagcaacaccggcaccaccaacggttcccccttttctccaggcggacaaggcaatatccgggttccaccagagcttcggtctttagagacaaccgaaccagtcacacagttcaacaagacgtccacaatgtagtgcgattgaggcgtatctgctgcatcgggtgcaggttctttgcccttcggagtctgtctctttgaaaagttaacaacaataccccatccgaaatcgacgttgtcgtgtcggacggtcacgagtcttccggcctgaaggaaaggtaacgagtatgtcgggtgagtgattacatccttaaagtcttttccaagatcctcgagttgtttctttcggtcgtggtactcggctatcgattcttcatctggaataaccatcgcgtctcgttcttcttctgccactcgaagctcttgaaacaagcacgacgagagaaaaagagaaagaaaaatagaagagggaaaccgttcgatcagtttggaagagacaaaaagatgagaatgattcaagaagagaaggtctcaccttcctccaaccgaggaacactctgagtgttctggaactggaagaaacatctctctagcatgaactcgggactgatcccctcaactcgaagcaagttcaagatcatattgtagcccaggtggaaggccgaatctaatcgatcactcaaccctttcaccatcgtctttgcatcttccggctcgagcttttcatcaaccatcatcactacgattccccgttcgtccaatcctcgtcgaccagctcgaccactcatctgaatgtattctcccgaggaaagtgttcggaactctttcccgtcgaactttcgaacagagttgaatactaccgtcttggccggcatgtttaacccgatggagaaagtctcggtggcaaagagaactttgatgagaccctcttggaagagaatttcaatgacctccttaagaatgggaagaagacctccgtggtgaattccaattcctcgcttaagcagaggcaataacgactggatctgaggcaactccctgtcatcctctgaaagtgcgtttatggcgttctcgaacacggactgcacaagggatcgttcatcctccgtgttaaactcgagcttcgacatctgtagcgctagaccttcacattctcgttttgagaaagcgaacacaatgaccgggttcaagttcttgaccatgatcattttgacaatcttgtagatgtcggaaacacctgagtgtcaaagaagttgctcagggatatcagtattgttttgtttttgcgcgaaacaatagaaagctaagggttgcacatacctcccttctgtggccccttcttcgttttgcctttcctgccctttccaccgttcgggttggccgggtcctcaccctcagtgatagcaagtccacccatagcctttccgaaattatcttctctgaattgactcttctcgtccaccacaaggtagattccatctccgccggacggaaatagatagtgctggagcggcgttggtcggaaatcggtatagacgacgtggcagggctggtgatgtgtcttggcgatccattctgcgaactcaagcgagttaggaattgtcgccgagagaaacacaaagtgaactgtaggtggcaagaggatgatggtctcctcccagacgactcctcgttctgaacgaatcagacggtacgttgacaggaacgacggttagcttgctggatgaagctagtaagatccataggagaaaccgaacggacctttgtcacgcatatagtggatctcgtcataaatgacccaagaaacttctcgcatgatctcagaacctcggtaaagcatcgatcgaagaatctgttccggaaggtgtgtgagcgagggcagttgatgaacaagaaagaaagagagggcgccttggaaagaggctcacctcggtcgtcataaccaaacatgaggctgtcgggttgatagtcacatctccagtcatcagtccaacgtctccgaagtcggcaagaatatctctgtacttttgattggagagcgccttgatcggactagtgtagatgactcgctcctttctaccaaggcactgggcaatcgcgtactcagcaaccactgtctttccggcggatgtatgtgcagaaacaaggacagactctcctcgctcgatcgaggccactgaaaccttctggaaaggatcaagctcgaacggataggaccttgccggtgggttggccggtacgtgttgcgagatcggtacgtacggataggacggagggatagctactctgtgtctaacctggtgagtgagcttgattccaccatccggcccggctgcggcatcaccagaagagggtgccgaaccgtccaatccaccagtggttggcttgagctctcgctcggcctcttgctcaaactcgtccgcgactacgggtacgatcacttggtcatcttgagtggtagatgaggctaattgcaaagccttggctagagcctccttctccttgagctcctccttgtccaacaccgtgatctcatctttgtcgacatctatagaagtgactcgagtcttcttggctggagattcttcgacatcggacacgtcgtccaacttgattacaggggagggagcggctgaggtggattccagaggcttcctctcctttttgcgtttctttctctcagccttatcgaccttggctccccctgctgagggaagaaaagagaacagctgatcgttatccatatggctcactgtcgtatgttctccctaacgaaaagagaaggacagtcggaaaggaaagagaggaggaggagtataagtatgaatgaggaatattcgatgaaatttagctatgcttcaaattgtagttagatgcttacctaatgttcatatcaggcacgcctcgtagatggccgggggaggagagggccaaacaggcacgagcgcagttttcaggaacatcgacgttgccctgagttccttcatctcgtgttcctataatcctgaggttctgttcctgaatcctccctcgtcccctatctgtccttcctccttgaagggatctctcctctctccgcttgggttcatcatgccgttaacgacggccaggagaatctcatacgtgattccacctccccattcgttgccgccttacctcagcttgccgtcacccactcatcctcggaatggatctccccatcccatccttcttcctctgtccgagccaggcatttcagcatccttgtcatcctcatctttctttccatcgtcgacatccgagactgtgtctcatccccaacatcatctcgggatatcagcattagcattagacacgtcaactcagctgagcgggaaagacactccagagggtatcttatacacaggaggaagggatggcctggtcgctagttgggaactcggcgccaatatgggaagaaaacggtcggatggagggaacgaggaaaatatcagatggaatgaggttgtcgatgatgatgattgggaggatgatgaagaagacgaggtgaaatactcatcaaccgctgaaaatcttgaggaagccgacgaggatactagatggaagcggatgccttgggaggatcgatgggaagctcaggtctacgaggatggctctactgttagtacaagtttatctgtgataccttgcgacatcgtctgcaatccttttggacgcgtatgttgacagtatttgcttcttgaaactacacttagaaacctccggaggctacatttcgacaatgcatgcaatatcatgtaagtaactgctgcagccttgtcctttggaaacacgatctgacctgttttcaccaatctcccatagacggactgggtcaatgatatccttctctgcaacctaaatcaaacttgtaagcacagtagccttcaccagcgtgtagcgtatggtatctcactctttgttatccatttctcttttctttctatctctatagtaatctccgcctcatccgatcggacgatccgagcttggtcgccgcatacatcgactccagatcatcagcaagctcctacaattattggcactcatactgactacgtccactctctcacacattcgaaacacaatgcctgggttgcctccggcgggtttgatcggcaaattaagctatgggatatttctcaaggatcgtctcacgcatcaacctcgctcacgcccggcgccgctaaagggcctgaacctatcatagtgctcgggagtggagacgctggagaagaacagatcagaagtgtgtatagcttggagaccaacccaagtggtagactgatcgttagtggaggaccggacggcgtcgttcgaatgtgggatcccagaactggtggaaagcagatcggccagttgatgggtcacaccgaaaatgtccgagctcttcgtctaagtgaagatgggagatttgtaagattattcttttacttcctggaattcagaaatgcataagatataagtggtaacagatgtccatctatcttgctttctcaagcttctctctggatcgtcggataccacggtcaaactatggtccatctcatcgcaacggacaattcatacattcactcaccattctgctagtatcaccgcactcttcacttcgcatcccaatctcgaacggttttacaccggagatctttctgggcacgtgtcaatcgttgatctccaacgatgctccgatatctcagatggagagtgtatctcgctcctccaagaaggcgtttcttcagaaacgtcttctcctacagcttccaaagacgaagaaccaagaaatcctttggctaacaggggtagtgttgcgatcaacaagattgtcgcgctggatgatcagtatgtgtggacggccaccgcaagctcgacagtgaatatgtggaaggacgttggccgtcgaatcagacggaatccagcgtttcgctctgccaatgatttagacgatcagtctagctcagcacattcatcagccgacggggtcttggttggtcatcacgaacaagatgaagaggaggagagttgggaggtttcgaaagaacaaagagaacagttattggccgatgagttcaagatgcctgctaggacattcacaccccctggcagcgagaaaaactcgccacgaaactcgtggcataccggatcaatcgggttgagtctgccaccgcctgcgtctccttcgcagcttttgacggcagattccagctcgcccttctcgaataagacttccattctcaagcctacccaagttcgaaccctctccggtatcacaataaaacgaggctcatcggattcgccgtccatcgaaccgtcttcttcaggattctctactattttcggtcatcgaattcttcagactcagctagaagagcccgaatcgaataagttattttgtgatagagttccttatgaaagcttgatcaatctctccccactgaacgatccctacgagtttctatctcctcaccatcatcaagcgaatcccgaccaggtcacgcacttttctacggcttccattctatccttaccgactcgagccaagcctcaacctattccttctgctgtcgctactgaaatcctgggcgtatctccctccaacaccacgagaggtgatccgccttctatgcgtcctactccgactatgcaaacgcctaatcttcccagttctgacatggatgtcactcctgaacgtggaacaggagcgagatttaacttgcccttaagtagggacgcggagagagaggctaggtcgaagttccttcagagagagcttctggttgatgctgtacctttcaatcgggatggtccttcaggagctatctatggaaagcacggtctggtaaggagtctgatgttcaacgatagacagcatgtagtcacctgcgatacggccggaggttagtatccatcttctttctaattcatttatcattgcatgggcttggcctcgctgacgtcgtgaaagtacgcactatcgaaattcaacttccagtcattgctctttggaatattgtgtttggccaatgcattggcttgattgactcctctgctgtcgtcgaggctcataactcgatgtcgacttcttcaaagttaatcactcctcgtgacgccttagagttggtcaaggagcgtatggagggagaggcggtggttccaacgtggtgctcggtagataccaaaattggcgggcttacggtttcattggagagaggcagatgcttcgacgcggaggtacacctggatgagctgattttgcgagggttacagggtgattataaggacgatcagagaggtatgcgaccgcatcttccattcagtagcaaataactgccatcagatttgaagtcaacgtattgactttggtgtttgatattctcttagtctctctgggtaaacttcttttagccaacttgtttgatggtaagagcttcgtttgtgttacacacaaccataatcttcttgagatgttctagctcacgcaaacatttctgcaggtttcgtcaaagctgaattgttgcggcatcagcactcaccagacgagaatctgtctagaccaaccaagagaagcactcaaacccctcctacctatatccccctcggttctaaggtgatgggcttccagtctactagccagccgccgacaccaggcggaatgggagccatgtctgctctagcgactccggcaatgacggccgctttagcgccgactgacgactttttcagttcaaccatcaagaaagattacttcccaaaaatgacctcccctgttgttagtcaccagccacttgagattccgacgacgaccgcttctatggatacaccgatgagtcctggcgcggtccagactcctggaggaagttttatggggaaattcaaaggattcggaaagaacaagaaactgacggcaggaacgacgccagccctgcctgtagcggagatatcggaggaggaggctcagagacttcaagatgaagccaaggtctgttttgcttttctattttgagacaaaagtgaagccatgggctatgagctcatatgatgcgggtttgccttggtattgtagtatgggaagttagctccgatagatttggagcagaagcggcttcttgacactttgttctctaatccgttgaatccgcctaaaccagcggagattccactgattccatctctctcggatgtggcaattgtcattgacgaagaatcgagggacgctggagcgtgggcggtgacatatcgaggatcggttgctcatgcttcccatgaagtcgacacactagaaatgacgcttccaagttgggtgttagaatatctgttggcaggacgagttcctgtcaaggagacggtcaatatgagcttcgtgctggaaccctgcaaattcggtttaggtgcaatggctgagatgcccaacgggtgagtttgaaccaagtttgatgcgttgctactttattcgtgatagctgataccatcatttgctatcgatctgtgatgggtgtagaaattcccgcctgaccgctaatcgtgcgcttcggattcgaaagatctgtgcatatgtatgttctcgagtatcgtgcttttgtgttcttcttatgccgctgctgactccccctttggttaaacaaaataaaacaaaacagatttttgatcgtctgggaatgggccctccgatctcccgtcggccttctttttccacgccacatggttctcctaaatcacatgcggcctctctgccagccgttcctcattattcttctatcggcttgccagtgtctgacgagcttcctcgaagtccaccacccgttcgaccagaggacgtggtagagcttgtgtgcaatggcttggtgttaccaagcaatatgacacttgcagcggtgaagcacttcgtatggcgtcaaggaggagacgtggtgttgtcttatcggctcaagactcagtttgaaggtgctcagtttgaggaaatcaacacaaagaattaacgaatgaacgctatgggcaatcattcgcttccacagatggttgttgatgcttcggtggttaacgacgtttgtttaggggactatagatcgattgagggcaatcttgcaaatttattacatagtgtgatttgataaagtatgatatttcgaacagttgagaatgaaaaagaggccacaatgtattatatgcaacaatcagaaggagcatgataagataagaaagagcgacgtagttcgaccgactaacaggatgaacaaaatcgatatagctgataccttgattgaaaaagaaaggtgcccgaaaatccaataatcatagtgggaagggggaggggggaaaggagaggagatcacgaaaagagagaaatgaaagggttaaagtcgtcgacaagtctgataaaggtaagtacaaactctggagcaattactattctctgccccagatctttccccactccatcaacccggcaacaaccatttttgtttgattatcctcctgcagatattctttcgcgaacgctgctgcgttctcggccattaatcggccttctccgtcataccgacggaaaaagagtagaatcgaggcaagatccgaaaagtcgggttgcactggaacgtagtgtttccacggaagcgcgtgatcctgccacggttgaagttctgctgaggcgtagaagaccacagtcccaattctcatggcttcccaaggtgattctccgtctaggataagagcatacttgtgctttgatagactttcgcccttgggttttgttgggaatagcttgacgaaatcctcgcagcccgtctgacccgtacagtgaactttgtcattgaacgctccatccacaagaccgatcgtgtcccatagttgatttgtcgatccaattttgcctaaagattgacctccaaagtagtatccgtactggtcgtcatccgggtctgaaggtgggtagaacgtgcgttgaaacgtctgaggaagagggttttgagtttgagcaagaagacgataggcttgaggaaggatggtcgattcatcggtaaggtcagccgatagaagaggaggcggcgttcctcgctataaattaatttggagcaacacaggtcaccaaggaagaggagagattcaaagctcagtcagcatcagattgctccaaagccctcttggaggaaaacatatagattgatgatgagcacaaacccagaacacggcatctctctcaagcttattatcccaatgcacaaaggacgccagagcgtttgttcgttcaaacggcagtaacacttctgctccgatagccaatttgcttgtcgccatcctaggcacaggctgaaagtccgatggtggcggatccgatatgaatgttggatggagccacatcagcttgggggaagcgcacggatcgagagcgagcgcatggtgatgaataaggtacgcgtctggtggaaaaagaaaagagtacttcaaatacggttagtatatctagaaagaaaaatcgatgtaccagaaagcttcatcaaggcaaagccaggcatgaaagagctcggatagaagctgagaatgcagtgagtcagaaggacaaaccaagttgcctatctgctcttgtcaatgatttaggagatataaattttctctttgattgtcgatgaagatcggcttctggcgcgcatacttgagcccaatcacgatactgggctttgtaagtcttgtcagagactgtggctatggggaggattgccgaagagacaaagacggccaataccagatcagcttagcaacccgtctgtaattttagaaaggatgaaaaacggaaggagaagaagtagacgccgtaatgtggacaactaactttcgcttcgatccagaatgccatatgggatgatttgcggggaaacaattgactgacagattgaaaatattaatgtcagtctcaaaagcaaaaggcacccgaagaacaggctgaatacatacactatgggagaaagtcaatcttagatcaggaagtaactttctatgaggttccattctttttttccaacgagtctccgatcgccttcaatgaatctgaagtgctccatgggtagtctactccgacgtggccatctgagacgaagataacgaaggcttcttcatccttcgatgaaaggggttgagcctcaagtgcgttttggcgagcgtgcaatgtggcaggaggaatggagaggtagggcgcgagagagagaggagagggaaaaaatgggagagtgttctctgagggttcgaacaaccgatccagatctggaagaagaagaagccataagagaaaaaaacaataagagatgaaagtggatatagagagagggacggagatgcttacgagcaggaggcgaaaccccaaacttgagctcgtaatatttcaaaaaaatcagccgccttgcgagatggagagcgtatgatcagtatcaatctgttctggttgaaatgttgatggtatattggtaagattgaattctcaccgtcttcggagctgtgctaatcgatgcggcccatcgatcatccgcctgtattcgtatcggggacatgagagtcttcttagcacatgatttcaaaggagagcatgccgaacgaagaagaaggatagacgaacatcctggatgagctcccagattggatgatgaatgaagctgatgagctctacagcgagcttcccgttttgttcccaatgatgctggagtgaccttccatcgcccacctcgtccatgtcaagctcaccatcctgatctgtatccttgacaaaccgaggctcgtcttgatcggttgtcttgaggtattccgagctaaaactgttgttgactatctttgtggataccgtgtggagaaccgtaagatgaaagaggggatgagaaaccgatcagtttttagtcccttttgaccaaggagggttgaaagaacgtctgaagtattattcttgcctaggaaaggatgttgcaatcgatgatacccctcctggatgggagatcttcctgtccagactagcccaaaaacgatacagacgaccacaaactttccccatgggctgagtcgaggtcgatgtcttcctgatgaacggctaaggtgacctggatgagggatagagtctgatcgactacgctttcgataccacgcagatgagaaggctgaggacatttgtggaaggcgattatcgagtggttgagatcaaagcaagtcaaaatcaaagatgatggacagggtcaagatactaggtggtctgctggatgagttcaaaggtatcatttgaactcaacgacacggttgctgtaagcaacatctaaaaataagggccgaagaagaaaacatccgaaacaggcacagatattgaatcgatagataactatattaaacatcctaacttgcctcacaagagcagaggctcggtgaaagatcgacagcggatccttcgccgtccgatgcaggggacctgaacaggcactgggaaggaacggccgctcttattcttcttacattatccgcagtaagcgagtcaaagcccgagattcaatggtaaccctaacggttacaactgtgactaccgagactcttgcgtctttcgctattgtcttatacagctcaacatgggtatgatgctcatctatagccacctcccctcaacagagctccttttctctgatatgcttgccgcctttgttctagagtgcgcaagaatatgtgaatatcaatgcatgacctgagatgatcaacctcttctagataaatgatgtaagaacacataccatccgccaacaaatcagctgctaagttaaccttggctgcgagctcggtgctgccacctacaatgtccgggtgacagaccttcatcctttcacgccatgcctgcttgatatctgagtcagtaggaaaagtcgttaggccatcgagcggtatccgtaaggttctatagtgggaatccgggtcgtgtatctgtaggacaatagttcattagcaaaagaaaaggaaaagaagaaaaagttatcggagggcgaaagatgccatactttatgatgcgatcgaccagcacgttctttcactcggtttttctaaaaccatgaagatgcagataaacaataagggaaccgtcgaatgattagctccaacctcgtttgctgcgatctttgttcaaaatcagacgtacatataattcagccgcggcacgcgccatcatgtcttgtaaatgttgtctagcctcctcagcttgaacacgctatgaagaaagatttttttaagccaaacatcagataatgaaagttagggagtctgaatagttagctcaagagagccgattttccacttgatcaggcgcataagtgtggggaacgaacctgttgtatccgcctagccttattcatctttgcattctgtgaacacatcccgagttggtcagagtagagtttccagcttgaccggcatgctcacaatatggaacgatgacaccaggaagaaaagagtttgagcgaacgagtaatttctgatactgtctggccttcttctcctccgctggggatctttgcggttggcacgtgtcgttggtctggcacaaccgtgtttgtgtcagattcaagcaagtttcacgcacagcaagagaggcttgatagcttacctcctggaattctggttcttcttctgccttggccttagcttcttcttgtatccgtcgttcacgttctctcctcttcaagtcccgttcacgtgcgatctgccaagtcgatttcacccgataatacatctttcccataagaaatgaaaaagtgcacgtgctcattcttttagctccgagacgaattgtggattcagtgcataaaaagaaagaaaagagggaaaggatagagcatacgtcttcgtctaattgcttcttcttggatgcttcctctgcccgaagtcgtttccggtcaagctcactctgaagtttacgttttccttctgaagtgtttgccttgttcttttcctaggaaattaagtttagaagaatcgatggaaggaaagaatcaaagataagccaaacctctcgatgaagccaaccagagctgagataaagagcaaggaaaactgaaataaagagcgtaaataagcaagaggtatcgaaccttttctaataatttagccttacggcgggaagcacgttccgcatggcctgatcccggagagctgacggattcatttgatcgcgaggatgagaaaggtctcgacagaaagaaaggcacaaagtgagactgtagcggcggtataggccggagaggaagcgaatgcgagctagaagtaaggattgtgtggagggccctggatgactatcaacgaaagaaaagggcgttgttagtcctaggtatctctgaaatcaccaaccggacgatggggtagaacaacaccaacccgaacagtctgaaaaggaaacatgatcaaggaagattgagaagaattcgatccgtcggtggccgaatgtctctagagatatgtagaaagagagaaggtgtgggtgataggagatacactgctttgccacaagccacgtgacttttcatgctgctcagatcacgtgtcatacataaccacgtggatatcacgcagacaacatctggatgcccacacacattcacatacgcataccctgagcacaacaccccgttagatcgagagagcaacgatggcgtggagagagcagaagtagggctggttgctctgcatatcagtatgggagaagtctgaaacaggaatgcacgactccagacgaaccaaacgtggtcagattagttcgatccggagcggaccaactgatacgatgctcccaatacgtcactcccatcggatatggtataaagagtaagcgatcacgagttggttctcttctcttccttccttccgttctcttcatcgactatcaatcaccgttgtctttgtaaccttgcttacatcacccatcacaatgtccatccctattcgaactctgctccgatcgtcctttgcccgaccctgtgtttcggcagttgcttcccctgccagactcgttcaggcaaggtacatgagcaagctagacgatgctgctaacgctgttcgtcaaacgcctttctatcaagtacgcttgatcttgtgtccctccaccttggccgctgacattttgtctctgttttatacgcaggccaaagagtttgcatctgacgtgaaagatcaggtacgcctccttgctggtttgattgagatcatccttgctttgtctcgctctagaaaacacatcttgacgattacttcctcggttcgttttcatcagactcaaaagaccaaggatactctgctcgagaccaagacagacgacctccccgacgaggccaagaccccaaatctgaccaacgtattctcatctcagggaactgcatgggaacaaaccggaaggaagaacacgtcggcagatgacaagatagagaacaggctagctgggcaagatgttctggcagaaggagcaaaggacaaacctaagaaccagtaactcctgcgcgggtggagagatattgagtgtgacggtagtcagaccaaaaacctcaaatataatctaaccttcttcaggacagccgaatgtatctatataatgcatctttcaaaagctttgaaatgtacaatcgtgtgaacaaatattttagagatgaaccgagacatcataggaagaaggagaatccagagagaaggaggagcggcagtaaggataaaacgccgatgatcgtttggaggtttcttaacagatccccaccgtcatcctttctgtagaccaaccatcaccgcgccatcacgatcgtcgtctccttctcttctcttgcatttactcttgcatatatacttcgtatataatcagttcctcagaagtttcttggaagatgtctacagtctcccagctctcgtctttgacattcatcggtgtgtacaactctgggttctccaagatggtggcaagacttttcttgtcgatattctcacgctctcttttcctttcgaatatgtgaaaatgtctgcacacacatatagatgaggagactgtgaagactcaactgattccctacctggagagcttcaagtcgaaagcagaccttcaggatcatctcgaggtgtgtgttcttatccaatctctcgtattcctcacttgtcctgatcaccagccgctaaagtgattctccgcttgctatgatcaatgcagaacttacttgggaaatcaactcctgaatcacaagcatttatctcttcctaccttttcctccggtttcctccgtctctacctactcctgctcctatctctgctcctgctcctgttgttgcttcaaaaccaaagccgagcacaaaaccaaagaagctcaacccaaacggtcccaagcctggtcgtgactggacgaatgactttggcgctacaggtacagtctatattaaacaagcggaagagagctggagtacgtctaacagatcaggatcctccgatgctggcgatgttggaagtagaggatcgagtgggaggtcgactcccgtccctttaggtggaacaccaagcatcaagatcgtcccctctaagaaatcttcagcagctaagactggatcaatggtatcggatatgctgaaagggaccgggctcaaagtggttgagacaagcaatcaatcgaaaaaaccagttgaaaagaagagtgccgaggtcgagcggatggagaatctgatccgagatgtggagaattacggggtaggaggggatgggttagggaagcgtgcgttgaagaaaggtcgggctggaggttgcttctgtcgaggcatgtccatctgcgcttattctttcagagtttccgtctttcttaaaagttcagatttattgatagttttgctcccttttccagcccgagtacatccattatcgtcacactgccctatgtgcccttcgtgctcactaccactttgtaaactccagccaccgttccttccctgcccatcctgcgtctcaccgcttttgacatcctcctcccaacttcgtctccttgctcaacttcaatcagaactcgccgcccaactagcttcggaacaagctgaacgagaccgtgtcatacgcgaagccagagaacaggcctggcgggaatcatcaggaggagcgttccctactcttacaccatcgacagctgctgacaagcttaaggaggactccgatgggcgaagggtcatgagtctaaacgccaagacaggaaaagtccaaatgacatcttactcaaagaagatttctccagttccatcctcttcgatagatgaaactggctctcaacccaagggagaacctgacgaggaagaggagatcaagcgaacggaaggacgagtacggaagccacgaacggaacctctcagcttagaggaacgtaaagaaggctgggaggccgttagtcgagaaagagatcagcttgctagattctttttaaacgtcagtgaaggatccatccaagcaatatacaaggagatgacttgcgaagcgaacgcagaggacaatcttggggaggttgaagataagaagtcgaaaagaaggagaggaagagggaaaggaaaggatcataaagaagagtcaggcaagcccgattcgatctcaacggtctcagatctagaaacaaccacggggttgacaaggaaagagagaggcaaacaaattgaagcgcaccaagtcagttgactctatttttttctcgtctgatactttcaaagagaagaaaaaccgaacgcaccggctcatctgttcaatctcttgcttgctttaaatctcaaaaagacgaacaaccagccgcgtcacatttcttcagacactgcagcacctccgaccaccgcgtccgctcccatcgcctctacaacgagcactacatctcggtactctccttcgcatcctccgccagttaggttgctccttccaggaactaaagtacttcttatcaagaaggaggatcagccgacgggcaagacaactgcgggggaagtcggagaagtccttacgcgaggggatcatccaaggtttgttcttccgtttctctctcttcgcaaatcttttctttttgatctgatgagggacgtacaagacgcaagtaaaacgtttcatcgaatgaacgttccgacactgatccgctgttctcgctatttcgatccaaagaggagtaaaagtccgatctaaaaacggaattgttggacgagtcgtaggattgatatgattcatttcactcttaaatacgctcgatcggatgtaaatgtaaatgtctgaatgccgcctgagatccaaatgtttccttgggtctgtggacatggttgataatgtcttcagagttgcaatcgtagtgtgaaacacgatgatgtatatccttttgtgggtacaagaagaagatctcattatgattaatcttgtcgaaaatagagagaaggcagagagctaagtgtaaaagcagatttaagaacgaggagattgcaacagaagaggaaactgccacgctgtgacaacgatatgacgagaaaaatgaaaaaaaagaaagaactaaagggatcaaccgccgtaaggaggcgcagcatctctatccgcctcaggctcgacaccgtctacttctgcgggggccttccttctgatgttcagtggtttgacattgcctgctggctctacgtcttcagataaacctccatcgctgacatcaccttcgggtgggacgaacccactgctcgatcttccaccacctcctcgcttgaagaatgccccagcgttgatctttccgtttccggccgctcggctgacaggactgacagaatctgctcgggcagcgacggcagcagctgacgctccagatggggggtgtgcgactgaggtgaaggcaaggttatccatctcgcgctcaacttctcgttgagcggcggcagcggccagagaatgttcatccgtcggttgatctatctgttgggagtacggtcggggagaagccttcacagaaatgggcgagtcgacataagaagaggccgtgccgtaccgagttggctgaggaggatgcacgtaggttggagacgaggcggaaggctcaatgatggtaggaggtttgggaagaggctgttggtatggttgaggaggagaaataggagcggcaggctgctggaaagctggcgtcgcgagatgatcaaaaagacataagcaaaagaatacaatgctgtggcgagaaaattagagatacttaccacgcgatgcataattcacatctccgacgtcacctcgaagatccggcgtaccttctctggcatccgaaaacacctcaggctcactcatgggtgtcggcgctctagctccgcctacaaatgccggccggggaggctccaagttgatttcttgatccgagccgagctcgtgagattgtcctaaagccggagaagccttgtcatacgcgagaagagattcttggccttccgctgtcgatgaatgtgttggaactggtcgccgataactcacagaagatgtatcctgcataggaggcaaattatgagtgggttcatcatgaacgataccatgctcagctgtaggagacggcgcaaattgatgagcgtctgctgtagaatccccttgatggttgggaaagttggcggtcgtatttagcaggtttccatttcctacagattgtcccaaaccaaggctcaatctgtgatcgcctggcgatggtcgtggaggttgaccagtaagatctggagtcgctagggcgccccccaaagcaagccctgccaagacgtcgttcggatcttcacccagagggatctcgttcccgtaaccatcgtctcgcgtgttttgcacttgcttggctgagccgatggaggcgtcgacgatgggatctgcacttgactgagtcggagatgccgtggagaacgtggattgaggttggtgagaagactcctggaagctatcccggtaagcggcagcagggctgataggcgtattactgactccagtcctttgagacgactgttgttgatgcgcgattccatagctggttggctcagagccgttgggcgatgtcactgtagacggcggctctttggagaaccgggcaggaagctcgaagttgtcctcgtatctcgaatgatcttcataaacatcatcacgggcggagggatattgagaagcctgagtttgagccagatttggagtatagggttgtaaggtgacttcggcgcgggtgaaatggacttcgctaacacacttgtttgcttcgaccgacagtcgagtcgtcttgtcgaaagcttcagatagccaagagagatcaaaacataagttcaatcaccagaatatgagatgattcacactaccgccgagagatacaacctacagttatatggcgctcgcccgtagcctggaggagtgatttccaacggaatttcttcaagaagcaattttccaagctctccgacgatctgagattatgcatagaaagagaatgtttgacttgaacttccggattcataaaacgatacgagaaaattgagctattacacatactgtcatcttttcagcaagttccagaagaccaccaaacttgatggacagagcatctttggtggctttgcgcttgaagtcagaaagggatgcttcggtgttcataatttctgtgtcaagcttgagagagtcaatgtgtgtcaatatggtaagttctatgcagcattaccataagagaatctttacttacttcgcgcatctcgtctctcaaggattgcatgagctcagtctgcattggcagattcttgttctagataggagaaatcgaacagacatatggccgctggactaagtataaagtacgggtagagaagactccctagatcaaagaggagaagaaaaaatgagactgacttccgaactcatcttgacaagcttcttttcctcccgctcactccgtgatcctacagccttcctcttcttctttgtgtcatcaagggtttcctccatcagtctgatttctttccaaagacttctaatgccgacctgcctatcggcaaacttctcaaagccgtttgccactagatcaagcatatcagccgcttttgaacagacgtcttcgaggtcgggaccctcagctcctccccaagcggaaagagcattgctggaccgatgaacatccgaactggtccggatggatgcctggagcacagccttttcctcagtaatgagtgtctgaagaagtcgaagatccttgttcccgaggatgggaaccatggtggtatgggcaatacctagagtttaaattcgaagcatgtacctcgcgtcagatgctgggagacgagcgagcagagaaagaacatatatatgtcaaggtaagaatacaagactggacgtgaacctacccgctttagctttgtcaaagatacccatagctgctcgtatggatgggtgatggattgagtgatatgagcgttaatcgtcaccagagaggtgatgaacgagatggctcttaccgggccgcgtgccaagcgtcaccgccactttatggttacatccatctgaaacagccattccccaagtggaatgtttttccgagacggatcgagattagtcctcgtgtacagaagagagaacatgtagatgaacgacacatacagcggaagagatagatgatgtgaaagaatgtaactatctgtttcttttcctaggttaggtatctttcttcgacatatctcagacaaaaaggcatgatataaattcctagaccgcaacctacaatagatcttctcgtactcttagtcctatcttttctttttgactttccatgccgtgatacccatcaccatcgccgttatcattttagctgccttctcccgctaaattctctgccttactcgtaaccaactcatcttctctccctggagtcttcccgatatctgcctccagctcgtcgaggaggagaaccgtcccttcttcgtcgcggaggagtctcgctgtcctgccttcgccgagtggcaggaggagagacactccttcgtcgaggaggcgtggagtcttgtctccgtcgagaaactggtgaaggagatcggcccttgtatcgggaagcgggaggaggcgagatatcctccctccttcttattcgaggaggtgtgctaccatcccgtcgtctagtccggggttgaggggaaggtgaccggacaggagatcgcgagtcaaatcttcttcgttcagcccggggtgagggcgaaggtgatcgagaattcgagtaccgtcttcgtcggggaggcggggtcgatgattgccggcgtcgtcgaggtggaggggatcgggaccgagatcgatcagaatccgaatccgaatctgagtccgaatccgaatccgaatcagaatccgaatcagaagagagcgacgaggacgaatcggaatcagaggacgaggaagcctcctctagagccttctgacgctgttccaaaatcaacttcggcatgttctgatgcatttaaagcaaattatgaccaaggcttggatcagtactcgagcgaaaatttataggaaaacggaaagtcaacgacataaagaaactcaccgtcaagtgttctctcattttttcggtaacagctcccataccgatagaggtaaagtaattgatcgagaatcgtgtgttcttcgggttgtccagcgggaaaatgttgacatatgcgccctgcatgcttggctcgccgaaccgctccgccatgcgcttgataccaagctcctcgaccatctctgtcatgagaatcttgacaaaaatacgggaggaactcgtcgtttcgtcctcattcatacgaaccacatggaaaactccccaggaaactccatcagaagcgattaggtgtccaaagaaccgaccaatattccgaagtcggtttgtctcgtaccgatgaatagtatcgtagtagttcgcgaaagcctgctcgaatgcatcacaccagattcggttgatcttgcaaaatcgttctccgataagaccgtagaaattggagtaggacctctcctgggaacaacactcaatgatcatattgcaaagttcgatctggaccggcagagaaagacgccatgcaaacagtcagctactcgtatcaaccaagcagcactgttggacgtcacatacctccataccctcctgaatctggaccttcatcagcttgtgaactgcttcttcgtaggtgagctgtacagaagatataggaacaaaaaatcaggtaatggacgaaagtttgctcaatagacatatatcacgacgaaccgaattcatgatcgtcaagtagattgtcctcctcaagttgatcatgttggtctctgtcatgtcctggataccatgtttgttttccaccactattgagatcgatgatggatgaatcagtatccaacacaagcattcaacgatacaacaaaacgtctctcgaaatgagaacgaaccatgaccatcatcctcttcatcgctctcatcatcactatcacttccacttccactagacccgccgtctgaatcggaatcatccccgaggatctcagctttgatcaatttatacttttcttcattctctaggaagtcggggtccggtttgaagatatctttattcgaaaggaaatgtagatgagtgagttagttgaggctcttcacctttcgaaacatacattgccaacccaacactctgcttgactatccgaaagaattataagaaaacaagaagggtactcactcaatccttcctgaacttgcaggtcgtcgtccaatagcactttatgagtgatctgttcctcctcctccaccaagtcaagctcttccacaacaatcggattgtctttatacttgtccttcctcgtttgaaacaagacttcgatcatgtactgcactcgcttctcgatgtttccttcgtgtagaaccgctcggaaccgctcgaagatcaagttattcggcttgggcgagtgttcggccagaaacgcgcccacttctcgggtgagcgcacatgcaatctcgatcgagtctgatgtcggcttctcaagcaaaagtagcaagagctgaaggggaagaagctcatgcgcgacgttttggttgacaagatgcgcaatgaaggtagctgtcgacagacagacgaccttgagacaaaaaaatcgaatgtttttcaattgaaaagaaaaaggacgaaaaaagaagacttgagattgttgcacataacacgctatgggagtgaatggaaagatggagaagaaatgaagaaccacataccttgtcgttccttttaaaggcccttctaaattgactgaccaaacggatcaacagaagttctcccacctggggcaattttgtgtttacgatggccactagagccgtaaaaacaggagtgtatggtaatgaagcagcctgagccttcatcactgatcgggagaacaatcctcgaccccgaacaagattttctccgaacaactcgggcacgacatgtttaatattagacgtgttgacctaccgaagcccaaaacacaatcgttcaatggaacgtgagttgaaaactctacgcgaactactatcaccaaaacaaccaaaaagattcaacagaacacaccttgttgatcaaaccgttgatactcttcctcaaagcatcccaactaagcctctgaaactccgtgctcgccttgtctttactcgcctccatctgcatcgctcgcaacctggctggaggaatataagttccgcccgtttttgttccactcatcagtttcgcaaactctgcagcggcatcaaaaccatcatttgctcctccttttccgttggatgttgggaccagagcagtcgatttgtcaggaccagtggtggtggcggaaagttcttcttctgctaatcgcaaggcgagctggcgttcccgctcgcgtcgacgctgaggatcaacatcgttcacgcgaggaagactgataggagggggtgtagaagatcgcgatcgagaccttcgcctctgaaacggaggagacgcaggttgccgagagtatggaggagagggggatctgaaccggatgaagatatttgatgtattcgcaaagcgagatttttccaaaccagagaaaagtagagattgaatggtgagagttctgcctccacacgaaaacttgactcaaagctagagcagacgtcgatcaaacagacatacctttttcttttcaggccatcctcatcgttcacaagcggggaagaaggcacaggagacattctggccaaacagaatagatgatggaaggttgaaagtggcttcgctaactgagcagacatactttcaggcgtaggcttgttcgaacctcaatcacaaatggttacgcgtgacgatctgtaacttcgtttagacggtcgttcaacttcgttaacgttttcaaagttatgcagacttgtatttcttcagctggtgttcacattgttgaaggggacgtctggtcccataaagcatttctaatgaagccaacgtttgatttggtataaggaacatagttgaattttcatgaatcaagttacaccagccacatgtgcagcaagatacgggaataagacggaaatgatcaggggaaacataagtacattagagaaacgcgtgctgcattcactcatggtcttcactctctcaatgtctgcaaaaagcagggagacagagagtgagactggaatgagagttttgaaacgatcgtagcaacatttactcctctccaatcttaggactatcagtttgacaaacatcgaaatcagtatccgttcttagaagtcacaaagacaagtcagacacagagcaagaacatacgccaaaaagtagttgatgtatccagaagtaaactcgaagctgacctaaaacccataaaccaagaaaaaggaagaagattgcagtccgtattcagcgactgatcatctctttgtgagagagatgaacacaaagtaaaaaatcaaattgacatacgagaagggggacatcattactcatgtgcagcgacacagccctggccaacggtgccgatttggcaaagttcagtaggtacttcagcgagaaagtgagcgtcacagcctgcttcaggataaccgacacctgaacattgtcctcgtcgtcagtcgtcttaaccgactggctcggatcagagtagcgttcgcataaagttgttagctaaaggatccgacacgattgaaagaaatccacaattgattgaggacgtaccttgcccttcttggctctagtgggggaagcagcagccttgccggccgctttgcgcttcctgggtcgctcctcttcatcgtcctcctcttgatcaatctcctcttcatcctcatcgttgactattagaaataagaaatcgaaaaacagacagtgagttgagcgtgttttctcttgcttcttgaaatcacagacctagagcatatcttgagagcctacgcactaaatagagcctcctttctacttctttccccatctgcttcgccatccatgtcggtatccttttccttcttgacctgaaccctcttcttgccattggactctccatcctcaccgtcctcatcgagatcaattacatctccttcatcgtcgtccgcttcctctttgacactctccttcttggtcgatttgctgcttgatccacggctgctagtcttgttcacgcttcccgccttgagcaggacagaagcatttccgatctccccctctgatgagaaccgaactccctccttagtgacctcaatcttgacagattctccaagcgttgtcagatctcggcaaatcttttgaaactcggaagatgacatggtgatctcagcatcgtacgcggtatccggaataccaaggtgatcttgatcgatatccatgagtttgatctcgtattcctatataaatgtgagataactcatgagtcaaacaaaagcgcgccccgagataaaggaatagaaaatagaaggagaggacctaccccgactcgatcagagtctggttgggatcaagagagatagaacaattaaggtcaaattcttctgatgaatcaaaatacacatacgatgaaaactcactgctgccctcgaagaccaagcccaaactatccgcaccgtcagctgcccttaaagtaactatatcgtcgtccttagcacacttcaagatttttgtaagggattgaagctgttatgtccacacatctatacgtatcagtattgatggaatgttctccttctgagcacaatgtatcctaaatacactcacgttgataccaaggggcatatttcgatcgcatcggtaggtctcgaacccttcttgtttaagttgaacagcaacgagggctacatgagagttgtccattgcttgcaagtgctattcaagacgcgaaagagtgggaagtgttatttcataggattcagagaatttaataacaagttaaaagcaaacgcgttgttatgagatttaagtcataacgaaggatgaaacaaagaagatggagagaaaaatgaggaagaaaaaaaaaacaagaataaaggaacaatgaggtataggaaaagacctcagagatgcaaacttacaattccatcatcgttgcaatcaaagttggcgtcggtaacaagctccttgatagctgatggacgatatggaagcgaacgaaacaggtacaagagtcatggcaataagcaccgaggttcagtattcgacggtaagttgatgaatatactggaggatacgaagccgctatcgttctgtcagagtcacttaccatcaagaagttttttaagaacagaggcttgttggagtcgagcttcgagcatcttatgaagtttgttgaggttttaaaaagggaagaggattatgtatgggatttaatggagagaaggagagaagacgaaaagaaggattagaatcgatcggtggaaagttgaatgagggagaaaacagggaaaagctttgatgagcacgcgcacgcgttcggatcgcccgacacgtcttttctgaacgcgtcacacctgttacatcgacttggctacgatgacatcatagagcccgatctttagtcgaccgaccacttaggtcaatcagatgaaaagcaacacatgtcgatattcagactacttgttgtcaagttcacttcgtttactgaattgtgtacacagttaatagagattcattgatacattggacagaagaggaagttggatagtgaagagtgcttcaagatcaaaccataggaatttacggcctgataatgcgtgaagagaatatatgctcaaagagcgacacagaagcttacaaagttggactcgcttgccatgacaagcaagcagttcagcaactaaattatgcctttcctttgatctgctcgacgatgtcagactttccatgtccgtgggacttgccctcctcaggagggaccaaaggtcgaagctgtgaaaaggagaaggagttgctaatgagcaagacactcttgaaacatatggacgatgttcatgaacaatctacttacatcgtcgttcttgactgaacgggtagacgataaatagtagaggtgagccaaaaataagataaaaacacagtcgaagcttaacagttagtcaaacgagatcaattctaatagatgaacattgagctaaacgcacagtgccagatagcagtagagacacccaaggtcactacagtcccaaccatgacgatcagcggagcgttctcgtaggaaaggctgaaggaaggtcctgtaattcaatttccaagaaggaatgttgcatcagtttgacggactcttgttccttgaaatgacgagcaaactcgaccacacatacgcttgtcacttcctcgagggttatgagcagcaggagagcttccggccaaaccagcagccgctcccgtccttgtcggcttctcatcctcggacgcaagccggacggcagacatggagattggcctagttgcagttgaagaaagcttggagatggacgctcgcgtgcttcgaacaagagtaggagtgaacatggtgatttgtttgaatgtgtagatgtgagtttgagaaattacaactaaagattgaagtgagttgagaagggatgtgcgaaagaataatggcagaagaaggaaaacggcaccgctagctttatacccgagcaagatcaatgacccatctccttcttgaccctatgatttcactctgaggaaaaggcagaaaaaaaatcggactgcgatcgcttcgtggccttttcctgtgagtaattcccaactatcgctttccctcagacgtcatcggggcgtcttcgatcggaaggtcacatacatgtagccaatggttacacccatcagtgtcagctcaatctaccacgtgctgtcggtggatcgtctatcggtcgatacaatcaccttgggacggaataggaacaagaacgaagacgtagaacatatatgatacgatggtttctcagatgtagctcaagaattagagcaatttcatgagatctcgatgcaagagagataagaaagaaacagaaagagattgaatgtatgaatgaacgaatgtacttatgaacgaggctctccagggcaaactagtcaggtagagaaacactgtttgaaagacaactaccatggaccaatgtcttgatttcatcaactgtcttcatataatctcacgttctccatcggtgtcgttctttccttggtcaatgatagaaagtctatgggcaggcggatgtacttgtattaatctaccgaagtgagcaggcgtctagtgcagctctggtgttgaacatccatctacgtacgctgtgcatacggcgcaaagcctgctcgacgaacacgatcattagagagtcaactcataaaataaagcataagagatagagaagagggcaaaagaagaatccacaaggtatgaagtgttacagatataaaaagaatattctgattcagaacttttcgtcgacaaactgttattctagacagatactgtgtgatgcaacgtctttcgaaagctgaagagagatggacaacatggaagaacggaccagtacaaaacagccaaaagctcactcaaatactcaaactcttcgatgcttgatcgacgaggatacaaccaaagcatttttgtcgttgcatagaagtgtcgagagaatgagtttatcaaaacagataatcagtctgcttttgacagtcatccatcgattttaattagggtcagagatgcacgtattcaaagcgtctaacttttcccttttccccgcccgctcttgtccgtctactctctcctctccacctctacacaaaacgaaccttacacgtcagacatgttcatcatcgtcagtaccaatggttccctcttctctgtccatgttttattcattcatacctacatcagacgagaatgttgactaagtctatttcgctcaacctacgaacaaccgtcggggtgaaactttctttttgtccatagaattggttctacgacatcctcactcagctcggttagcctcttcctctccctctggctttctgttctgtcttctgtccatctcaggaaatcagtttgacaaaccagtgatttcatatctaaccatccagggctgatgaacaagaatgctaagattctgttcttgggtctcgataacgctggaaagactgtgtgtagttcatctccttttctttcgcgctcatcaatgtatcccatatgtgtcgtccatacttatcgatcacacgatactctgatattcccacataaaatcttccttgttggtgtcatgatatctgtatatggacttatcatctttaccatactctctttcacagacactcctccacatgctcaagaacgatcgactagccactctgcagcctactcttcatcccagtgcgtttcttcctcaaggtatccccccttgccatttgatcaggtactcatgtacatcgctcttccaattttatcaacttatgatcatagcttccgaggagttggctattggaaacgtcaagttcaccacctacgatcttggaggtcatcttcaaggtcagcatttctgatcaaacacagtcgcgttctctgccattgaacgacgtgatgctaaattccaaaccctttgattatgatcgttcataaccaaattttcactaacagcccgacgactctggagagattacttccctgaagttgatggaatcgttttcttggttgactctgctgataccgagcgattgtccgagagcaaaactgagctagacgcacttctcggtatcgaggagctttccaaggtcagtcatgaacaacattccggttatctacaggatatcagttatttttctctcccctcttgattcaaaatctcatcgcccccattttcggtatgtcggttcttttgtatgtcctaggttcctttcctcgtccttggcaacaagatcgatgccgctggagcagtctcagaggacgagcttcgatactctcttggtcttcatcagacgactggtaagggcaagggcgtaccaatggccgatgtccgacccatcgaagtcttcatgtgctccgttgtgatgaggcaaggttacgggaccggcttccagtggatctctcagcgttcgtctctttcgttctccacgccttctcacacatatacctattcttgtcaaggagaccaaactgatcacgattgtaatcgcaattgatcagatctcaagtagaaagcgacatcttgaagacaaaacggttcaatagctattgtccttccttttcaattgctgttcgatctcattgatgacccaccttcgttgcttgataactcttcttttccaatatcttgttctattcattgttttattctttctgatgctccttccacgaaattcctttgttcttacttgtcagtcatttgatgaacttcatgatgctaccgaatttgaaacatccaaagagacgagccatatggctagatgatctactacctcagcctatctgagacgcatgtattcacacccatagttctcctctgaccccatccttctcgagggaacgactgaccaccttccaaattctatcttgtacatcctcgatactgccctgagcgtcgatatccacccaccgatccgagccgtgctgagagataaatcgatccctaacatgacggaactgttgagcaaccagcgattgaaacgacgtttgctcatacctgattgataataatgacatgtgatttaaccagaggattaagtttttgttgcagactcatcaatgaaagggcccacattcagaaagataacagaagatattcataccgttcttccccaaagccaccacgaagcttcgactcttcctcagaaagtgtcaagaacaacgtcaggtctggaagtggcaatcctttgtctggagtcaatagatattcttcctctaatccctatggccagaaaacagaaaaagactaccgtctcagcctacaccacactctagacattcatttagccagccactacaagaaacgtggtgaagaaactcactttggccatcgagaatgcgagacctgaaaaagcatatcggtcgcaaacgacagatatgccagaagcaagaagtgattcgatctcttgactgtttgatttcgagcaattgaggaaatctcagattttatgtcatgatttattgtttaaaggtgagatacagagggattgtactcacgagcactcccagcggttagctgagaacagaagatgtatagcctttccctttgaatcgcctaactcgatttcttttcgaaggtatctatcgatcaactgaccaagagctgtcgttctttctgacatcaggaattgagcgatagttagacatacagatgagtagatcagagtctgtctctttctaataatgaattcaacgacaggatttgacaaagactgtaggagtcgacgacacagaataacttttgcaacttacccggaaacttccaacttttggttgcagagcacgaggcatgtacccctctgactttatcatctatagcacgtacgagaaggtcgcattgggtagattttccagtgcgatcaagaccttcgagaacaataaagtggcctctaagtggtgtggatgttccagacatttgcgtgtagatgttcaagtgttgttgtgacgatgttgacggatgacccatctcggaaacgccgcagattgacacacgcgttcataatcattttgccgcgtatcgttctgccaacaccctgacgcattacaccgacatctctcaagggttcttaaagacagattagtttcagaatgtccctcatcattagtactgatatacatactactcaacttatagtagttccagatgttggtgatctgccctctgctgtagagttccttccacaagaggcaattattcagaccgtgtcgcgtcgccagatcccccattttccgaaaccttcatgtaagctctgagaatattcatcgaaagatgaatataggttgcgctaagttctcatgagggtgaacagaagagtacttcaactctcttatttccgttgacgtccttcgatcgtatactacataacttacgttgcctgatgtatgtcaatatttgaaagttgttgagagatggactgtatatgaagaccaaggtgcgaatgaaagtttgtgcgattaaagaagaaggctaaaacgacttagttaagagctgatgaccaagtataggaaaagactatataaggatttacacttgaaacttctgaaagggcggaagggcccggcaaccgttctgttgcgacttgactgatagtagagttgtaagacgaggatgtgcgccgaatctcaggctctcgaggattgaggaagatgccaaagccatatgcatagttgtatgtaggatggaaagggttgcaaacgaagatgacagaatccgaggttgagagaagagaggaaaagaactataaaaataaggaaagcgacgaagtacttttatcgcttcgtcgctcaggcatgggagcaagacggaaaggatgcatacaggtatcgaaagtgtgaaaggtaagacacatatattgttaagatggtatgcaaatgcatgcaagatatactacttggtcagatccctgacagtcaagttaatccgtagccacaacggggatgaatatcactcaaacggctttgtctcctggcttgacaaaatcgtttgagagatgatcacccctgttgtcgctacaaatagttttgactttgtgaacggtctctcgttccactcttgctatccaattattgattatggatgtagtttcacttttgtgcttgatagaccaggcgcaatggtaattagcttactcatcatcccaaccatcatccattatgtttcataagcaggaacaatgagtgggagtgttgagaatatttgaatatggtgcattcatttctgcttatcatctatgtacctaagtcttagctagcgcactctgccagctggcatacttctttccttctccttctttctttttctttttctttttctccttcctcagcatttaccagaactgtttctgtgtcgctgaggttgctgttgaaatatacagtataatttccttattccttgttccttgttcctagttctcttggcggctccacagtttcaggttcc

SEQ ID NO: 838 - DNA, 486 bp, Xanthophyllomyces dendrorhous
tgaccatactttgccgaccatgtcaggaaccagaggtaggtaacatatacacgacagcgtgaccatgctcacattccattattcatcatgccttccatttcgttatgctccttctcctcaccttatgcgcttgataatccttctcagctacgttcccttgattagtgataggattagtgatctgttgcttgataatctctagttgataatcctgtagtttagtaatcgagtggcaaccaggtggccacttcatcgtagctagaacacataaaaggatcgcgtgcgcgctccttcaagatgtggttcttcaagttaggatccttgttaaataacctagtagctaccagtgctattcaatcacgattcatcctctcttccctgagcctggaagcctaaacctccacgcctcgagcatccctagtcaactacagtcaccttgcgtaaccctgtaacccggccccttacaggccaggcccgccacatgag

SEQ ID NO: 839 - DNA, 7909 bp, Xanthophyllomyces dendrorhous
agacagaacggatcaactcgattgtcgaacagtacttacgagcgtacactgactatttacagatcgactggtcacaacaattatcgttggccgagttctcttataacaacacgatctccaccacaactaacatcaccccactctatgctaactatggctaccatccccgtttctcagccaccatccgggagggaccaaaaccagccgcccaggaccatgtgaagcatgtgcaaaagacgctagcgttctgtcgttcgggcatgtcgatcgcacaagatctccaggaaaagtatgcgaacgaacatagaacaccagcacctccattcaagctaggcgagctagtgcttctcaagcgggtgaatgtaaaacctgaccgtccgagtgacaaacttgttggaattattcgttcgaattcagtatgttaggtttatttcctacaatccttctgtttcatcttcgactgattctgtctcagtcgacatcttggcagatatcttcgtgtctttgtagcttctttcttcttatctttcttctcatttgggcacgttgggtactctcacatatatctgcgatcgacactttcgtttcctttctttttctttttctttttcccttcctcagtattcacaaagactgtttgtgtgctgagttaaaataaatttgttctatcttgcagaacaaattgtgaatctctttagaggtcgatggtattgaactcgtacaagtatgtcttcaacttccgtctaggaaagactaacaccaaggtcgatgcttttacgcgccgtcccgattttatggaggggggtgatgctcgagcattcgacgaacagcctcagatcctttcacggccgatgcaggttgcaccccttgagactgaaagacagatatccgacatcgtgactcgcataaaagcaggcaatgaacaagacgaactgatgactgaaatccttcccttcctacgagacccttagaaacagatcccgccgtcgctaacgcgactggtaagacagtactcactcacaccggacggactgatcacgcgtcgaggcctggtctatgtgccggatgacaaagatctcaagacagatatactctcacagactcacgatcatcccgcagccggccactttggacggttcagaagactcgaactgatctcaagagacttccggtggcctgatgtaacagcttttgtgaagaactacattcggacttgtgacttgtgtcaaagatcaaaaccctcctgtcaccggccatacggatcactccagccattgtttgtccccgatcggccctggtcgtcgatctcgctcgaccacatcgttgacttgccgctgtctaatggcttcgatgccatccttgttgttgtgtgaagactgacaaagatggctcactttactccttgcatcacgaccgactcggccattgactttgccaggctgtttgagaccaacatccacagacttcatggcttgccaaaagacattgtctctgatcgaggtacgctctttacttcgatgttctgacgggaggtctgcctgcagttggatatcaaacagaaattgtccaccgcgttctatccgcagacagacggacagacggaaagaactaactctacattggaacagcaccttcggatcttttctgactacttgcagaccaaatggttcaaaatccacccttcgtaccgagctcatgaacatgttacagtgcccatggtactcataggcttatagtttggcagagtgtatttgagacaattcaatacatgctgtcacacaaatagagacaaaaccttgatgttgtaaatcaagcttacaagccgctgcgtaatagaaggaaatgttcaagagacagagaaaaaaaatcaatctcgtaatatccaaagcatagataatcaacagcaggaatttgaaaaacagatcatagaagccagactggcgaagcgatacacatgtagaccgaacaaagatgaatagttggtgtaaaattgtgatgctgatcgacatttgtaagatgatagtcatgataaggcaagagtcgtgtcaaaaaaatgactttgttagagtagcttgagcatgaaataggacaattgtatcatttatagttgaacacatctcaaatcggccataaaacgttcttgtaccatttttttcgtaccagtatttctgctttcgttgatgtagtttactgctcaaagatgcattaaataccgtcttcttcatagtatttggttgtttgcattcatttaggttctggctctcaagacatgattacgagttaagatcatttaattgccactttgacacctggtatctgtacaaattattgcaaacgtcaacagatgcaatctacatcaaaacacgttatatgcatatcgcagtctctcgtcatatctatatagatcctgattgataagtcgaataattcacgatacatacctacttgtgcattgacaacttcctgcaatcaactccatgcacagtagcgtcaattgcttcaacaaaggaaggttcaaactcgattcatgacaattagttaaaaattcgttgtatctctgatgagcttttctttcaattctttgatccttcacctcaatttagtttcatcccaagcggtatacttttcttgtttcaatacaaaattgataagtagtcactgataaagaaaactaatgacgtgcttcaattatactgacaggtttatctcgaagtaaaatttcagcacacatgaagttcttttcattcattgtttacatgatcatatgcagccatctaaaaatgtctcctataactcatcttttctttcccaaaaagcatgtgatatggagtctccacattaaatgttcaacaccgagatgcggaggtattggacaaacatcgttattcacaacttgaaaaaaaatttcaagcagtggattgctccacttgcatttgaggggctacaaaatatcagatttgaactcataaacacaaaaaaacgcatcgaactatacgacgaagtgaaaggaatcatacacgtaattgcatgctgaaaatcatactctatgagacattcatcggttaaacaggttaagagtttgggacgacatttaaaactttcagatctcattgaaattggtatcggttacagtcatgctatgtggattacatttagatgagaatgttgtatgtagctcaagagcatcctctttctatatattctaaaatatatttgacctcatatttaaatctgtgaaataaaatgcatgatatctgtgattgacatcaaaaggcgacatttacatgccaagcaaagaagataatgacgattgatggcgatatcaacctgatttggaagtcaaccggtgcgatacatcggaagtcgataaacaactcatattttatcaatttaaacaaagacatatcaaacaaaccaatataaatctgactttaataaagagtcgaaagttgaaaaaagtgaaaatgaatagtgagaacacatcagacgtcgagacatatcagtactgtatcgattcaatgtcatatatatctttgtctgaaatgaaactatgacgtctgtgatcaagtctctgccgtactttccattagtatcatggccaaaacatttctgtactaccttcaatggttgtgggacacattatagcaatatatgcaaagttgtcaattcagcgtaaaaaaaagaaggaaacgtcacatatcgcaatgttgaacaatcatccagaagaactttaactcatcattgatgacgagcgaagtttaaatatggaataatcatcttgaccttcaagcattctatacgctttgcgagcaataaatttagaatcaatccgtgtttgcaatagtgaaaagcaacgtgtacatcaatttacaccgtattttcgttgacggtcgaaaatcatgagggcttactggaaaatgggctcatcgtacactattcgtaggtatacacttgagagctacagttctaaagcatcttatcgtcaaccttacaaggtgaacacaacttgaagtttcacagtttcggtattataaatatctgtttacatgcactgtgctttgtttaacctagtattcatggatatgctaacgattgtgtgtagcagatcagatgagagacagacctcgtcagctctttcaggctcgaggtcaatttgtgtttatttcgttgaatgtcaaagggctacaaatctccaattaactctgaaaggaaccattgaaagacagcaaaatacaataaactgtctctcaagaaactaagagcagctgaaattagtatgcatcaaataaatgtaatgattgaaacgtggagaaaagacccgtcacctttgatccagtttgcatgcggatatgaggtttctgagtgaattttatattttacaagtatttagtggagatggtctgaacatataattaaacattgtatgtcaacttcctacagaacgttcaattgatactgatcactaattttgtggatctccccattatgatcaaattttaatcacacaaatacgtgaaggatatttaccaaattgacaaaattgttttgatcaatcattgagtgatgataatgattttttttgtcttaaatgtcaatgatattgttatttatacatacgcgcaaacaaaagaaagttgatacacaattcaaatcagatgtgcattgtcattgttctcatatagcttccgagaattaattgtagggacaatattgactgatcagtcaatttggcgttcgatcaaagtgcttgattagacttcactcaggcgtcagagatgcaagaagacaagataataccttgaccttgccagcctccatcgaaggatctagcaacatgatattgaactgaaagacatttatccgaaagatattgcatacttcaaatgaagtttcgaatatctccgtgaaaatcagtaagaatttaagaaaacttcaagttatttctggccaatgtatttaaaacattatgacaatgatgaaatgacggtttctcattttgttggttggaaaccgatatcagcattgcgttatgcagcattttgtcgaggaagagtaacatcttgcccactggcttcatctatgaccatcaggctttgtttcaaatccgtcatcgttatgacacgatgatatttgtaacaaaagttttttcttgtgatgagtgaccaaatcaagtcttgcaatcttatctcatgacgtcacgtttgacaactgcaacttcattgttcagttcacagttggttttaagtgtgattggacaggacaaatgccagaagctgatatacatggtttccttattcaaattgaatacgtacagctctcaacctcagtcacttgatatgttttgtacatttaaacatcaggtaattttcatttttgcgtagtttcacatccttctttcaaaatcatgtttcatggtaaattgagatacagagtcgtaattcatattatggacagtttcggcgtatatatcttgtatcaactttcttccgccagctgttttgatcacataaaaatacaacgtccttggattttcaaaatggccttgtacaacactttgtaaacttgatcctgtatacgacatggaactagttctcagtcaaaacagtcaatgtttatcctcgattgctgcaagacaggtttttatataacatgacaaaacgttaaaatttgtagttgcagtttcaatacgactttgaaggcttgatttcttatacttcctccgacgagtttggatgacatatcttatatacttggtcaagttttgatcaacgttctcgtgtttatatcagtgaatatgcgtctcaaatgatgattgatttacataccaattgacattttccattggcacgggcttcacgtatctcgcactagaatcattgcttcatataaagataaatagttcagtttcattatatatcatacattgcatacagtgacatatgttcagagcttctcagatacactgtgagcatgcacgagaaaataaaaccgaagaaatggtattgatgtacatctcgattttataagttgacaggttgaagcttgtgaagtagatgatggtcagatgatgacaaatctatgttttataacatgttctcagtgtatagaatgatgctaaactaaggcccaagttaaaacagaactatttactcttgggcctagaatcttcattttgttcctctctttctaatgctaggctttttgaagttggaaagtgtttatcgcaaatatagtttcaaattacccgttctcgaaatgtgtgattatcaaatttcatatgaagtgcttcttcacgtttgaacatcaagtaaacagatgctgacaacaatttcattgaataaactgcaagcatcggtatttagagaaacaaagaatgtctacactgaacgttagaaaaacaaaagacaaagaaatacaagttttggaggaactgacccgttgacttctcgaattcgaacaaaaatgaacttggaggacgtttaaaattttgcctacgcctgagatatcaaaacaaatcagacctacagtggaggaaactctcttttcctttgtacgacaaaacaaagtgagctaccaatgaacacgaaatactatgaaaatgaagagaacacagagagaacaggaataaactaacctcagcacacggaaaaccgatgaaaacgcttgagaaaagaacagaagaagaaagaaagaaaaaacgaatcaataatgaagagagatgagaatataggtggactcacggtttgttcagcaggatagaatgatgtcatgatctgacccagtttgatccgcacagggtgaccttgcgcaatgtagaccgatttttgcaacagcctcttggtactgcttaattcgctcttggtacatctcaactctctcttggttatatcttgactcttccttggtatctcttagctcctccttggtatctcttcgctcttgcttggtatctcttcgctcttgattgtgtttccttgtgtttccttgtgttcgcttgtgtttccttggtctaacatctcgaatgatatatataccatgtagtcgttagctatccccccttttctctctcaagcttggaacctcgttaaatcctcatagttcccttcaataacctcttcatatccctctgcaatattgcatgatctcttccctcttgagagctcaaacgcactgagtaccgtccccacttagcctccttgcctgcgccctcaacaaacagatgttttctacttagcacacaaacagtcttttgtgtatgccgaggacaggaaaagcaacaaaaaagtgaaaatatatgaaaaagaagtgtcaagcgcagatatatgtgacaggacacaggtgccgagatgagaagagggataggttgaaagatgggatgaaaaccaagaaataaatgagaaaagagaagcaaaaacaacactgaaagaaacagtcacgatggaaggagaatgcttggcgagatgtggactgagacagcatcagtcgaagatggaacagaaggattgtaggaagtaaatccggaatgttgaattcgaccgaatgatcctaacgagctttttaggactgggttggaaaaaagatttgaaaaatgttttcccttttcgccctgtttcctttcttgcctcagatctaataaaatcagggagctcttggtgttgaatttgtatggtcacttagacaacagttgatcatatccagttcttctgaatgtaggccttcgcaactgattcttccaagctaattctttgatcgtgaatctctgaatatagttctttagttctaagtctgatcccctgattccctaattctgattccctcaaagaagagtgcacacacacagtgagcaagttgattgagagaaccagaaaggggaagaaagaaaagaaaacaaactagctactgtatatac

SEQ ID NO: 840 - DNA, 373 bp, Xanthophyllomyces dendrorhous
ctcggacgaagcctatggaagcaagagaggtatggagcttgttattccattctcgcgctgcctgtttcaggccatatagtcctttgtgaagcttacatacatagtcttcctttcccttttcttcgaagccaggtggctgccgcatatacacctcttctttcaggtccccatagaggaacgcggtctcgacatccatctggtggatgtcccagtcgtgttcggctgctttcgcaaaaagtaaacgaagggtagcaaacttgacgacgggtgcgtaggtctcgtcaaagtcgacgccaggtcgctgactgaacccttgcgcaacaaaacggactttccttctaatgacctttccttcggtgttcttcttttctgc

SEQ ID NO: 841 - DNA, 514 bp, Xanthophyllomyces dendrorhous
agttttccgtgttccgggcggaaactcgagtattcctgtaccggaacagatcgtctggtgcttcttcggagtgcgggcgtttctgctgctcgggcgagttgttttcggtatgtaccaggaccgttcgttgggactgggatcagacttggttctgggagccgagatactgctattcttctcaagaatcttctgttgaaacatgtgttaaaagtacagcgttctactactacagcactctactacatagttccctatctttgtacattatatacaatccaatcctagtaacacttatggtcataccaacctctttgattgctcagcgtagttggtttgattctcttttgtgtcttctattctccttccttttatgtcttttcatggtccatctgactcggaccgccttgggccagctcgggccaactcagtccctctctttctagattacttgacttatatgcctcaccttctctcgtctatataaacccctcttttctccatctctcattccttt

SEQ ID NO: 842 - DNA, 758 bp, Xanthophyllomyces dendrorhous
gttgtaaaagatggcggctaaagtacaggttctaaagatagaaacgccaagacaggggaacctgaaactgtggagccgccaagagaactaggaacaaggaacaaggaacaaggaacttatactgtatatttcaacaattctgacggaaatatcttctgctgtggtttctacagacttttgtgatgcgttttctgcagtcgttcctggcgcattctcggatgcgaccatggaagtatcttttgaaaccgaacccggagtggtctccgaagtaatttttggagaaacacatgaagacgcagctgaaacaacagctcgagaaacaatcgaagaaacacctgaagtaagatccgaaacaccttctaaagcggttcctggaataccttctgcgctgactcctgacaagatacctgcagcagtatctagattgacatctacagtatcatctagggtgatgcctgcaacagtatctggagaaacatctggaacactttcttcagctgatttcgaaacagttttaccggtttccgctgcatcttcgagtaagtcttcgacttcatcactttccgccacactttctgatgcattctctgatgcattctctgatgcactctccgatgcaccttctgatgcgtccgaaacagatcccgttgctgagtctgtctgagctggaacgagatcatcagtaagctctcttacaatctttctcggttcatagatgatggtaccctccgagtctggctcttctactgctgcagact

SEQ ID NO: 843 - DNA, 47229 bp, Xanthophyllomyces dendrorhous
  misc_feature (44095)..(44104): n is a, c, g, or t
tcgctcgagcgcaaccgcatacatctggtgttccttcggcacggtgagtaataaatagggagcacttgatggggaaatcgaaggctggaatgtatcttgatcttctcgatcgtttctccgagacagttgatttgtttagacaattgaatctgattccctagttccctaattacacctaattctctaattctctcaaacaagagtgcacacacacagtgagcaagtcgattgagagaaccagaaaggggaagaaagaaaagaaaagaaactagctactgtatatacgagatcaccaagatggaaatgagatggaaacaaaatgaaaataaaccaaaagtgaactagaatggaaataaaactgagcggaaacgaaatagaacgagagagaagtgaattaacatgttgaacgagaaactgaagagatagaaaatgaaccaactcgcaacactcggtggttgatgtctagactgctataatcaatgagaatcttcacagcaatctgtatgaagagcaccaaaatatacagtacttagtaccacagattgcgtatctggtgaagactgtacataccataagacagatctgtgtcatgatctgacccggtttgatccgcacagggtgaccttgcgcaatgtagaccgatttttgcaacagcctcttggtactgcttaattcgctcttggtacatctcaactctctcttggttatatcttgactcttccttggtatctcttagctcctccttggtatctcttcgctcttgcttggtatctcttcgctcttgattgtgtttccttgtgtttccttgtgttcgcttgtgtttccttggtctaacatctcgaatgatatatataccatgtagtcgttagctatccccccttttctctctcaagcttggaacctcgttaaatcctcatagttcccttcaataacctcttcatatccctctgcaatattgcatgatctcttccctcttgagagctcaaacgcactgagtaccgtccccactcagcctccttgcccgcacccataacacgagaacaaagtgtgaaccaacctcagcgacaacgaaaaattgttggtaaatactgaggaaggaaaaaaagaaaaagaaaaagaaagaaggagaagaaaagaagtatgccagctggcagagtgcgctagctaaggcttaggtacatagatgacaagcggaaaccaatgcaccatatttaagtattctcagatctataacacgggtgtctgttttcctcctacttttcggggcagacttttcacagttctcaaatacaggccaaagctgaatagcagtggataagtcagcttcaaggttgaaaccattcacgcgtttggcttgatacattcagaaaaaggaatgtccaagggcaaggagatgagaaagtcaagactgagagaatcacattcgatcacatcttatttaagacaacatgttgttcgaaggaagagagcatatatatatgacatatggttcgattttgtaaaccatctaaagctcgatgctatggtatacgtgtgcgtgtcggagatatagcaaggagcaagaaagaatttcttatatcgatttgccggattttattgctgggatcaagacgacgacgatgagatggtttgtgattgtacggatttctcgaaaaattacataagtacaaatgaactgtcctgctgaactcagcactcatcgccgctcccatatcactccaaatgtctatgatggctgatctcttcaaggtcgagacgattcctaacaaaggtcggggcttgacctcaactcaacctctccttccaggaaccctcctccttaccgaacgtcctttcctcaccgtattatcttctgagtttagtacatctttcttacagaaacaactcgaatccctgcccagtgataccatgcgcataacattttctgcgttcaacaatgccagaccagatttaggagatgtcatgggtcggtggaagaccaatagtataccagtgggaagaatgggagcggggatgtttgagtggacttgtctgttgaatcattcttgtgatccaaattgcgtttttagttgggacgaggaaaaaggggtcgaaagtttgtaccatttactactcctttctcaacagaagaggacagtgaatcaaaccaatgtgactcctttcgatgaatactgagaaaagtttgcaaacattccttagacgtctatactttaaaggccatcgaagctaagacggagttgactgtaacctacactccatcatatcttctcccttttcaagatcgtcaaacattcttaaaggaccatttcggttttgtttgtcgttgttcgatatgtgttctgcctttcgaaccaacaagtgcatatgattcccaactcagggactataaccatctgacaagccaattcgccgctctgatcatcaccgatccgtctcaggcacttaatatgatttctaaggcactgtccatggaagtttgccctcctggggagcgaggtgccaggttctacgatggatttcaaatctgtgcgtactggggtgacgaagcaggtgcaagtgcatggatcgagggtgcttggaagtgggctgtcataggtagaggagaagggagcgaactagaaaggaaaatgcggctgctacggggaggaaacgtatgcacgttcgaatggtggggtgttggtgaagaaaagaggtctttgatggttcaaccagtgagcaattattctttcatctttcttggagaaggtcaacaagacttgtagtggtcgtaaaaaggtgtccttgacatactacggaatgaggctcaactaatgaagtcttacaccatcttcccttgttttttgatgctttgtgcggccataatctgattttaatcgcatgtgcgactgcttcagcccgctgactcactgaatacagatccttccacagtgaaggtggcgaaacttagcaagggccagaagaaatctatcaaagcaaagagagcaagacagcttgcaaaggaagctttcgacgaagtaaagtcagatgatcaacttcgaagttgattggcatttgagagaacaaaatatgtatggttggttgtttaaattgtgaactttatatatcgaagaagggcaatggaagtcaagacatatgctttgaacaatgcgcaccctgagaatgacatctttgtatcggttgatgattgaaaacaaaggacatggttgtaaaaatgttcgatcaggccatagtatatggtcaacaaaaatgctctagaaaatttgtattctattgatattgaacaggaaagcacgactttttgaaactgaagataaaacactcccttctctgtaacagtaaagggaaaaaaggaaaagaaaattggaacaaggatgtccaactaaaagaataaggaaaaactatgggaagcctacacatctatatggccatatacatgccgtcttcgtcaattccatcgtcttttctgatagatccttcctcgctttgatgtgactgttggtgatgctgtggatggaagcggcttgaagaagcgtagggatcgaatccctgcattgaccctggtgagagaggatgtgatggatacaccggtgataacggttcagaagttgtcggtgtgtttccatttgcctgacgttgttgatcctctgagtcatgcaccaaggatccagaagagagaatatttccagccttcaacttcagagaggaaaatgtgcccgatcgctcacgaggggtgtcttgtttgtcttcgcttgtggaagccagcgctcgacctagggcttcggctttcaactgttcttgacgagacttgaatcgacgagtgatcgtattgcctcgaccgccaagcagagaagccaaatagagttgagatcgacgacgaccagcgacacctcctccttcttcggaagagaagtcgtatcctgtcccgcttgcagacgtcgtcaaacctgtcgacatgtctgatcgcacgaatcgtgtttgaacatatcgaggcataagtcatttgccactgttgcatacttgacggtttgtgacaagcacagttgagaagctaccacagaatggtagaaggcactcaccaatcagacttccacttgtgacggtccgtcgtagcggggcaagagagaccatagaatcggaatcagggatcaagctttcccttgtcacagctgacaagtccattgatgaatccaggttgtacggattctgataatatgacacgtcatttatatcgtgggtctcctctccttcgtataattcgattgggcggttaatttttctgtattgtaaacaaccgagaaggtgtcagaacagaatgacttgatccgttgatagacatgagattagcacaagcttgaattaagaagaaaagcatgtaccgggcggctcggatgatgtcgatatcggttggattgatgatttccttgaaggcttgtgatatatatcgaggcatcaaggccaccactatgacatcaacaaagtaagagcacagagattcagtcctagagggggagagactcgtcaggggctatgtgtgtaaacgcaccaatgacaaagaaggttccgagccagaatatacccgactggaatagataatgatccatcccactgtgtatgtcaacaaattcaattgcgaaaatcaagcgacagcacaacaattaggatgagagaattcaggattaatctatatcaaacttctgtgaacaatcttactaagagtagctgagcatcaggttaggcggaaggatagcataaattgccacgaagatctggatattgatatgaaagctaatgtttagagaaaaaaacgcagaatttttgggaacgaagtgtacaggcggagataacaggtcaattacgcacccagagcaatactggaccgatggcgataccttcaatgatgtcattgaaatcagcgatttatcaaaaatggaaatgctttcgaaaacaagggttgacttagagctgaaacgtactggcaccacttatccaagtccaggcagtcgtcgttataccatgaaactcatctaaaacaaagagcggtcatgttgagattcaacgcaacatgaaatgcgaaaggtgaggactcactgcaaacgacgacagctccaatcaccattacctgtatatttcgttatcgaaaccccatcaggatgatcaactggaagatttgtttgatgcttgcatacgtacagttgaaaactcgtataagaagacgtcgtagccatctgatcgggcagttgtgacatcatacgtgaaaatgattataaaaaagataattgcggactagaagatggaacagttccttgcgttagcgttagcggatatgttgaagctctgccagtgtttatcgacgaacctgaagagttccctcgaaactacaacagaatgaatcggtcaaaatgttcagaccgtcaaaaatacatcagtacatgcttgaagagaattgaattttctgttcacacataaaactcacacaaagtacaaatatctcttgaaaccaaaatattttccttcccttcctcgattgtacaactcgggcaaattcataagatcatcatcgttcaggtcacgatcgaacagtcctctgtgagaatgaagttcatcagtcagaattgtactgttatagcgctagagacttgagaacaatcatcatagggttatacttacatggcaatgaccggctgcgaaatgagaaaaagtttggccatcgagatcagcagaaggctagctaggatgtaagatgactacttacgaatagcgtccaagccacattccacaataataagtatacataatcgtatgcactgtagaaggataattagccccaagtctctgtaaatatacgttgcgaatgaaaaacacctactatgttgtactgaagaaaacagttatcacgggagtttgtatggccacaaggtatcagttgcatgacctgaatggaggcaaacatatcctgaaacttacctccagccgcagtaaatttgaaagaagaacaagactgctactccgacgatgtttttgtagaagctggacagttaagacaaatccaatgccggtaagcgcccgtatgttgaagttcgtgcggtattcgatcaactcacaagttgagaatcatattggcattccgaatgtaagaccaatggccatggacgaacaaaagtcgactgagatatcggaactaaacagaggttcagagaagagccgaggtggtttaaaagactatgagttataacaccgaacaatatttcgcttcagaaaaacaaaacattagcttgaaggaactcacttgagctatcgcatagtccgaagcttcacgataggaaacatagttgaattaagccaatcaagaagcgcaagaaagatagcagtgaaccctcacagtttacagcctgcagtccttcttcaccagaaatacctacaccaatatcagctgcttggatcatggatacatctgtttttcaaagcaaaaacaggaaggggtttagacgaggatgacatagtgattctaagtaacgtgagaagacaaagacaaagaccaaccgttggctccatctccgatagctaacgtcatagctccgatgttatccttaatcagtcgaacaatctgagctttttgaaggggggatactcgacaacaaatgactgtatcacatcttgttgagagttctaataacagatcctgcgtccactcctccaagaacgtctacagaatgagaaagatggatggagaatatacgttgattaactatcaatcaatcgaattaggttgaaaaagactgtatttgaccacagaccgcgtttactcacgtgagtcaatgcagaaccttcaatgaccaaagaataccctcctacacttgtgctttccttcttgggttgaaacgatgatgttggtggtacagacctaggcaacacacccgggggatgagatcctgctttggagacaatatcttgtccaaagaactgctcgatggctgacttgatctgttcataagccgagtttggagtaccatatgcgcctcctcggatgacaattaagtttgtgtccttctcgagaagcgatgcagaatatccgatcgatatggctgtctcaagcttgtctccggtggccacccagactttaatcccagctcgcttgagatctgcaatagcttctggaaccccatcttgaagtttatcctcaatagcagacgcgccaaggagggtgagagaatgttcaatgcgggcggctacctcagctaccttgccctctctatcatccagagatgttgaagcctcgttgtagtccttggaccattcagcaaactctacttcagagatagcccggtagccgagacacagcgttcgaagtccttcactagcgaaatattcaaggtcctgactcgtcttgtccttaaggcgatcgtttccaggggccaaccgatcgaaaatcacattgtctgctcctttaatcaggaggaagagcttcccactgtcgtccaactttcggagaatgaccgacattcgttttcgagcggacgtgaactcgagcacgttgagaagctcgaattcatcaacttgatccgaatgaggactcgtcatctttataatgttacgatctttacctctgaagacaaacccgacatcagcagcagcttgaacactgattcattgatcgaaaacgggagtagagacatattgaaagatgtgatcaataactggccagaagctgggaacacatttagctattgttgatgatacgttggcgtcacttacagagcagcttcgtccggagattgagccatatactccatggtaccatcttcggcttcggaagccaaagcagtgtggcaaagtgccagatttttgaaaaaggagctgattcgatggaactggtcggactggtcatcttccaagatctggtcaatagcatccgcatgaaatcgggggatcgactccttcttcggcttcgatggctcctcctggtcctctggttgaccagcagtcgagtcgagattggttgttgagtcgtgaaaaggcttggaacccggtccttcggtgacctctgagttgagagctccaaccacttgcttgccatctccagtgtagacctgttgaagtagactcaagaacagtttcagacatcaatagttcccttgtgccctgtaagcgcttgacctgagcgagttgaggaaaagagagataagacatacaacacctccaatggagcactgctggaagaccatcagattctgagtcagtgttcctgtcttgtccgaaaatacatactcaatttgacccaaacttattaggcaaaagcgacggaatcagacaggtcatgtgaatccatggtgtcagcagaggacatcagtttccagaagcttaaaaaacataaaaacgaactcgtcagacaggttccaactccgagctgttgtcctacggccggttttctgatatttgatatcgtcgtcatagtagattaaagccgcttgagccgttcgaacaaactcgatggagatgtacaatgaaatagggatgatattttgaaatgtgatcagcgaattcaaaaacgtgaatactccattgatctatatcggattgtcgtgagggtagggatatgggagcaatatgaagtcaccaatcagcatggcatacatggcggacaaaccgttcagagaagaggagatgaatgtaaaaggatgacgcacgactggattatcatcggattggtcatcgtacagtgtccaatatgcgttaagcgaaaaatacttcttttcatgaaaatggtcaatgactccgcaaatgataccagctattccgagaagacagatcgagaatagactgtaaggtggaaaacgaagggtgaacgagactcagcgtctcgaccaaaatcaaggttggaagaggttgaccaaggaaactgtataagtacgacgtacacctgaggattcatctgacgctctacccgactacgtttactaggtgtctcgcccgagttcagaataatcttactgcaggtacgaaatggaaagagaacaagatgtcggttgctgatggcttatatcatgtcgttgatgcatcaacgaggttaaagagaacaaacctatctgaaccggtatacatcacaacaccaatgacccaagcggtgttcctaagcacacatcctctcaacaatgtcatatccgcatcgatcggatacttttcacctgtcggaagaattactgctgcattgagtttgtagagatcaacgtccggaatatcacactctagttcaaattcggctttcgagcacgcttgagctgagcggacatggtccaatccaccgacagcgtgacgagattttaaattggtttctccgtcgagaccctctagtgtagttattagtcaagaagaaaaacaaaactatcagcctgacgacatagcacgatgacttggtaagtcagggtaagaaacaaagacaggggtcatgaaaaatggcatgagtggacgaaactagtctcgacataggccacgtcttcttcttccgaagtcgcgcatatcacaatgtctagaagttatatatgaaagttcgacgaaagacagcaataggtgagtggacttctcgtccggatgcagaatacaacacgaaataaactcaaacgggaaggacgcaccggccgggaagctttcgtcgttgtatatctacagaatgacaacaggacaaagcgcgcaaacggtcagcacgactattgtcggacatacatctgccctctcagcgaggagcttcaccttgacaaaatctccgacccgaacatcctcccagaatgttcgcttccatcccaccctaggtttatcggcatcatcctcatcattctcgacagtctctatgtcgttttctgcatcaaccacggctctccattggccatccacctcttgtgcgcgtctacttctttctgcttgttcgtcgctcggcaaatcatctaacaccgtcatttcccatgcttctctctcttgagccttacgtgctctgtgtcgcttgcttttcggaagtttgattcccctaacaaacgtctttgtctttttcttcatcgggttcgtgttcaacacgtcgggtccggtaagcacatggacgaccgaatgattgatggccttatcggactggtgtcgcttgacatcttcataaccatctttgacggcggtgatgatggtgaccgctaagctgttaatttggagtgaaagaaagaaggcgtgccagaggacatgatgagagctcgcgttggaagaaaaatatccaaacagaggggtgatggataacaacatacagaggtaggatgactaaacccggactgacggtcgcaaactttggaaagaattgaaggatagcaatccctgaataaaccgagaaagtcaagtcagaaactagacgtgaccatcctcatggagaaagagggcgatgcaagaagtaaatatatccacctaggaagaatctatgttgaccagatcaaacgtagaaacgatgttagttctgcgctgtatgaaagagacatgagggaagagttgttacgtacatattggcaacacgcctgaattgctcgataagattcctcggaagaaagctgacgacggtgtactttgaagttatgctctgactgctcggataacggctccctttgggaaccttgcctttgggacctagctctgatgccggatacggcttattgatataaattctcctttgttttggagccggtggctctcgggcaaaaagagtttgtggattgagtttgtcgaggactttttggaacgtcgacttgtttgccgagctctttcttgaacgaaccatggagttgcgcgatcgtcccgagatccgatattgtgggaaaagggaagggtaagggggcttaagagaaagcacaggttgtgccctctgagacgactatactgtgaatcaactggaaaaaagggaaagacaatatagatgtggaagactcaaggatgacctcgaagagaaaccggctctagttgagaaacaagaacgagaagagcgtgttgatggtggggaaaactggtcgatggattgaactgatctgactggtgttggcctggaaaataatcaaaagaggaaaaggggcggtgtggcccggccgggcgaagagaaagactctggcttacgttatcactccagcccgatagccgtaaaagcagacgcgtcgtgcgcgttgaggcacattaatgtggcggctataacacgtgatgtatgtataaccgggctagccttccggaccattcatcgtcacacttagtcatcccaacaaggtttcgtaatccttcccgctggtcgttcgataaatcgtctcctgtgatgcttacgttcgtgggacgagtgagcagaaaattcagcttggaagatcctttagagtcgagtgaacgggatgatgatgctatgaataatccagaaacgaacaatccttgttctgcatgtctgacttcgtcactctcaatctttcaccaatctcatcttctgtcgaccatccatccgagaggtaactcgcattttgatctcacttcgtctgagttgggctgcatatcttaaatcgttcgagccaagtcccaatagtaaccagcctcttcctatctggatatgcgtcctgaacgccaccattcctctgcgggtcatacatcaagacgagagcaaagagcacgtagaagttctggtcaaccagacccgacaccttttgcattctcagttcgaccattcatcaaatctggcctatcgctcgtctcgcttttgctcgtcgcttcgtcagctcctctactaaggcaactatatcttctcaacgttatggtctcgaccacaaatacaaaaggactgtcttctggaccaagcattcgaggtggtataggtatctggggagcttgtctggagcaagccaatctcacaaggtcgtctcagctcaggttcgcgcataaatccttgtctcacaacctcgccgtctccgtatactaaccttctgtcatcgctgtcgctactttctcgtctgtcttctggctcttctgttacgcgtaatttttgtcagattatgcacctttgcgtctcctctgagcgttccgaagttggtattactaccaggcccactaccgacacttccgtcctaccttcctccgtacttctcacctgtcctgtccttctttctcgtccttgcccttgcttgcgcgctcattcagcacgcattgcgttcgtatatcctatggggtgagatagctgaatacggccgtatctcgactggcggcaagaaggacgacttatcagatggatccccgagctatcaacctgacgcccacgacggacctaacagatttggtgggagtaggtggaagaatatgtgggagaccgtcagtagagaaattgctgtcgtcaccgcacagagctgtatcatagtcgcaagtctctttcaagtttacatgttcttgcttgacttcctgagtttctcgtgtgcgcatacatgtctgattcgactggacctcatctcgatgtgcttcaatagatagggattcttctcttccccttgttaccgtcaatatacatcctcactagcgccataagctcgatcgagggagatatagtcacctcaatgctttttgttccagggtatgccagtctcttccgagatcagcctatctgaactttctacgtcgtcatcgtactgacaattctttcgacatgtatcccttgacccagctggggaacagctctcttggttctgtctgtgatatgcacactgaaccttcgttcctctacatcccgctctcattctcgctcccggtttggtcgatcaacaagtggtcattgccgccgatcaagcatgcttccctttaccgagattaaggcactgcagccccataacggacacgaccaagatgttcaatcaaacagtcagaccaatgcagatcgcgaggttgacaatctgtgagcacttctcaaacgaaaaggggactttgatagagtcgactgattgagagcgtaaacatcgcttaccctgcttttttgttccctctgacgtctcgtgcgtcaaaaagcgatcctcccttgtaccgatccatccaccctttgcctcttccaactccttcttctcgccggaaagattctccttcccagggaacaacgaggcttcattcattgtcttcagaccaaaatcgaactcagatgaatgaacagaaagagcagtctcagcctaaagcgttctgggttcctgtatcggcgtttgcagagatgtcggaaggcgaggccgatgcatccgaaacgatcaacaatgaagggatgcaagttgttcaagtcgaaatctgggcttgacagaggttgattcattcattctcgactccctgccctgtcccgggctgaagcttctaagtcaaagttcagcatctttacatttatccccttgtactacctctatctctacttctacccaatcatgctttatttttcttacatcgtttcctagaagtaaatacatcgtgctctcacaatacattcctatacggtttgttcttctctctttcacgactcactttcaagcgtaattcgtttgaatctttcttgttgccagctttgtcatctaattcaataacaacctcttttcggagctgcaattacatctatccgttctgtccatgatgaatgtatctatattcatgattttccacgttaagatggcggtcccagactcggttgcctcattccatatgatagttagcaagatatcttggtctatcggtcggtttctttcctcgtttttcttccttgtcggtcacagacacccttgcactcgtgcatataaatttagttgacaggggtgataggctgtccagttcggaggaacgattccaaatttcggagaatttcaagatgttgatctgtacagtcgtgatagagtataccaagagacgaaatgtaagaaaaggagacagggtaaatgaaaaagacagccatattccggtcagcttctaagtattgggataaaacaagaacagaccttttataattccaccgtcgacgacggcactgtgcggagagagaatctatcaggccgcaagaaagaggaagaacggctgaattatccaattgactctgatcctgaggattccgattgtgatgaggagtgacgaacagttttaggtgaggatttgagaccgggatggaccgatggctcaaattcaaacacgtccagcgcagcgcgaagaactatgatttcctcgaacgatcaaatacgtttcgtcaggccttctttttcttcattctatccaaaagatatattcaaggaacaaatctagaatttacttgccttttccactatctaatgctcgaaccaacgcatcttcgtgaataaccggtccacgagcagtgttgacgatgataacgtcgttcttcatcttagcaaactctgatcgtcatcaaacgagcagcgtagaaacatcagcagggtcaattttagattgcttagagagcatagatgataaagagacgtaccccgatcactgagcacatgtcgagtttcttcggtgagtggacagcatagagagatcacatctgcctgagcgaggagttcctcgaaagagacaaacgttgctccttgctcctctgcatgttgcgcgcacagaagatttgtaggtcggcatggagtgatgttcattgatagataatgaacaagaatactgacggccaactggatgaagacgaacctgatgtcggcaatcggctccgtttggtatagatcactttcaatccaaaattctgcatatgtcgagcgactatggaaggtggaatcaggagatcagggcactgtctcttgttggaacatgatcaaagataccatatattttacttgccttgttttccgatatttcccatcccaatgattcctaggacggtccccctcgtctccttggatacgatattgaacctatcggaccaccggccggcccggacggccgcatcggactgcatcattcccttgagagccatgaggatcagcatggcggtatggtcggccgtgcgatatccaacagagtctgggttattggcatattgtaatttgtgggctgtgagatatttgatatcaatatggtcatacccagcacctccctgaaacatgatcatagtggaggatatcagatgaaaagtcgatgataaacagtgaagaagactactgcaagagatatgtcattttgaaagaggaaacataccatagtgataaatttacagccggactccgctaatggttgcaggagctcctcgtccattggcaaaggacctggttggtcccactgatagaaccaaacccaagctgaaggtgagtagggtggtttggttaatacatagtcgtcctgataagcagtcgaaaaggattagaccgaccgacgaaggggcccgcgtcttcaacagcagatcgaatgagagagatttgttccttccgagcgacttgaggaattgtctatggattgagcgtatgagatgaaacccttttttcttgatacttatcggtcgtagccgagagagcaagacattaaacgaaccgtaatcgtggccaatgagtgaacgtgtttgacgtatgcatcgtcttcacacctaggctcattcaggaacagtactttcggtagagacttagtgaccatgatgagacagcggtacaaggaggtgttctatgatggttcgaggaatgaaacagtgctttatcagaatggcttcctatcatactgcgatacgcaatcccggagggtgctgatagagatcattcaaaaacaatgtgactccgaagcaaagtcacatatttggcttactaatccaaaaccgccagccaatatgagaaatctggtaaacagctcatccgagctgagaaagcctgcctgatgaaaggggtgacacgcggtcagggccctcttggtcacatcccggcgcggcggatcggcgaatcggcgaggtggcatgctgtgctgacatttaacattctgcacatcgtcttcattcgctgatcggctgatccttgtcggtcttcaatgtctcatcaggcacaagcatgaggaaatcgaggacttgacagtggatcggttcttatcatccgcagcgaatcgcttcaacgtggcagccctgccaccgcgtgccctctccttgatctccctgtgcctccctttatccattttcttccggtctccaatcatgtcgtttctttctccacccgctcttcttcttcctccagttctcttgtgttcacccagcgacccctgtcgacctcttctccttcaaaacaccaccctcacattcatacgtcgacgcatacttacacacacatatatacacatatgtcgtggccaaatcctcagtggacgtctttcacttccgtcccacctccctcaggctcgtccgcggtcggaacaaggaaacgggtcggcgtcgcatgtactctttgccgttctcggtcagtctctttgttctcgttctatctgtctctctggattgcatcaggcggtcgtcatcttcttgttcattgagatgaaatctgacatcgatggttctctcttcgtgttgttcatccatatttgggactcgggcctggcttggaatgtgtacgttgttacactttataaaaagttagaaaggttaaatgttctgggaagacaccctgtacgagatgtgcctcccttgggacaacatgcagtgcgttctttcaattcgtctatccttcattttcgatcgaccttttcatggcaagatctattaggtcctggctgtttcttctatcaaggaaaaacttgcacattgcgactgaccaccgaacgcgaacgaaacatcacctctttagcttttgaagaagtcccggaagatctcaaacaggccgcctttgctcgaaaggagcgtcggaaggctgtgattcaggcagaaaaggcagcggctgctcttgtgcgcactcaaggcacagcccggcagagtgtaaatgggagcgacaatgtacgtacctctaactatatacgttgtttcctgatcgtatgtatcatgtctaacagctatatcctatcgttcatgactcgaaaaagaagacgcttgcacagcctaaaaatcgatcctcatctccggtagctggctcgtctcctcctcaacgtttttataatcttagaactcggcgaaacgctttgatctcgtcagcctgccttggtctctcgccttctccctcatcctctgcacctctatcttcctcctccgctgctttgaacctcagcgatcctcctcgaactgacgtggtttgtccaccagcccgccctctatcgactccactctcatatcttcccgtcatcgcaaatcaaaacgcttcacctagtattgttccgacggagccgctcaaggtctctgatcaaacactacttcgtccgattctatcttcaaatcaaccttatctttcctcgtatcatccacaactcaatcatggctacggttatctgactccacccatcatgcctcttggtcaaccttcgaacgaagcatactttgaacgtgacccttcgtcttcatcgaccgtgccttcattgtcgcccgagcctgatgttcgaaccaatccaaccaagtttgctcttatgaaaaacgaggcatatgctgggacgcctcttacccccttggaccaacggcctgaagaaatcaattcaatgagtggacgaaagagagctctcgagtccaacggatgggccgcagatcagccattattgaagatgagacgtcaggcagtctgtttagggccagcaacagaggtagatcagatcaagaacgatccagaacacttcggcactggctccattgtgttggaacagagcgaagaatggctcagaggggacattccaaaatacagtgtatcaacggaatatgaggaatcatgccagacatctaattcaccctgggtaccaccttacgtctcatctatatctggggcttgatgtctcttttctgctttctttctttctttcttatcgagtctcagtcgtttcctgctttgtttcggattttcgattcttatttcttgtagcattctttctcttgtcatctcatattatctttcttttccgaacagtcacgtcttttcctcgatcatcatcatatctatcgtatctaatctgtttgagctagttgcctcttcgtcttcgccgttgttttggggtcgtatcttgctgctacttattcttctgctgttatgtttctctgtctttgatttcaacgatttctcctgttctgtgtatatggatatacccctgttcttttcttcgctttctggattgggcaaagaatttccggttgggatcaaattgatcggaggcattgtcgcgtgtggcgttcaacaaataacttgtaatgatgaaattaacgtattagtacggtttgtaatgaatatctgtcgcctttgctctctcttacattcaccatctcgacctgtcgtcctcggggaaatccaccagtagacgagtggatgtcctttgaggtactatccttccagcatgtctctgtctagccagttcaacccggtcgctccttctcttccgcggcaagctagcatggctcactcgttcgtatcctctcaatccacatcgacatcccagcttccggtaaacatcccggtagtaccctcaccacattcgacagcccaatcccagtcagaagcgacatataacctgtatccaccatcttggagaccaccgctacaccagacggccgaccttggctacccagatttctttccttctagacccggtcaaggtcaggatgaggactgtctatccgaagcgttcgtcaagcagggttatgtttcacgatggggaatttccaactctgttcgtgtctctatttctgctttcgttgcctggttccgtgatgcgtcgcgcattgaggtattcctgttgacggagaacaaggttttgtattaaaacagtccgagtcgttttcggtgcatggattggtcctcaaaggccttgtctccaccaatgcgattcaaaatatgaatgagaccatgtccaagattgtagctttacgtgaggctgcgtcttctcaagtaccgtatgtccctacccacccaacatccgcgttctctgtgttcttctccaagccatcaagttgaccggttcttactcgtgctgctctctctctcctcttgcttccagaccttcgacgtacaaacccccgactcgtctgatcttacacgaatccaaacgtcaaacatttttcagtgacttgaccaatccagccgtaccactatcccggttagccagaagcgtgccacatgggatcaaaggattggatatgcttgaaatgttcgctacgaatgaggttcctgtagaaagagcggtatggcttctcaagacgctgggtgcttgtgaaatggtacgctcggtgaacttacgcgtctctctacaagttcttgtctgactccattgttccgggtgttatgcatatagaccagtcgaacaaagaacgcgcctctagcatcatcttcattatcgataccaaatcctcctgcaccaaacccaaaccactcggtctcgattgaatacaccacctccttaacgacgttgctgaaacgccaactgtccgaactcaccgtgcccacgacgctccctctacagctccgaggttcttcatccgccaatccttctcaagcaaacggacctaaatctccgagcacgcctacggcttcgacacctggtagttcgagttcggcacctgctccgagcacggtatcgtcttctaataaacaacagttcaagtccttgctcgctcacccaggatcccttaagaaatgggtcaaacgatggacataccttcttgccttactccgactatcctactcacctcctcactcgttgatcgataaacgtgcgtttcttagttggcttgtcaaccagttagcacccggcgcggcaaaccgggtccaaatcggctttgtcctcgccgttgtcgaagaatggaccgaggagatcagagagagtggcgtgctgggaaggatacttgtcgagaactgcttggctgtatggaaagaattagaaagtggtgaaggcgctcttgagggaagacgaaggatagcaaagatcatccagaccatctttcttctttcgccacaccttttcatctttcctaggttgtatcttatccattcaccggtcctcgaagtgatcctttccgctccgtcctctggagagattaccttaccaccagggcagatcatcaaagataacttcaaagtgaaggaggtaatcaaaatgatggatgacgcttgggcggaggtgcggaagcggaatgaggcgttactgtttcgcgattgggacgttacgggaggaagcaactcccagaccacaggcaggcaaactttctcggggaagggaaagagtgtcgctgatggctggagcgaacgaagaaagggcctggctgcaattcatgtttgtctctgttcccttcctgttttcttatctaaatttattatctcctatcgtccttgggacaacgaaattcacgacttgttcattgttcgttgcttcagattcttgattctatctcacaccaaaccgacatggtctcgaccgcacgctcgttttttgagctaaactccgaaacacccgatcttctccctcaaaaacttaatatccttctctcatggtcttccactcatatcataccaccttcatctgcttcagctctccgatcgttcactgtggcaaccctactcaatcagtatattctcttcagcaactcgcccgttcaaagacgcgctcgaatccagtcagtagaacgggaagtgtggaagtggttagaggagagcaaggtggccaagaaggaagagaatactgaaggtgtggctgaggtcattggcgagcttgtccggaagggtgtaataagattcgagagagggctaatggggttgatggtacgcggggagagtgtgatcgcacgagttgtccagccagaaggcgaagcgaacacgggtgaacatgaaagcggtaacgaagctcaacaaagtcatctagttcgacttctccgatctgttccgctctatgcgtcgatcccgtcgcttctaaatcaacgacattccgttctttacggcgctctcctcccagcttatgcatacgtctatgttggccctgaaccctctgtcgatacaacctctgaccccggagcatacgaactttttactcttcagaaggcgtataaagaaattgaagaaggtctcggacatatttggtctcacgaccaacagatagaggcctgcgaggatgtgaaccggttgccgttgcgtcagagaattccgacggtgttgaaagcgtcaaggttcattcagactagggtagttcaagattacctgaatcgttacatgtttgatggacggtgagacttattccttttttaggcgtccacccatatctaagtgtatcttgttgaatttgttcaggagctaaatttgtttaacttatgtttcatcaaattatcagtcatggtcgattctcggccatagaatccccgaaagccttagcggaggttcttgaacttctcgaagtctcgcgaaattttgttataatgctcaaggtaggaggtgtcatcttgtagagtcattttgtatttgtgccgactaacatttgtttaaaattgttgttcgatcacgtgtaggttctactccgccttttggagttcactaaatgtctaaacctcttgtctcccttgacagatggtttcaaacgatttggagacatctggcagtctatgggagctacacacagtattgttgaagctctactagagaagcataccgttttgaaggctggggtcggccaacagcgatgtgtattagagatgctcgttagtttcgctaagaagggattgatggaagacaacatgaaggaaatagtgtgggctgattttgctgtattcgagaaggtacgttggaaagataacgccctctacttgatacctcgatggattggttttgatctattgtcaaaccttcctatttgttttctctaaatggttcagtctcttaatccgatgaacgcgcacgcaacacctccggcacccaacatggtggaggttcaaatgctttgccataaaaccgatcctcaaacaagcgcagctctagccaccactctctggtatcgacatcagtccttcgatgactggccgtattttgtctgggataacgttgtccttgcactggcgcaactggccagtgcggtcttagacccgtatgagagaaatattgtggttgatagatacgtcaagtttttagagaatattcacgaccatctatcgtcaggcctcaacaggcacgtttcacggtggtttgcggataaggttgcgatgggggagtcatcttggttttccgtgggtgagctcacagagccaatcaccttgctcatactaaaacttgtttcactaggctgtctggagtctgtgagtgtcctggtagagttggttctacctgtttggaggcgttcagcactggattccatctctcgaggatctatctcaacaaccaatccgctctcccccctacctgctctaaacgctgccaatatcattgccactcagcttcttctagtagatactcctcctttccctactccttccttcctggcgttgcctccggttacgcttgaggaagtgcatcggtttcagacaagcagggagccttgtttccacgacggaaccttcacaaaacttgtgacccatctgtctttcctcgtcgcattagaggttatcataccaatcgatgatccaatcagtagttcaatctcggtccttcgggaacgaattagtaaacacccaagtctcaagtttgcgtcctttaaacattccaacatcattaaggaagcattcctcaaaccagtctggagacagaacacgaagggaggggagtccgaaagaccgggtctcgatgagagattaatagatgccttgaagatcatagtgaccgacggatcgcgaagtacgtatatcttctcgatttgcgaggaataactgtagatatcttgacactatgtggttatctgactttaatctccacacatatcgatcagttgatccaactcaatcacctgcagcctatgattggcgtaaggttgttactcgcctcaatccctggagatggagtcgttctgttttagaacttcagctttcactgaaacaacttgctattcgcttggcgtcacccaaatcttcttccgatgccagcgctaggttgaatagcctaacccggaccgtttttgagcgtcatttatcgtctgacgagacagatttgttgagcgaagctctgaaaggtctcgacgccggtcctgtggaaaaggtatgtggtatttcctcttctatatataattatctcttgaaggtctcaactctatttctttatgatttagtttgctactgcaggaatcaatcgcttagcggatttactcgtcaactttgatatctcatcccctgtcgtgacttctcgagtggatgtctttaccgaaagcgttggaaacgttattcaagtggtcgcgtgtgctcttgcacaagcttcgactactcctaccgatcgacagcctctcttcgttgatacccccttacaagaccgctattttgacgctattctctcaatgctcaataaattggaagcccatctctctattagatactcagcggtggcgttagaacaacctcccaacgcattgtctatcgcagaacttcgatcattactggttctttcgctccggctcttacatatcgatctaggtctatcacgttacaacatctcccagatttggacaaccaagacgaaaggttcagttgcatccttcattggagtgctttttcgtttgatagtggtatgtattcaattgctttatctcataacgctacactccgctaccctatacttaagactttttatgtttgtctatggctatcctagatgcacgcgggcactgcggttctggatcagagtctgttctgtttactactagataccatgtggtactatactgacggtatgttctacagtcttctcagaactgttatttacgatctactcatcttggtcgtctcatcctttctgccacagaaatccccaaagaagcgcgagtgggtggaatgaatgcacttcggcaacttcaggctgaagaatatgatcctttgggtctcattcctgatgagcttcgccttcaaatacggcaattccttcccttcattgcctctgaacctcttatcgaaaaccttggagtgttatcaataaagcctgacgcatcaccatctctaaatgtcgcccctgctcaagcccgtccttgggaatggttggagtgtgtagagtctacatcatcccaagtgatcgctaaccttcctcctccgatgaaaaactgtaccgcccttccattgttcctctttcagcctgaggcaactatggagccttcactcgtccttccattgacttctcaaccctcaagcgccaatcaagacaagatttcgttgaagtcagaggtatctttcagccaaattttgagcgaaaggtcgtataccgatggttcggaaggattacctcttttcgccagagaatggctctctagctcgtgtcgccaagcaggagatgatatcgagcctcttaccaacgcacagagccaaccggccggccccgaatcacaatctgccgcttcttcacgcgttggtacagcccctagtcctaatcattctttctcagttgaggccagcaaacccgctaaaaacaagattgtggctaagaagaggaaggcgtcgacgtcttcaacaaattcaaaatcaaagccggtcatcctttttgacgacgaggacgactatgctgcaaaatccctgccgcatgcttcgaagaaggcaaaagggaatgcaggagtgacgaagaaggacagcgcgaccaaaatgaaaaagaagtgaacgcatggaagggctttcgatttaaaggggtatgatgtctctgggtatatgcttcagtgacgttagtttttgagtcaaacgttgcagccatttacggtggtgtttaaaaaatctgattgggtgatcatcatcaggtatgggttgtacaaattatgaatgagaatgcagttattgacggtttgagtggacgcaagagcggtattggaggatgagaagacgcgcgtaaacaactgcaagggagcaaacagaaagataatcgacaaaaagagcagaacaacaaacaacaagaaaacgtaaccttctattgtgcttgatggatgaaacagaacgatgcgcggcttttgtggcatgataaggaatgcgtacaagagaaagggtatatcacaagaaagagctgtcgaacacgtttatagatgacatgcgagcctgagctagagctagactggcatgatttatgctgtagcctcaacggatagacggctgaaccgtcctcagtcctgccacgccggtagattccgccttgagatcttcccttgaatgacgttgttcttgctgagaatctcccacattgctcgctgttgtcttgatggtggtgagcaaaactcgaacgtatcgcagctttttgatcacactatccaccgtcttcttgtcgtctccaacaagatccggtcgaagcaatttttcgatagaccaggtctggagtttataatctttgttgatgtacgtcacaacaagacctttgtaggagagcacaagcttggtatgatcgtagaagttgaactaagataaccaagtggatcccaagaaaggtaaagaagacagagtaagacaatgttcgagaaaggtcgagtgacctataggagtaaaacaaaagaacagtacctgcaagacgtcgtgactaagtttaaaaactatgacatgcttcattctcagatatctttgtacaaagtccattcctttgactttggcctcgtcaaggaaacagtacggtttctcgttgtacaatctctcttgcatgaatccctggaaatgcttaagaaggtatatcttggttgtcagttcctccgggaacgtggtaagcgtataatttcttcggacgaggatagacgatcgctgctgttgtttattgtgcgaggagatatagtcgaaatgtctacacgcggcgaaaccaagcaaacgaaagtatgatcaataactgagaaactaagaaagcactgtagtaaacatgatgattggttgagaacatactccttatctggggcaagaaccaaagaagtactatcattaaaatgcactccgacagaaccgtcggtcaaagcataacccattccatatttattgcagtagtccaaccaggagacgataaagacctttggatcagatggcatggctgggatatctacacagttcgttcaaaggattacgcaatcagattatgtgtgtcgcatagacaaactatcagaacagaaattggagggaaggataacgaacgaggcgtgtggaatggtcgacctgcatctctcgcctccagtgcatccgccagattttgagaaaccacatcaaacattccacctgatttctttgtgctcgccgtcgagcttggctcgaggtggccagttgggggcaatgccttttcggaaaagacttccgattgtgctctggttgaagaaccactggatcgccgataatcaggattcgctgcaactgctgctgctgctgttgctgctgtggaaggtcttgaaggagggtatccggtagatgctgacttggttgagatattgacgatctgaggagtaggcgcagatggctggttctctctggtagaagaggacgaaactcggtgggatgtaggggaagttgctttcgagatggagggaagaccagagtgcgcggatgggcgaccagcagcgctagtaagtttcgacaaaaggctaggttctttatgtgaccgaggttcgttagacaccaaaagtggttggcaagcagatctgtagcaaacaatgtagtcgaattagtaacatcatcgtgatttctgaatcaagattttacctaggcgaagaaaaaacgcacgagagaagatgggagagtggactgtctggttgaacagctcgttgaaactccctctcttgttgagcgacgcttggcccaagcgtagccattgtcctagatggcacacccaatggtttgatctgcatcgctcgattttttaccttggtaaagttgtacgctgactgctgaggtgtcaggtgtgtgaagttcggaggcgcgtcgtgcgaagaggcgggaagtgaactagggaacgcgccggaggtgaaaaaagagtgattaaggacttcggataaggttggtcgtttacctagcgcgcaacgatacaggatacgaaacatgtgatgagaaagggttaagttctatatatttttctagaatattgagaccgtttcctttggttagcaaagccaacgtacggggatcaatcgttaaaatgtttcgaatgagatcttgcgcattttccgagattggcttatcaggaggaaagtcgtattgattatctcgaattcgtctaatcgattcaagaaaagcaaggcccagttggctctcaaacagcgtttccaacagtctcgtagagaagaaactcttacttatatatagccttgatctcttttgtttggaaaggaggttttcctattatcaacgtgtatctattgagtcaaaaaggaagatgagcactaaatcatacttcttaatatgagagttggcgagaagatgagcttacaagattaccccgatggaccagatgtcgacttcaaagctgtgaccgttggcagtatcgaacagtacttcgggagcgatatagttgggtgttccgcagattgttctgttcaagaacaggagaatttacagttcaattttatgacggcgaacaatttggaccaggttcctattcatatgtatcaacaaacaaggggtaaattatatcgtgtcaagaaatgagtgcttactttttcctttcaccttctttttcaatcagcgctgccaagccaaaatctcctactttgacatccattctagcgtctagaaagatattgcctagtttaagatcacgatgaataatgttttgactatgcatgtatgaacaagcgccgacaagctggaccaggtagtttcgaacttcaggttccgttagaccttttcgagctcgaaggaggtccatcatgctctaaaagagagaacttacaagctatccatcagtttacttgttcgctgtctggcttaacagagtactagaagaaagaagaggcaagatctacgtacacctctctcgcatagctccagggacatatacacgttatcttggtcgtcaaaacactctttgaaggaaacgatgttgggatgatccaacatcttatgtatcttgatctcggcataaagctgaatggaatagacgtatttgagggaaggcagtcaggatgtccgtcttccttgaaattagtcaagatcgaacaaacgaagacattacctttgtctttgtctttgttgtctgaagagatttcttggagaccaccttgaaggctagatggtttccttccccagtccggacttcatatactctggcaaagccgccctgtcaatgaaaatcgcacaagtagtaacgtcgagataaaaacccgaatacaaccggcagttgcgaacccaagaaggaattaagccccagagagtagagatcacaagatagatatcagctttgaattcggacttcaggtttaaacagggttcgatagtacgttatgaatgatcaaaaagaaaggagcggatagacataacgaacctctcctaggagacctatccgctggaattctatcttgcggacatgatctcggatgataggtggtggtgtgctcggtattcgatccttcttgtccttcttgggaggagcaggagcccgagcgaccggggcagcggtaggaataggttgaggaggatccgaaggcatgctctttatttgagcaagtggattgtctctaagtaagagttgagagtggctgtgggaacaatacaccagagggaactggtatggccaggaagactgtgtgagtgatggctgttgtaggcagtcaaaggacaggggaatcggagaactcggataaatatcaagttgatttctttttcctttctttcgacgcgtcggatgtaggaagacgcgtcgctcttacgcgtgcgtgttcagtcgcgtggcagatgtaacgaacgagtcttgaagaagacgattagaccggagattagaaatgaagaaaaatctgaggatgatacctcttggtcgtacaacttctagctctaatcatagcttgcgttcaactgtacggtgaaagtcatcatatgtcaagaaggcgctgggtgggtagatggtagcctatcatcgtgcagtgtagctgaggaaccacatgtataaagaaaataaccctaacatcaatcaggccgttctcgtccaagtggcttgaaccaaccctgatgaagacacaaatcgcgaggcccaagcgcatacagtcgggtttctctttctgagccaaacgactttgatctttctctcttccccaaatgtcttcttacggtcgaaagggttgcttcaaggtatgttctttcattggaataaacctgaaccgcgttcaagagcttaatcaattgatcaaggattttttttccaattttctttccttcttacttcctacttctttcctacccatctcagtgcggaaacatcggtcacgtcgcggccaactgtgagtcggtcactcggttgtgctacaactgccgatcgccagaggtgggtttgattaaattgctgatcgaatgactgaaataagatcaaaccatatggataagtttgagggatcatttaccggggctaacacttgattgatgttggcatggtggtcgcgccgcgttttcgcggaaaatgtattgtatcagcacgagtccaacgagtgcccttccccgtgagttgccaactgagctcttcggtttgtctactcaatacttgagggatctctactaaaaccactgttgccttttctcttttcgcaacttggcgatcgctcgaatcgatgcagtcgaactaccgaggctaagcaggtaagtcactcgatctcggacttgcatgaacatcttagcttgacaatgtttctgatctgttttcattcattctctctatgctctagtgctacgtcagtaaaatctttctcaccctgtcgaatgtgcccggttgacagtgtaactgaaatatcatctctcacgaccctaacgtagcactgtggtggagttggacacattgtgtctgcctgcccatcccagccggctcgaggacctggaggacccggaggattccggggaggcttccagggaggttcccgaggaggcttcgctggtggtgctcctggtagcttccagggcggctttcgacgacctgtgaacccggctgggtttggtcagaagtgctagtgtgtccgtttgccatatgacttatacagaaattcggaagagctgattcattgtttttatcttattatttttttgaactcagccgatgccagggtaagtctatgagtggtttctcttcagatccgtttgaaaaatacaatgtctctctttcgagtttcttataatcaactggaacgttctcgatcatataggaactggccacttgcaaatcaactgccctacccctgccacctcgtttgcccgaggccctaagacctgctacaagtgtagcactgttggccacgtaagttctatacttgattcgcactggaatatatgctttgagaggagatagagtaagtgttgactaatctgttgttcaaccttctcctatctctgatacagatcgcaaaggactgcccttccgctgaatctgcccctgccgctgctaacacctctgatgccgtccacgtcagccaggacaccatcgtccctgctgccgccgaaattcacgcttaaaaattcccaaatttttggaactctttgaccatctcacactttattctgatctatttccttttcgaaaagaagaagattgattttcatcttattctatctctgttcgtattttgcttcgttgtgttagtcgagttactcctctctttgtcttctatatttcccatggcatgtctttgtcgtctgcgttccctttcccctcgctgagaagagaagagaagagccgtgccagctttacgcttgaattcatgttggttacgatcacatgactagattcggaagcagccgaacggtttagctgcttaggtaattgttctcaacaatacgactatcatctaagaacgtgccttggtatctgcgtatctccaacgttcagtatcactcattactctgtccgatgagcttccaagacattcagtaacgcctatctgtatattctccggaaaacagaccatgtgttctgaaaaatatagaaaacagcctgtatgggcgaatgggattgacgctcactaggtgagggttgtgcgggggtatgtgatcgtctactgccaaagaggggtatcggacgcactataagaaaagcaagaacgttcttaaaaagctaactcgctcgctgcctgcaagaaacgaagcgctagtatttcattgtttacgacttccagcctgatctattgtcttggcatcaccaaagatccctcaccttctcaggatcaatcgtgtgtgaaagaccaactgacgcctgatattcgaatcaacagactactgactaatcgaagaataactggcagagagcttattgaagattcttctcttcctacctaaacgtgtttctttgatgctgaccttccgctcagttccgtttgttggagcggaaacagaagaaacagattttttttctttcgatcgtgaacgtcgtaaagagtatataacgttgattcttgactgtctccggagtttccgttttttgttcttcgtaccgttcctttgctcttacgcctacacagcaagtcctgagtgctaggtcaatcctcaacaaccacctccttctaattgccactctccaaaaaaagaatggtttctatccctggattggtcaccctcgctttggtggccgcctcatctgcctcggctcagactttccgacgaacggctgcctgtcctactttgggatgcatcttccctcctgagtgagcatgtttattctgccttatcgaagcgcgtcgtttccgtctgcttccatagatctgcaaactgaaatatatcttcaactttgtgtcgaacttgaacaattcctcgcttctcaagtcaaactgatttcattgccggacaagttttcgatctccgaaccgaggtccaggctcctgtgaacggttcccaggcttacaaaaacggagttccttcagtaagatgtttgctctttctttgatccgatcctcatctgtttactgatcgccggaccatcatcctcttttatttgttttgtttttgatttttgatatatcacagccagacttcactcttcaaatctccaaagatggaggcgagtggactgaggtcactcaggctatgcagatcgctgatcctgagcgtacgttctactatcttgggtcttccgtgcactgaagttcaatcgacctgcgactgatatttaacgtattcggtcggaacaatctacagcaaaatcttactctttctcatactatgaggatctcttcatgagccaggccaagaacgccactgtcgtaaacgtcatctctaagtcttacgtaagttattacattctctatcgttacctctgtgccttcttcatcggtctaacaagctagtaagctgatcggttatctctcattcttcttctccttctctcttcaatagcgacacatcgctctctacgagcctggacactaccaggtcaagcttacctacaacgatggcgctgtgaccaatgccaactggaatgtccttcctttgtccgagaagggacgaatggccaaggttggtactctttcttcctgatgtcagtgttttgggccgaatagccatctgatcatttgttgcatttctttacgtgaattagaacgtcatcctcttcattggagacggtatgacccagagcatgctcactgtacgttgtcttttggagaaattcagcgcgccaaatactgttcataacatctaacgtgacatccttctttcttgtatcttcttcaggccgcccgacttttgggacacaagtctatcaacggaaagtaccaatccaagctccaggtggacgaggctcctgctttcggtatgcagatgacccactccctcgactcgttcatcaccgactcggccaactctgccaccgctctttacaccggaaagaagtccaccgtgaacgctcttaacgcctacaccgactcgacaggaactgccttcgaggatcccaagttcgaaactgtgttcgagatgttccgacgaatctaccacggacaagtcggaattgtctcaactgcttacattgccgatgccactcctgccgctgtcgttgctcacacttcccagagatctcagtacgatgctattatcgagcagttcttgactggagtctcttccaactactcgtccgagtggaccaagtgggatggagtcgatgttctgttcggtggaggagccgagaacttcttgcctggagctgccaacaagaacatttctcaattcgatcgatgggccgacgctggctaccaggttgtccatgacaagactggaataaccgctcttgacaacgccaagcgggcgctcggtatcgtctgccagtccagcatggctacttggctggacaggaacgtctacaaggacaacttgaagaagttcaagcagttcaacggtacccttggaacgttcgaccttcccggactcgaggacatgaccctcaaggctattgacatccttcacacccgagccacccagaacggaaacaccggttggatgttgatgagtgaggctgccagtatcgacaagcagatgcacgttcttgactacgaccgggctttgggtgatgctttggagcttgacaacaccgtccgaaacactattgcccacctcaagaagattggaatctacgaggagactctcgtcatcgtcactgccgatcacggacacggtttcgacgtctacggttctgccgacaccaagttcctcaaggagcagaagggagaccgagagaagagaatggccgtcggaacttacctcagctctggtctctccggttaccaggtcgagaaggctcagaacccccagaacgagtcgatcgtttacggagctcagggacccaactttcctgtccagtgggatcctcgatacacctacgccggtggaatgggtgccgctcccgatcaccgacaggactttgtcgttcactccaacggatcccgactccccgccgttcttgacaaggacttgggttacgtcgttaaccctgccgatgctcccaacggtttcattgtcaatggaacccttcccaccgatgagccccaaggagttcactcgttgactgatgttcccgtctacgcctggggacctggacacgagttgttccgagggattcagaactccgttgatattgctttcaagatcgccgttgcccttaaccttgggcagacatccaacgtcacctactactaagatggccactataggatctcaatctttctttttcttctttgacgagttgtggatggggatatttattttaaaaattgttgctgtagcctttggtttcttgctgttgctgttgctgtcgtttccgttgccgttgtcgttgtcgttctcttcgcgctcgggttgttgtagttgttgtagttgtggttgttgtggccgtgattgttttggtgttgctgtcgttgtgaagtagtgtaaattttggggttgaaggggtttacttaatagaatgtgctttatatccacttcttcttcttcctaatcctttatattgaatggattatgctcctagtcttttttgttaccacaggttgagatggtacaaacccccttctattctgaaattatgatctccgtcaagtgacaggagtaggaaaaaacaacaaacacagctaatttatcaaccagatctgaacagtgcttgtaggatcatatctattcttcatttaaagctctacgacaaccggtctgtcctcttcatcctcttcgtcctcatctagatcgctcgctcctgccgctgctgctgatgtatccatggtccatccgaacttatctccgcaaagcgcgctcaaggctaaccatcgatctttcacctcgatccaatccttttcttctgtcaatgtcgagaaggggttgtcgaacctggttttgaggccacgttggagatcctgagtgatcgactgagcgaaccagttctctgcctcgggtagatcttcctgaaagaatgtatctgggagccaggaaagctgggcgtgaaggagttggatgaagtcgaggtagaacgaagaaagggcacccggctgagggacagtcaggtaaggtgatgatgcagggacaagatgaagatgggagttagtgatgagatagagaactcgacggtaagtcgagcacaagagcgacggcgtttgaagctgaattgacaatggaagaagaagcgcgagctgagtgagcagaagggttaggtcttaaaaaaaaagcatacaacaagggtcgaaggtgagtgagataagacgattcattgcaacctttaagctctgtttaaattcttcagatgaaacaaagttttgctcacctccgttacattgctcttgaacaacatgccagaacaaccaactcttatctctagcgaacgtcgtggtttcttctccgaccgcgccctgtctccaactccttttcagatcaaacatcgcccactttataccgtctccactcggttcgccatcctttgaccgtgtaaggtcagctcccgcctttccttctttttctgagcggtgtctcaacacccgctcacctcctaatgagaccccgatcatatcgccttcctcttcttcgaccctggatgagagctcgaatccatcaagatcccatcctccaaccgagccctcctttccgagcactctctccacttttccaacatcgacaaacttggtagggaatagcgttttccaagtttcccacctatctatcgggtacggagctagctttgtatctagccctttgagaacctccttggagaccacgacgtcaggcccatcggtcggcgtcttgagagagtcgacagatgacgaccaaacgcgagtgacgacttgaagaggatgtgagaagtatagggtacccgtccgcggggacggtaaaacttcatctagagaagttccgccaggaggggataagacgatcaagtgcaacgacgggggaatcaacttgaagccggcaaagtcgagaacttgattcaaactgatgtatgacgtcggttgatttccgcacaatgagaaagaaaggattaaggttaacgtaaaatgagagttttcgttcagggttccattagacgagagaaactagaattcgtgaaaacatggcaaagaagaagagagaatatgtgacattctctcccatgctaacgatgaacagggaacagatatgatccaggcgggtggaagggacttactcacctgccgtcgatgccaacaagggaccctttcggaagatctttaacgagccagaagcctgcacggtcatacagggcctgactctgttctggagtaagcttagacaggaagtttgacatatggccgagcaacgataagtgaagtcgatcacagacgatgctgaatgggtgatcgcttgagatgatggttgtttgtgaggatggcagggtgcactaatatcggcatattccgcctttgcccctcctccttttctccagacatacaattccaaataaaaggggagctactgggcaggtttgaacatagtcataaaattgagataggtagaatctgtatcaggcggaccttcgatacaactagtcaatagagaagtcaagaaagagtaaaagaggctagacaaaaaaaacatgagatgacaagatctacggtggacaaggacacaagaatggttgggaaaaggcgagggagggagaacaggggaaataaatagagaagaagaggaaggcaggagaaagcgcgatggagaaataaaagaaaggaaaggagaaacatgcagcatcgctctttgagatagaagaggaggtccaggggagccatactgcatcaatcgatggggtcagctccatcgtccatgagcaaccttgtgacccattcttttgacgatgaaaccaatcgcgatagggccgattatcgtagcaagtgcaattccccagagaacgacaaggaaagctaacataaaaacgaagaaaggctcaagcgttggtaagtgacttctgagctgaggcttgaagaggagaaagacaaatagacataccatcgttcccgagaattttagatttgttgtatcctacctgagcaatcaacactccaatctctcctcgagggaccatcgagattcctaagaagagggcaggatagatggctagcttttcctcgggctccgtaggcaaatcttcctcggaagtcatttggatctctgccatctctgcttcctctagcgccatggcgtcctttttcacagcagttctctttcttgtcagagctctctcggccaaatcccagattaagacgcatataccgcaagacattttggccaaaaccatcaagattgcatagaccacaccttgccagacgaccgttccttcccagagggaaacaaatggcaccgcggttccaatcgaggcaaagaagatgggcgtgaagatgtacgcagagactggctcaaataagcgctcataagtctcgacaaacgggttgttcaagacctgatcgatcgactccggctcgattgggtggcgaacagggtaattcaagctaggacggcactcgaaggatggaatctcggcgcttatggatggttgcggagagataacttgggttgcctcgtctttggacagctcaggtggaaggacagcaacaatcaatcccgcgacgtaggcccccatgaggggagaactatgaatgagagaagcgatgctaaccccagcactcagaacagcaacaattatgacaaaacacattttgtcatctctagatcgaagtagatgttgatgtagatgttgtctgtaaaccggaataaagatccatcgagtgatcgggaaggctacgacgaggaaggcgatggaagtgacgataggctgagcaatatgccaagggtcaaggcctgaatttgattcaccgagatctgcgatgacaatattcatgacaaacgcaacgactgaaccgagagggaggaaagagaagaagagccatcggtcaagtgcaaacgagctttccatatagaaagagagcaaagaatgatgagaactaatacacactgtcgtcaatcatcgctgccgcgataagcacagtgccgattcttgtttcttggagcctcaaactcttgttggccgccttgagaacagagacagtggttcccagactggtgaccgacaaggctgctcccgccacaaaagcttctagaacggagtacgaatatcggggaaccatcagtgccatagaaatgccgatcggaaagaggaccccaacagcagcaataaagcatgccaaggggagtgatttgaacagatggttcagtggcgtcgttaggccgcctgtgggatttccatgtcaaacgtttaatcaggattcaagaaagtgttgccaagagccaagagagtgcgagagggatacgactttacgcaaaagaagaggagtagaacatacactcaaaaacaatgagaagtaggcctatgtaacctaacgtgagaaacgtttgctcccaggaagagtctaggatgttacctagaggagttccgtagatgacaccgatagcaatctgaccgagtagaccggcatgaatgaatcgctcgacgacgaatctggatgattaccatgattccggtgttgcagaacaatatcaatgcgacctagaaatgagcaccaattatctccaagaggttcatcgctagttcatctgataaacgacgtaaacgtatgataaagaacgatgacatacccaaagacgttggcgaggattaagaaggatcccaaagagagaatcgagacaagggatggctcgacgtatggcacatagccggacacttgtacgtccatttttctactatttaaccctcgacaatgattcaagaacgagaacggaggaatgggcagagagaaaggaagagacaaagatgatgaccgttagtgggaacgacgaaagggtttggtggtggtggctgaagaatcagcagcacgctaccgccttatatcaaattatctcggtcttggctgaatcaaccgccgttagatctatacatgagcatcattcttcaggtatcatcagatctatagaacatctacagtacatctacaaccatgatacttgtttttacatatcgtttctcatatctacacgtctgcgttccgttcagttggctcaatccactctaatcccaacgcctcgaatacagcaggttctcccttttcttgagaaacggcgatctccgaaccgtctgatagtcgagatattccatgagaagcaaatttgagattgagcccgttggcgtgttttcttgaacaattgttgaaagaaaagagatacatgttcagatcagttctacatgtgatacgagcaagcaagcaagcaagcaagcagaggcaagactcaccgaatatcccgttcaaacattgtcgatccagtccacccaaccacacagacccaatatatctcgtatgctgctcgacccaaggcgacacggaacacagtcagtcacataaagttcaagtcaacgcatggtatgggatgactcggatgagctgtctctcatttttgttcatggcgaaataagtaatgaaactgacgtacgcgcaaagatgatgtccacacgaatttgcctggtttgtctgggtaggctcatcatgatgaagcgttgatgaagccctcgtagcgcattcgacccaattgaactccccgacaaaatgtccgtcaatgcgcctaagataggccatatgttagtgattcaatgagaagaacgatgagactaagacgaaacgacaagaggccacgcactaagcgttctcaatcgatcaaccaactgatcgagcacctggcttgataccttggaggacctgttcatcgcaggataggtaaacacgatgtcgacatcatttgaatattctcggcctctacggtagcttccacagatggtgtgtatacaaccaggagaaatcatttcgagttcatccgagagaaactttgcgatcaatggaacctcatatcgagggattctaaaatcaacattcaattatcctagatcagatcttcgatcgagtatgcctcgcatatacgtacaaacagtcatcaatcagcacccatgaaactcacggcgtctgtaagtctgaccagtaggtcacttggaccttcaaggatggtctcgcgtttgccacatcttccagcgtccgacaatcatggatgtcatagaactctcgagagagccgactgcctacaccgtgaagagtttggaagagaaggattgaccgaagtcgaacagatgtccggagtgtttctgattgaagacaaatgcgacggtccatttcggacatgtacatatatgaacatcaagtggtcaattgtgttttgtacgcgtaaatgatcgatgaaaatgttcgagaacacacgtgagagtttgatctgtccggttgaaagatactctccgatctgaaggcagcgtgtcagcctgactctgttttttaatatcattctttgctcagacacatcgacggacgaacctgtaaagctattttgggaccaatgaaaggaatcacctgggcctcgctgactgagcaaatttttgttgggtaagcctttagagcggagcacgctctactgtacgccaatgcatgtttctcgtcatctttctttcctgcttgattaagatcactttctagcgtgtcgtcttccccgttctctttccaaacacggatgacgtcgagttcctcaatcaaaagttgattgatacatattgacggggattttcgacagcatgccagtctcgggagagtggatggttcgatagatttttccgtcgctgggaatgaagcgagaatgagtgcaggagaggttgtcttgaagggattatgatcagatggagaacgtgtgttattatgttgattgggaggtcgagtagaaggagaggctgtttgtttccgaggccacttgtgagtaggctggctatctggggttggaggaagaaagcaaggatcaaaagaaaagggttctatctgatcagagaaagaagacatcaagggaggaatcaaaaattctctaaaataaaataaaataaaaacagatgggagtagggagagagaaaccaaacgaccaaacaacgtgagcgcaacgtcacagatacggaagaggaagcgactgatccaacaagtcactctgtaacttacgaggaatgatcgggggggaccaggtaaggtcgatggtccagcagggcttcgtgggctatgcaatcggcgagccatcgatcaagaacaacgatcttggagtcctgcgcgtcagaagagaatgtggagagacgaaaacgttcaaaggtttagctagtatctgaacaaactacactcgtgagacactgcctgatctggatatcaagaagtattcacaatcaacgtcggatccagtgctaacgccagccgctttctgcccatcagcctagtcagaatgatatctgctcgttcggggtggtctatgagctgaccgccatgaatggtgagttcggccgagagttgccggatatcagatggagaatattttgtagggattatatagatcttcaaataacctagaatattaggcatctcaatcgacagactaatcagtctcgtcagtttttgagtcttttcagtgtgcgtttgtgtgagtttgtgtgctgtgtctggtctttcttaggatgagcgtcggacgtagaaggaacaaacgaacatcatagaaaattcgatcaagattcattacaaagatccaaaaaaagtattagagatttttgtagtttcctgaatttgtttctttccttcttcttcttctttctatccacccactacttgcaattcaattcatccttctatccatctagtcagtcgaaagtcaagtgttaatacaagtacaaggacgctgacaggcactccgggcacctctagcttttgaaaaacagatgtccttaacactgagctgcaaccggccgggatgtggtctttcgttcgacccagagaacaatcagcctgggtcatgtatctatcattctggagcccctgttcgtcatttaccttgagtttatctccttctctcctttcctgttctgttctggtcgtgctttgtacacatccaaacaatggcgagtgatggccttgagaaagactcgttttctgacgatggttgttgagcttgtttgatgcacacatatacaaacagaaatttcacgagggcctcaaatcatgggactgttgttcggacgtcaacaagcctgtgatggaattcgacgagtttgtcaagttaaaggtgattctaagctctgcgccctcttccttgtccgtctatcgaagagtagggatgattactcagccgggtctttacctcgcttttctctaaagggatgcacaaagtcaactcatttggcaaagaaggcggatgaaactttccaatcaaaagctcgtccgagcgaggactcaaccaaggctggtgcccgcccaaccgcgatttcttctgagggggtggagacctacggcgctgctgcccctccaagcggaggttcttccagcacgagctctgcagcaactacgatcgtcaaccctccagctgccgtcgctacggctgtcgctgcaagttccccttccgaacaagtcgaagagcaggatgatcctgcgcttcttccacccaagtcaggatcaagttgtaagcggcgatcgtgcttggatacatactcatctgacgatcaagacggaggagagtgctggtaccaccctggaatcccgatctttagggaaggttcaaagggctttacttgttgcaaacgacgaacgttggagtttgacgagttcttaaaaatcaaaggttgtcgtctagcaaaggcgcatctctgggttggggcaaagcccaaggaagctgacctggtgaggccataggaattgaatacgttctttccggtttccctcacttttctttctccttctgtcattttctctgtcgcatgattgatcttgttgtattcttgccccttcgtttagagcgccgagagagaattggtaaacgctcgagtagatcactatcagacgcccagtcaggtgcatgtatccgtatttgctaaatcggtcgacaaagaactctctaagatcacgattgaatccgaggcagtatgtgttttgtattatcttcttttgcctttcaactcttctttcgaacggtgtctctccttttagtactttgccaagaacgtttttcctgattctcttcttcttgatcttgcatttgacttttctggaacagattcatctggatttgatcttgcctttgcacaaacggaccgtcaagacgatccgactttttggacctatcgacgtggagaaaagtcgatttgacatcttgggcacaaaggtgggtccgatgagtcgttcaacttcgaaggaaaaggcgcctttcggttggacatgagtgctaaacagggcggaactgatatccgttcactcggaaaataaattaaattggctgacgaacgaacaggttgccttgacgtaagcacccattcgctgttagctcctggataatgaagaaaaagaaaggaaaaggaaaactaaccaactggctctgatgagcgagaccacttttcaggctgcaaaaagcgaacggactctcgtggtcgcttctcgaaaccccatcgaatggggcggcgcctccgccgggatatgccctgacctttggggtcggtggccgaacagggtcgaccggtgcaaaggagatgatcctggctgacgaggtccgaaaggtgtctatttaataatgtgtgtgtgtgtgtgtgtgtgnnnnnnnnnntgaggaactagagatgaacagtagacagcagagaccgcagagcgaagcagaagaggtcgcatttcccaaagtcgcgtgtatccctgatgattctcatatgaggcagaactgaaaaacatgatgaatcactgaccaggaagccgccagggaaagatggaaagagacagagagtcagcttgtacagcataacatcacgtggctacatgaacgctgacaagcctccgcagtctgcgacgaacctgtcattctacccgcctcaagatagtctacccggccgactatttgcatgtaatcgccggctcgggaacgcttcgtgccttgctgcggaaaacggcagtgaagaacgctggtgtgaacatacgggatcgaattaggaatgttctgggcgctgctgacgtaagtgattggtaacaattcggcggatatcgtagccatctgtaaccaaaaacccctcaattcaccgagcggcgggcccgaatattgcttaagttaattcggtgaatcctacttcagcctgctcaccttcgttttgctcttgggctcccgtgttcttcgtgttcagtgctcttcgtgttcttgcttccactcccactcactcgctcatttctacggctgtctcgggtcttttcctttctttggtctcctttttaccactcgtcctttcttttaaggctctggaacaaatctcatttcctcttcagttctattcaatcttcccctcctccttttggatcttctcttgatagtcaaccaacccactcgcctacctacgcttcccgctctctcttttggacagaaatgattttaggctacaagaacaggaattggcttgtcatattcacgggcattggtctgttttactacttcattcatcaccatgctcctcatgtgatcaaagtcccggcttcctattcccgtacgttctatctccatgtgttttgtcaatctcatttctctcctagttaaaattctgattggcccgagccatgtgtgtttgcttggctatcgtatgtgtaggcttgatggaagttaacggtcagaatcagaaatcaagcgatcaacattcgctgtcgaacgaggatgaggcccatgctctagacagtctgttccaagtaccttctattccctctgtcggttgggagaacaagatgaagcacccaaacgtacaggtgatgagggatctgatggaatgtatcaagaacgatgactgccggtttgtgccttttttttcttttttttcttcctgcctgacttgtccatatcactctttcaaactcaccatatatgttgcctccatcacgatcgcttcctctcccttcttgtgcctataaatcactcccgacttgtaccagacccaaccaacgcaagtttgtcgttctcgagtcaatgaactacagagaggttctccacaactatatgtctggtgagaatatctgggcccggtctgtccttgaggctttggacgaccttggttacagctatgtgtttgctagagatatggctcatggtaagaatcgctcgttcttctggcttttctttgcgttcagggcactgattctcttcttatccattattatatatctactgttttgtatctctctctctctctctttccatattgggttcatctcctccgttcctaaattgcatctccctttcacctttagccggagattgggtcgctacgctcggtgatgccgttttggccgtcgtcgctgacgagcagtcgattcaggaatgctacgaaaacagcgaggtctgcttgagaactgtagaaaaccccctcggtatccgatttgaacgttagtgactttcaattctgtgccgctttcgctttcggctcaatccggcttctcggtattggttgtaaactctacctcctggcccggaatatgagggtcctgcgaccatgctgaccatgcttcttctctgggtggttcatctcggatcgttctcccgtctctctactaggcttgttcggccctgcgttcttcgaaagacagatccaggtttgttcactcctctcgcttcacattatcgtcatcactctcgccttcttcctcgctaaatctgcttttgttgtctatttctatgttgtgaaccttaatcaagcctctcggccccaaatggacgctcgtgcccgagaagccagattctcgtagacaataccttggttactcaatcgaaaagcactgcatggctcgaaaggttccctcatacaaaattcgatcgaaaaagagacaagtctgggtgttggcaaagtggatacagtccgtgttctcatctcccctcctctttcttcctgcctgagccttattgtttagtgtgttgacgactgacaacacctgttcttcctattcacagcttctttactgatgacagtttcccatattcgaaagacatcttcgtccgagccgctaaggagcttgatgtcgagtttattggtgcttggcgaatcgaagatactgatggtcacgttcccggtgtccgacatcttggcgatggaaacatccttacgtccgagaaattcgatgaggctctcgtcagtgtactcgctgtcgttggtgtcggtgctccttggatctctcctactccctaccaatcggtctgcttcgggatcccgttcgtgaacccgacaatctggggcggagctagcagccagcatccgtttgctcagcagtttgttggagaggagcacggaatctataccgttgttgagaaggacgacgatatgttcatcagtgtaagagcttccttgcatttctagactctaatgcttgtaccgaaacacgtgtcctgactcgaacgctctcttccgttcgacttaccagcaactcgccaaggcgatctccaagcctcatgacagatacgttccaccacacatgacacggaaagccatggttgaccgagttcagagctggctcactagaaactcgaccgagatggcaagagaggtgctcaagtcacatcccgagaggttcaaggtgggtttcttctggtcttcctctcttgactttctggtttctggttcacgactgacatccagattcgttcttattgacaggggcatattctcgtttgaggaagaaataagacacaacacacacatactgttgtatagacat

SEQ ID NO: 844 - DNA, 12789 bp, Xanthophyllomyces dendrorhous
ctccttgtttcttcctctttcccctgtgcctctctgatctcttaaccctgtcttctcgttctttccctcacatgatctctcaacgatgttatctctgtttttttttcttactctgtcctctacaattttttttctatctttgatccttctcatcttcctgctcctttctcttgtcttctttcctttagagagttttcatatttcaaagtcgtctttctatctgttcctctcgagttatgtcccgtgggaagcttctgtctcccatgttccgttttctcaggactcatctcctttcaagcatcgctcatctttttctcctcatcttctctcttccatatccttttctttcccttctcgtaatgtgcccgttcctttttcttttgatgagtgtctaatgaaccgttgtcgaagaaagaatctcatcgtgggtccacgtgatcagctgttttccccgtcaagccttttgaaatagccaaaacaagaagaaaaggaaagagaaaagtaagaaccgtaagatacatggtaataagactgttttgctcatgagttccagtcatgaattcgatcgagacgcgtatcgttgtaaatgtacacaagaagaaaaaaaaaccccctccctgtcatatcttccctaaggatgaggatgatactcgatctttggtttcttcgcgtgcatgttcgtatttgtttgttgtccagattcttgccctggaccgggtatcgtgtcgagttctccatatgatcgtcggtgggtcgtgttggtgttcgcgttcgtgtttgtgttcagcgtcgtgtttgtgataaaattcgacgacgtgttcgtgcctgtgttagaatacaggttggtttggggctgaggagggacgatcgggtacactggtcgatgagaattaggaccggtcggcgtggttgatgatcctgtgggagtagttgatgagatcctgggtgtcccatcggtcgttctgtttcgccgccgtatccccgttcgtcgagagagagaagacacagagacatacacgtacgcacaggagaatagtcaagagactaggatcaataaatgtatgtaagacagttgcaacagaaaatgactaacatctttgtatctcctaggctagctaaactttgcgctcgcttccatgctcccgaggcatttactcctggtctgggtagcacggtagattggaccgctgagtttccacctggtgcgttctgaagatccctcagcgcaggcagaacaagaggggaaggagtagaaaaggaaggccgtcagtttctctctgttctctgcttcaggatcgttcccataaagagacgctgtcctccatataagagttgaagactgacagtaaaattaaatcctccaacttttgagccaaatcccggtccgagggccttccctcccgaggagattcctgcaattggacgggaaccatgagaaggtgctactgaagtcgtcgttgtcgatataaggggtttggtagaaatgttatttgtggccgtcgtctgtggttgttgctgttgctgtctaggtccgggtacagaggcgattgaagccggctgacgagaatttatgacgaccgacggcttattagtgttctggaggcctacttttctaattactcacaaacaataaggatttttgtcatggtcaacaaattatcaaggtggagagcaaatggagatcgactcagcatactcttgttcgaccccatgtctatcttttttgctgtctccatcctttgtgattggctgaccaccaaccagtccccctgattcatagtcactcatgtccagattgactcctgtgagatcatagtcttcgaagactgtgtctcccaaacttgaaggtgggatctccatctcttccagcattgattcgtcttgcacgactttctgtccttgaatcgatccagtcccagagattgtgtgtgtcgattgacctgacggcccaacagccgaacctgattgaactctctgattcactgtcgtcgatctggccgaatctggtggctcttctctacctgcaattgccgtctgagattcatatcgttgattccgagcagcagcggcagccgtaagatattctttctggtgctgggcttgctcgaccggatggctaggtgggtagactttctgaggaggattgatcggatcggatacgatgtttgctcgagagttatgagtgtccaaatccggtcgtctgtacagagctttgacatcaaaccgagcctgagaagagcagtaggtggattgatgcgaggaggaggaggaggaaacgaaagtcagaaaagaccagaaagggacaagctgacttagatacaaggaaaatataagatgaattcgactaacgggggtagctttgacattcttgacttttaccagatagtctttatcgtatagacagttgcccatcagattgccgaaagagcgcaacgctcgtttcaatgcatctgttgcagcctccttgttgcactagacaacgggtggaacaagataattgagcacagtacgccatagagtttttgtgagctcgcgtaccttttctaaagcgtctcctttagtctgcgcgttattcattccaccccagccagaatcttcatgaaatgtcccgtccctcagagtgaccctgacgagagccgtcacccctgcggagaatcgtccagagctaggatcctgatcgagctgtccacatgtatgagcgagagattatcagctgtagaataagaggaaagggctatttgcgcatgaaataggcacaaaacatgacgcacatattcagttttcatattgacaatcgagtgggaccagccgttaaacccaaagatctcgttggcgatgttgatgactgacgtcgtccaattgagatggaaatccattttctggtcagaactacaagtggggatattcaactgatgcacaaacctttccatccttcgatatatgtgaattttgatcctacgatcaaaccgaaagagcatagacaacaatcagcacgtcgcgtcaaccaaaattgaatcaactcgtagacactttctgattccatcatctgtcaactggagacacagaagatcatgttggtttgagatttacctcctggcccgggtctgctctgtaggtattctggaccgagctgtctgtccaactttgcttgcagtgcggctagctgtcctaagcaatcgaaccctggctcataccttccctctatgtctgccatcctagagactcccattccggccgcgtacgtatcttccgggttctttgcagcccatgattctagcacggacccttcccatccagatccaaaggcagtagaagttcgaggcatgggcaccgacgtggagaatacaggcagggagggaggatgaggagggaggtggctgatcggaggtggccgtctgaacgcactgggaatcgatggagccgattcaggttggcccttgatcgattggatgttggacatcaaaccaagctatgagcgttctattgaccggcttgagagatgatcaatgtttcggttcaagaatgagtttggtataaggccagtggagagtaagtctggggattgaatatagcgtatgtgagtgggagaagcgaaggagaatgagcattattagggttagatggacttgatgtctcctactcctatcctggctgctattgatctcacccaacccatcatccatggtgttccgttttgtaaagctagtctggtgtgttctggtactcgcctcagtatgtctagctacatctacttcgtcatcctcagatcataccaataattgggccgtgttggtgtcagcctctcgatattggtcagtactgtgtttgtccatcgtgatgcttcatcactcgaaagtcgatttacgtttacatctacttggctctacgcttgcgatacatctaggttcaactaccgagtgagtgatatcgtatggaaacatattttgaactgcattggaagcttcaaacttaacgtgtctctacaatgaagcatatggccaatacgctgggaatgtatgtctcgtctgcctttcttgttgtcttgtcttgctgatctgtagcgttctgatgacatatctccatgttccacgcaggtaccgaacggtcaagcgtctagggattccagattcacagattatcttaatgctatcggatgatgtggcatgcaatccgagaaactcatttcctggcacagtgtacgccaacgcagatcgaaagctagatttatacggagagagagtcgaagttgactatagggggtacgaagttagcgtggagagctttatccggttgctcacaggtaacattttatctcgatatatttctggctcctgctcgcactggttcagagtaaaccgggctcaaatcttggatggggtttctctttcgctcttctcctgtttacataggtagacactcaccgtcaacccctctgtcgaagaggctgttgacggacgaccggtcaaacgtgtttgtgtatttgactggacatgggggtgatgaatttcttaaatttcaagataacgaggaaatctctgctttcgacttggccgacgcgtttgagcagatgtgggaaaaaaagaggtgagttcttgttgtcctcaatgcatgtgtctatttgcgcgcaagggttgaggccaacgctcgttcttccttactctacctctcattatttggctaaaaaaatcaaggtataaccggatgctgttcatggtcgacacttgcgaggccaacacaatgtactccaaaatctactcgcccaacatcttagctaccggttcggctgagctgggcgaaccgtctttttctgttcgcatccttctgtctttgctcaagtctgtgcttcctagtcggatatttacgattcatttgtttgttggatcctctttgactcagcatcacaacgacccagagattggagtgtctgtaatagactcgtttacacatcatctactaagctttatggaaggtctcaacaagacttcttccgctacgttcgaggaccttgttcgtctggcttcttttggtcctgttgcctatgttcacatctgactctgtctgttttcgcaatttcttctatcttgttccgtcccgtctggattctcagtttgcaacatacgacaagaatgtcatccgttcctccgccggcttccgaaccgatctatttcctgtcagcttgtcgtcgacaaagctaaccgacttcttcggaggtgtagcccaagtggacgtcataatcccttcgtctgtgccttctgctgggtcgacgggtgcacctctagacgctgccaatcgtcccaatcaacgggagatccatattcgcgaaggacttgctcttgggcaggcaagacgttgtcaagatgtagccaaggacagctttgttattcaaaagaatccgatagttggtagtgatgctgtaggacagcgagcacagatcgatcggagaagcttgtgttggatcctgctgggagtcggagcgggtggcatggcttggtggttgggtggatgacgtctaagaatatcaaaagattaaagaattccccagtgaaatgaccaagagttcatctaaagaacagtaccgcatcatttaccagaacgggagactgtgtaatcaacaagagatgtataaaggggaaagggtttgaaatgtatcaacaagcctcaggcatgaccactgctttaatttagcagttacggtgttgcaaccgcaatcaccctccaggtttggttggccggccgatggatccgcagtttcaagcctccagaggtccgcagagccgaagggcccagggctcgggcctagagctgatctgatcaagtttttccgagcctccggattttctctatcagtctgaacggcgtgccaaattaagggcaaaagcttctgagctttgtgatattgcaaataatttatccgatgacgtgtgcatcgcccgatctgaacaaaattttctcgatcgagcctggcctaaacaatattgtgtcaggctggcggggcagcagagtataagaacctgtaacaatatttcccgatcaaactctgtttaaactttcccccctttgatgtcctcagcagttatctatagccctgacactctcaacatacccactatctaatctacttaattccatcatggaaagccctgctctctcctcttcacccacccagtcgttcagctcgtcctcttctttcgaaagcctagaagactacaccagttgcatgttcaactttcatcagcaactttgggaagctgcgaagctgggagctcagaaaaaaacagagcttaaggatgagccgcagaagacactaaaggtccgaaacccttgaggtgctcttattcaacctaatttgaaatctgtttgcgaggtatgtataatttgggtctctttgggactcgatagatctttggtgtctcttctctaacgattgcctgattcgtttctcttcatctcattagtccttcgctcattactcaatccattccccgtctcatcaatcacagtctatctatttctcttgaacttttctttcttgggcggcttgcaattgttatttcttagtttttgggcttcgttttactgtttttggctttatatttgtttttggttactttttctggtttctgttttctagtcttggtcttaactgtgctgtatcacctatatcctttgggtttctgtctgtctatcttctccacactacttagattacccctgtaaacctttcagtggttcctcccataaatgagtcttccgttaattgtctgttaagttttagcagaaagaaaaaagccactttctcctgttaaaaatggctcgggtgaagaaactcaactaaaaacgataatcttttcatcacatcatcttatcgtccgatcattcctcaatctttctgctccgagtagatctccttgttcccatcgccaactgactaccagtcgagctcgtcttggttgaccgggtcttggctctcgaaccagccctaggcgtcgactcgaccaccagcagatctccttcgtcatcctccatccttccatcatcccgctcggtccgtctagaggacgaacctggtccggtccgtcgtgttctcgagaccgaagacgaaacggaagaaggtccttctggcgaagccgtcgcgttagatcttagactcattctcgatcgagttcttagcttgggaggaggcgtccttccctccttgtcgtcatcttcgtcctcatcatcatcgtcctgaccttctgcctcatcagaagagccaccacctcgaccggcgcttcgtcttacggcgacgtctttcttggaagaccctagagtcctggttcgggtgccagacgtgctcgagatcgatcgtttcgatagactggtagaagtctttcctccaataggcgatttaagaagctcgcctgctcggtcggctcgttcgtcctgttcgtcttcaaacgtgccaggcaagcaggcaggtccgttcgatgcttttgatcgggtcgatcgacctttcgtcgtatttgtagtctgtgcagaagcagcgcccgatgaggtttgcttagagcccactcgagaggatcctcgagtcggtcgcgtctttgaagaagacgaggatggagtggcctcaacggtaaccaaggaggggtcttccgaaccagggaacgcacccgggaaaccggtagatgaagaagaaaacgaggtagaaccaacaggttggctctcttgccgatccatctcgacgtcctcttcctcccgagtgctctgtcggacatgtttctttccccctcgggacgagctagcaggcgcagcagcggcaagagtcgacagcgtcgatggttcctgccgtccggcttgatctcggacgctttccttccggtgatcaacttctcgttccacttccgctccctgctcatctcggacgttggcgccgttcggtcgaacagacttgaacgagtggatggctcgaacaggtcctgcgttcaaccgatggaacgcagcagaagcttcttttgcagcctgagcgaacggcgatcgaggaaccgggctcatcgtctgagtcaaagtttgcgccggcattggcatcatcagtctcgactttggtgagcctggtacgctaaccgaggagagtcggtctttaacgttgctattgctgttgtcgttcgcgacgacgaaggggtttatcgatccggacgacccgttgggcgcgagcagagatttcgaaaggtcggcgaacggcgaggccggtacagcaaccggaccactcatcgagccagaaggagaagaaggagggaacatcggatgagcagctgacgagcgagtcatccctcttggacttgcaggaagggctttccaagtggtggccggtgaggcgaccacagctcgatgaacagccaaatgaggacttgacgttctgaatgcctgtgtggctgtgagaggtaacgagcttttcgacggtccgtcgatgatcattttggtagacgagtcggatgacgagctggtctttagactatcgtcggttgaaggcccggcctgaacaggcatcgcgcccagtccatcggtatccatctctagttcaagaatccttcgctggacctctggaagcaaacgaactgatcgttgaagagtctgtcgtcgaagctcggctggtccgtcagtcgcaccgatcgatcggtcgagcttgattgcctcgagaagacgaccttgggaaacaagtcggacatgcgccaagtcgtacaatacagccagagacggctgtgagagcacagatggcggatgaagacaatattcgtgaagcactttctcttcgaacggagcgaacgggaacgcgagcagctgtcggagatgagctggcctgggattggctgtttgatgatgatgacgagaaaaggaaaaagacgcgaagagagaagaaggaaagaaagaacagcggtcagttcgttatgtcttccctgccacttggcttgagcgtagcaaaagatggaaatcagaaagttttctcaagatcgacttacgagacaaactaaaagtcaacgtctgaaccaccatcgattttttaatctcactgtcgtcgaatgatcgcatgtacatccaagcttctctcacgcttgtcgctagcaaagcgttcagcttgacagcaacctcgtctggagtgccaatttccggcctgcacgccctcaaaaacttaagaactaatttggccgagagcgccggttcgttaggaattcgagcgagagtaagcaggatttgagtagtgaaatccggggttacagcaaaggaacatagttgagaaatggcctgttcgtatgacccgttatcgagaagccagtatccgtctgtaagcttgataaactgagagggaatcagccggcgggcggcaaactcagtcgctcgatttggtcctgtagaggaaggatgatctttgaggagatagtagatcaaacaatccgttttgaggtcatcaaaatgactgtcggctatggaagagagtagatggcggaaggagagaacgtcctggggagggtacgatgtcgaatctaaataacccatattccccgacaaagatgtaaaagccacgaaaccatcagcaaccaagtgcccttcaggagaatacgaggtctgggaaagatactacaccaacacgcgataaaaaagaaagagagtgaagagtgaccatgaaagaaacggaacgaaccaattccagccagtcccaataattcatcgaaacataaggtcccggtcaagcttctagcattagaaatccgggcccgtcggtctacagtccacgggaaaccggagggagagatatcgaaataagcgagtgtttggtcattgaaactcaactgtttttggtgtggttcgtattcgttgtatgtcaaggggatgggttcgagatgtcaaacaacaatgtatcagatcaacgtaaagttcctccttgtctgtcagtcttccatcgctttttgtgtaattctggagaagttatctactcacatcgcccatgacgtattttagagagtaagatagagaagaagaaaagaagaagaagaagaagaagaggcgacgggcgatgagccggataggatggcgagtgtagtggaaggttgcgtgaagagttgaacgaaatttcgcttagtaccagaaatttccagcgtcttgtgaaagacagacaaacggtggtcatgattcaagaccttgtcttctctggtgtttctcttcagcactttctatatatttacctacctttacaagacaagacatatacaggatgttcatttcctatctcgatgagagatcgcgaagtcggagggaaaaatacatagatctcgtctagacatagaggctactaaaacagaggtaaccacctatccactctcctctcgtcccaatcgcactttcttccttgtggatcctcatccccgtccatgtcttccttttcatcagacttctctccatctgctccttcgtctccactgtcgttcattcctactttctcatcttctccttcgacaacgactctgttccgcgatctagcctttcgtttcgactgcgaaagcctgtttgagtaaccctgtacaaaaatcaggcctccgagctcgagagattcgtgaaggatttgtgtagtgaacaagtctaattgtagtgctgatgctgtgtcagcatgaagtgaataaaaggcaggttctacgttagatgtttatcaagtcgatcacagtgacatatataaggagacaagaataacgaacgatgatatccaaacggctctcccaacgtcgctccgatcccgtcgacacctagaaagcaaaacgcagcgatagctgtgactggtatagtccagtaccgaagttttgaagcgagttgaggaggaatcgatagaaggtatagagagagcatctgttggaaatgtatggatatcgataacgggacatgggctggagcaaaatacgatgcagtatgtcagttcacaacaaacaacgagcgcacgcctgatcactgtcgcctttgagcagaaagcagcatgaaacaagaagaggaacgtcaggaaagggagaaagtttgacacgaactatctcgtattctttcagctccacctaaagctcttgtcaagccatcgaccaacccaccggtcccctccgcaacgccaggtttgaggacgccttctttggccaatccatccagatatgcgtgaatcagcctcaagattgacagaggcaagttggatggaccaggcacggagagagcggaagagagcctgcgaaccattggagaagaggatgaaggagaaagagaagaaggggatggcggcacgaccggaagttcgtacagtgaggacgatgatgggagcgaaggtatctgttttatgatcggatgaggcgcaaatcgaacaggcgcatctgttcgtcgaagagacgagatgtctagaatgagagtcaagccagatggccacaaggtaagattgagctcagtgccgaggaaaaaaatggacgcatatagtcgataacaagtgtggaagatgccaccctcagctacttacatgcctgaggtaggagaccctccagatcaggatatgatactcctttctcgccgcgcaggtgatgtcttcaaacaaaagcaaatcgagaaggaaaagatgtgtgagtccagaagtcttgatggttcttgggagagacagtaaggtgcacacgagaagctagagtgtgcttactttaatgcgatagggaacgcgacgatcagccccatcagatcttccgccttttcgcattgctccgacgttagggattccctaggcgcaaggccgagagatacctagaacagccatggttgaaggagagcacagtcctgggatcagaacagccggcgatacgagccaatctgtcaggatgaagagaggacaaccagaggacaagaagacttacgttccggataaatgtcctaattatcgtcgagacggagtcccataatattcttccttctttccatctgcttgttgagctttcacttcgcagactaagcatgagaccggtgactatatcgaagagttctccgttcgaaaccaaccatagatcaacagaagagatcaacattccttgttacaacaaacaaaacaagagatagactctggacgaggaccaaccgacagaaagaaagcctcccaaggcggctcctacaccgcccagaacacctggctcaatcaccctggcctcgactagaagcacgacgagtacggcatatcccacgaagaacacgaccttgcctatgactgagggaagggccgattgagcgaagttgagcgagatcgttggatccattccttccaatgcttgtagtcggtccggggaaaaggagggcagagatctgggagtgaagaaagcattaggatttgtcgaagatttcaatacaaaacttcgtaacagattttctaaaattctctaatacttttttctttttcctctcccaatctatccttcccatcagaccatcatcgaccttctcgtccatccatccagatatccaggagaggccatagcaatgtcgtctcctactcggtcttcagagaatgatcagccagtcactcaggctgtcacctctccaggagtgccctcttctcccgttccagttccagccgcttctgtttctaccgaccaacccattccatcttccccggccgccccttccgctgtcgacgagaacaatgacgaggacgacggggacgatctatttggagaggaagctgatgaagcagtcctggccgagaaggagcaactcgcaagaggtgcagatggaggtgatatgtctgttgatgaggaggaggag

SEQ ID NO: 845 - DNA, 55318 bp, Xanthophyllomyces dendrorhous
ttgatgaggaggaggaggaggaggaggaggaggaggaggctcaacagccgcgaccttctcggttcgttcatctatcgctcttttgtttcctccatttcccatgtccttctcttttgatagagtttcagttgtagcatcatttagttgaggctatgagacttgaagaagaactccaaccgctcacacaagtgtcttttgtgccgtttgtctcgattctcggtgcgaactgtgtcatctttgtagatcgtacaaagaccccgacgcgtcgtctgattcggaagatgacctctctgaatccgagcgacgagcaagaaaccgattggaatacgcagaagatgacgaggagcagcaagagagtgaagtgagggagaagacggtggtcgagattgaggcacaaaaatgggacactttcaagggaacagatggccaggtaaggcttcttcaacattctctctcttccgtcgctatgagatccttctactacaaacatctcctgagactgactctgttttctaatcctcgaactcatatccatcctgtaccttttgaacacatcaaagcgatggaatctccggttgcctaagcacgtctactacgaatctcaaccttatgaccaagagacctatcaggagcctgaagagcctgttttgccaaaggaagagcaggatcaaaagttgcacgcaagagagattgaacgaaggcgggcggaggagcttcttcgaacggtcggacacaccgttcgttggcgatgggtcacaggggaagatggcgttagagttcgtctattctctgattcaactctttccaagttttagacctgccttctcatcttcttaacgtctttctttccttccttctttctttctttctttctttctcttctttaaacactacagcgtcaacaatctaacacgcggataattcgttggtctgatggaacgctctctctccaactcgggcacccctcaaatttgttcaccatggtcccccatcctgatgccctatatcctgcccaaccgacacagtacctcgtcgcacatcactacgaggcagagatcatgcagaccgaaggacctctcgctggttcgatgaatcttgtgccggtcgacatgaagggtgagatgcacaaacgattggcaaagacggtcaaggagcgaaacatgacgaaaggaaggctcaagacatgggacgaggataagatggtggccgctaatgtcggtccgaacggagaagaaggaccacagaaaaagaccagacgatcaaccggtggcggagcaaagaaaaagccgacagccggagctggtaggaaaggatacagagaagtcgccagcagtcggggtggaaggagaggaagcttcgggagcgattcgagtgaagatgataccgacgcaggggataggagagccagggtcagagcgtcggctgctggcggtggcgtcggcggtggccggaagaccaggaccgaggaagagttgaacggaaagggagactaccagaacgatggatttgttgtaagtgaaaaccaagcgctcactgatcgtctttcttatcgagcctaatcattcaacctcttcaatcgttgtgtgggattttttttcccttccgtccaggtggacgatgattcggcctcagaggctgtctcttcctcttcttccgctgcttcatctctcggcgatcgtcgtcaccgaaaacgatcttccgggtcgaaatcatctaaacgagctcaccgagcttctccgacgttatcatccgacgaggaaccttctgctgtcgagtcatccgatggatcgctttctgctgcttccgatagagaatcgagaaagaagaaacgctcgtcttcctccagaagcaagagcaagagcgagaataagagcaaaggaaagggaagaccagagtcaggagacgactctgctaagagagacgaaaagaagatgggtgacgacgaggatgaggatggggaaggtgaggaggatgaagaggaagaggcggtagagatggaaagtgaagacatggagaatgagagcgatgaagatgttggtgggaaggagatcaagaaacggagagttgtgattgaggaggacgatgaagaatagaagaaaacggggagaacacaggaagaaaatgattggggagaactctcttcctgtttttttttgtgacctatgtatgcactttgttgattcatttgtttcattcgcccgttcttacttctcaagtatgtcaaccgggtcattatgactgcttcctctcgattttgtctttcgtttctcgatggtctatggagcatgcaatgaaaggactacacaaaaagattatctcacgaccaaaagaaagcaaaaaaaaaaaggttgctcttttagtaaggagcagcggcctgctggcaagctttcagggcctctagataaatcgtcagacaagcaagaaagagaacccagaggaagcgagaggaccaagtcagcaagaccttcaggtagcagaggcaagagagaaaggacgaaccaaagtaatacgagcaggattgcatatcacttccggtagcgtccaagcacttggtgaagtcctgttaggaacaacgaaaagaagatgagtgactgtagtagcttcatacgtgatcgaaaacgataggatgaagaggaatcggtgaatgaaaacctaccttggcctggattgcgcaaacagcgccttggtcctgaatctggtaggcagcctgggcggcgaccggagcggggacctcagcggcagaggaagatcctccgaaaagccttaaagaagatgagagtgacgggcgattatataagtatcgatttgacacgatgcgattgataagaattaaagcagaacgcgtacatgttggaaagaccgtgaccaacggtagacccgacggcgactccagcagcggtggaagccatctaatcggacagagaggcaaaacattaagaatgaaaataaacggcccaaacaaacagagtcagcacccaatgtgcaaggctcacccgagaagacttcaacagaagtatctcagagagaaagtatgatcgaaatcgaaaatcaggttagaaacgaacgttggcaaagagtccacctccagcagagggagcggcggcgggggcagcagcaggagcggctggggcgtgaggccgggcaccgtaagcctgctgaggagctgtcggagcagcggtagagtatcctctagaagcagggggagcagcagaccgagcaggagcagggcgagatcgaccggaagaacgctgatgaaggagcacagagaaaacgaagggtggattgaaaagacaagtgatgaaaagttcaaagtggatggggaaaaaataaaataaaacagaaaatcccgtccaacccagcgaccggaaacgttagcttgcgaaagaaacacggcaacccaacagatatacacgacaaacgtacagccattgttgaagagtgagtgagaggttgggcgaagatgtggtgtatgagaagcacaaaggtggatgttgtagtgttgaaagaatcggccgctgatgattcgatcttttctagaagccggtctgccgagaagagatgatgactaagcgtacatagtgaactagacattatccgccccgaacggggttgattacacttccgtcgatgaaaagtacagtagaggagaacatggcgcgcatgttatgtacagggcaagagtctgaatggtagaggaagagtataaaagaacgcgagaacggacaatggaagtgtttgaagggtgagaacacggagtgttcagatgtatacgacacaacagatgggtacattgacaacctagtttcgtcactcttgtcgctgacacttcacagctccgcctcccttctagttcgttaaactagggatatgctgatgaacatcattggtttgttgttggagctttttgtcgatagaattcatctggagaactcccatatgtccccgtcaccgtacgataccgtcagtgagaccgaacaagacactacattttagatcgtcctttggaacatccgtccaagatgtactggcctgatcgagcaacgtttgggaccgaaacaagaactctatggtgacatggctgggaagagtgaacaggctagagttccagatcgtgaacaacttggcagtcatatcgaattcttcgtccaacgtctcgctcgacgtcgcttgcgttgtgccatagtacattggaaaccgcagggtgatgctcttctcagtagacaagaccgaggagccatccaggatcgaccgatattctgtcaaggactctactgagttgtccgtatctgaccgacagatcattgtgccgtctgtttggttgacggttcctagtcgagtccatttcttagtacatgcctcccactcgtcgtgctgaagccagagaaagaatcgatctgcatcatctttgagaccaatggtaagctccttggggtttaccaaggggagaaacactttgaacggacgcaggtagttgtatccgacccggtccgtttcagacgactgcttgaagtagagcgtgagagattctaagtttggaagacataacggggggtatgtctgagggaaggtcgggtggtcattgtctactatcgtttgataggttagctcattataagagtacaacgtcaatttcgagagattttctaggtaactatgcggtcggttcgacgaggactggcgttgaagttcccccgaagaaggaaagcatagaaagagaagatcgatcgggttaggcgtccagcacaaactaccctgccaaggaaacgtgcaccgggacgtacagttctgaaaggctctaaccacaaggcatctcgaacttcaggcatatcctggaagattattcggacggatcctctccttatttcccgacatgtaagggagaacgagcagagggaccgacgatcgtccttgagactttcgtatatggccagctgcagttcgaacggaagggaaagaaacgatcgcgtctctctacgatcagaagatacagctttagaacacatctgtagagtcacgatgcatcatcagtcgaccaaagatatccaacagatcattctcgacctccaaagacagagagatggcgtcgagagaactagaccaatcaagacgtcgcgcgcgcaagattgcctgatgagagataagatcgatggggttgcctagaaagatcagtagagagcgagccagagttagctatcgtctgctcctgatgctttctcctcgccatcctctggcgtcgtcttccagctctccattaaaaaaaaactcatctacctctcggaagatacacgccgctctaccttgggccccagaggatcagagtgaggattataaccggaaagatgactaagcagatacgatcaacggactcaccatctcgaccaatctcttcatcagcatctctgtagcgcaccacgtactcgctcatctctgatatcttctcactgactctcccagcttgttcagatcctgcctatgaacattgtacgatctcggaaggacatgtcttctattcagcttccaatcgctcgtaagtcacgattcgtgtatcaagacttgaccggacagtttctcctgtggtatactcagcctcagctgcatattctctcctgggttcgtcagatttcaacgacgtatacagatgccatcaaaaatacagctctcctacacccagaccatccgctccatccagtactgataaagccgacaagaaatttgagaaccaagatagattcatttcggccgcccagtttgcacacaccttgcttaccgccagagcaggttggcaggacagcaagacaaagaaggacaccaaagaagggctcgtcttgttctcaggaggtaacaagagcatctttcatctgttggcgtaatatgcaggactcccgaatcatcagaactaacggtgtcaattcgtccttggtcgactttagatgtgttcagtccaagcgtagaatcaacgtgagtagtttgtgcataatatctttgacgtgattcgatcatcgtgacgctcacgctgctttatcatccttatagcatcactcgaggatcacatatggtgccaggtaagagccgatcaccataggtagtcttcgaagacgaacgcagaacctgacaagatttctggacacacggcatacctgatcagtcatgaatacatttgagatcgatgcttcggttacaggcatgtgctttcctcagtgcacatacataatgtcatcgcgctaaccctcctatttcgtttgccttgtcgaaaattaggaaaccatgactttggtgaggaagctcaatggtattgatcgatttgaactattactaagtagcgcacggtattctcttcgtactgtaaaagattattcgtttcctcatctatccaaattgattgaggactgcaactttccttgtccgtgattctcattctttaagagcttaaactttcaaaaatctgacgtctgatattcttccgtgctctcttgaatatgactgaacccactttactttcaccagggatcctctccaacattatcgatactactacgaacaaaacacctgagtccttgaagccattcctaattcttgagcgatgcggcttaaaaatcggtatcctcggcctagtggagaaagactggatcgcaaccataccatctttcccagacacgttgtgagtatttgattctcaattccttcgatccgggggattgacctagtgctcagtctcgctgcttgcttgatgcgtgctgcacttggtccaaactagtgagcatgtctctatgaaggatactgcgctcaaatactcccagatcctcagagatccagacggaccctataaagccgacatcatcatcgggttgacccattcgagagtgggaaacgatattgcgctcgcaaacgaagtgggcgccgtcctcggccaggatggaaagcaggaaggtttggacatccttctaggtggacatgatcatttctagtttagtcatctttctttgggttctacataatcatccgagatttaaattccaagaaacgtctgaccttgatcgcgattgttgacggtggtcctggcgatcagttacataggacgaggaattgaaggatgggaaaattgggatcgcccagagaagtttcccggagcagaggaagatagcagttgtctagtcatcaagtcgggaacagattgtgagtgatctctccatcgcgatcgacgtatcaatagttatcattctgattcctttcagtgtgtccccggctactttcatacactctcagtcagagatctatcgacattcactctgaatcttgtacccactccggatgagacacacaaacgccgatacatcatccaatcggtcgatcttggaaaacaccatgagatcacacccgaaacggagacagatgagggtatccaacatttgatcgactcgcttctaagcagagtggctgaggatctggagagaccggcttgttatacgatgacggagtggaattgtagaagtacttctgttcgtgagtgacccacaacgttctcgccttgttttgtccatatatatttttcattaggtctttcacccgaaatagttcctcagaagtcaaaaaggctgaccagaatttctcgatcgttaggaactgatgagagcccaataggcaatttgttcgcagacatcttgatgcatgcgggtggtgcaaagaagaaggagattcaggccgactgtgttattctatgtggaggtaagtttatatcttttagagcctgtttgtctgcgagtcagatcaacattatgcagattgacacatcttcaccgattctgatggcaaatgactcgaataggtgcattgaggggagactcgacttatggacctggccagatcaacctgggagatatcttggaaatcctcccgtttgaggatccaatcgttatgattgagatgagcggagcggctttgtaagctataactgctccttgtctttgtctaccgttatcttcggcgagtaaccggaactcatacaacttgacaatttctaaatcatgatcgtgttccctggggttcgatatgcaggtgggacaccttggagagctctttgtcaaagtatccggcgcaagaagggtgcgttctctcacttcttgattgccgatccgaaagtgagactgaacccgctcacaagggtctggtttcttgataaagtcgatttcctgtgatcgcaggtctgagaatcgtgtgggattcttctctacctcccctatcccgagtgaaatcaatccatctcgtcactcatcccaaaaacaaatctcgaccgacatcacctggaaaggacagtcttaagattctggtcaaaccaagggaggatggagtgggaatcgagatcaatgcgccaaagcctgatgaatgtgaggtcgaggtcaagagagaaaagggtgggcagatgtacaaagtggtgacccgagatgtttgtcgttttcttgctcttctgattttccttaacggcaatcttatcttgaaaagtgatcccgacactcaccgacatatcactctcgcaactactcagtatatggcgcaaggatacgagttgagtctttttcttcttccgcaacaagttcagcttggatgtctagcaagagatgtgtgtgtgtctaacattcatttctaatcatactatatggcacaaagtgggtttgaagcgatgaaagactctgcgtatacgtcgatggatgacgaaaacgggcaagtgatgagcactcttatccgtcaataccttcttgggttcgtctctcgtttactcttttccttatcgttcacattcttggacctatccaaagatctttttactaaaagagggaacaccgtgtttccttgcctcagagcaacgtttcttatgcggaggaagcggctgaacgattatattgttcattcagagtctgaagaacctaccaaatcctccaacactaaggattcatcaggtgaaggttctcaggcaaagtcgacccagtcgagggagataagtacttcttggaaagcgataagggacgcgttcttggctgccaggaatgagcacatgtcttctgtacgttctttccaattcaagccttctcgcaccaagtgtccagatgcatactcagttggtatatggactttcttcttattcttctgtcgtactcgaatcattcaggttgacgcggttggtggagaggctctccgaaagacgaaacgaattccccatcctcctccccatacttcaagctcgaccattgactctgcctccgccaagaacaaagtcgaccagaatcgtgtcgatgtgaacggccaacctcgacagactcaggacatgaagttcttcgttcaaggccgaaaccgacaggtgctgaaagaattaggggatgatgtggccattgtagtgcccagattggatggcaggctgaaagatataggaaggaaatagagtgttctcatcattctctcttccacgtacatgtctggcttaagcataaatgtttttatatatatatcactgtcatattctatgttgaacaatgctcatgtataatcagatcggagcattacgaacaaacgaaagcactccctctgaatcaaaatgaaaacaatgtttcgcttcagttgacttgtcgcacaagaatacaggagacatgagagaataatcaaaacagagaaaagaacgatcttacgagagaaaccacacagctcagccaatcggccgccttccttcacctgagctctcctcaaattctctaaaccctctctaagctcctctccgttttgaataaggacctcgccgtggattttgaggaaaatgctgatgaatgcttccacggcctcaaagtccttgtgagacttcagtctctgtgtgagagcgaggatgaacaagtttagatgctcgagagatgttcccagggaagatcgaatctcaaggtcggtagcggaaggtgagagcgctttgaggtagaggaaaaaagactcgactgaacgttcgcagttcaataaacgaagagttgataagcaccagaaaatagaacgattaaagcaagaaagaggggggaaaaggaaagaagaagacaacatacagtctccatccagattttcactggtcatctttcgaatgaactccgtttcaaccaggagcccgttatcagtcaatcgatgagaatcgaacgcagtcgacgaggactgttctcctgaagcggcggcctgagcatccatcgcctcgcctaatccagctcgtttctctgcatcggagagtaacgatggaaggaagaaaggggctttctccggagctttgggggcttctttcggcttgtttcgagcctgcggtattggaccggaaaagagggatgcataagtatcaaggaggaaaggaaagcaagtagccacgatcgatccagagctatcgaggagagaaaggacgcaccttgattgtatcaagattcaaaagggtctgccactttgatcgggggaagagagttagcgttaagagttcctcggagagctggtccggagtggtgtagatatttttctccggttgaccgacaggctcaataccctctagttctgttatggatgttggtattcgagtcgtagtcgaaacgaatgtacaacataacgtcagagatcatttgcagcgtgtacaacatataggtcgagatatggattagaacaattgcttaccactgtcgtcatcaagaccctggacagaaggtaacccagcctcgaagacttcatcctcctcgatagctcgaagagcgacttctgagaactgagctttgttcgccctaaagaatagattgaaatgcacaggtagcattcccaaacgagataacgcgtatctacattagtctaacgttcacatcgactctctgttcattatgatgattggagacaagtgactgaccaaaggtaaactcctagacttccaacatgactactggccaaaaagtcgcctgtaggagagaacgtgatactcgttgggatggaggcggtcttaaaggcgtcaacaagggtaccggtcggaatgtcaaacgttcggatgaccgagtcctgggaagcagtgataatccatctcgaatccggggagaaagcctataattgaatcaagtgaaaagcccacgtattagtaattactaacaaccaatacggataggaagaggttggcactgaaaggaactcacaatgtcgagcaccttggtctgaggacccttgagttctcggaccactcgcctagtctcgatatcgacaatccgaacaacttgatcggcagatacaactgcgagcagattgttatccctatgcaatacgagagaggtgataggcgattccacatctagctgagccaatgcttgagtcgtgtggaagtcaaagaactatgcaaagacagaagataaagatcagtctacggatcattcaatactagaaatagcaatcaagcaaacagattaagaaaggcacatacggtcaagacgccatctccagatccaacaacaacactcttgttgagcgaatccgtcacaatccccttgacgtgtctctgactttcctcctcccctcgcgaagctcctgttcgaggaacggtgaacgactttcgctcctggccggattgtaaattccacatcttgatgatatctgaggatccaaccagacagaagtttccacacccagatacacagacagactaggcagaagcaagtgtcaaaaggagaaagcgcaagatggagaacgaagcagatagtaatggatcagaaattagtcacatcgcagatggacaaaccctgtaagagaaccacatgaataagagtacgaacctcgactggtccatcacccgctccgaacacaaatttaccaagtctggcgtcctttccggaccaagctctggcgactccacccaacttctttcgctcagatccaaagttaccaccagcaccaacctgatgaacagtgacaatgtcgtcccaatctttagttctagcagatgaccacgatagtgccttgataggaggtagcttatgcgatgaatgtgaactttgcgcgtttttcttggccggtccttcagttatgaaaggaaagatcgatattagcttaacaagcacctatttgagtctaaactcgccaggatatgctagtgagattcaaaagaggccaaagaaaagacaaaccttgactgatctctgtgcttctagaatccctgacgacactcgtcaatcgcaacgccttgtctaatcctgcagttaagatagcctttccgtcttcaccatagtaccgaatcaaattaggaggcgcttgatgtcccgatcggaacttgagcaacgacgggggagaagtcggtgtatcgaacgtccattgctgtgtacatattggcgataaaaggaaagaagacaaagattattcaatcagatgatgttgtttatatgagcacgtaggaaatacgaaccttgatggcattatcagctccaccggtgatcagaaggggctgtccggggatccattcaagtgaggtgatcgctccttcgtgcgctgttctcgacatatggagcagccgacctccctgatccagattccaaagagcgagagaaccagaaagcgaagtagtggccaaaatgggttccccgtcttatcgtcggcacgagaatattacagaaaaggaaattggttttcgtttgtcaaactcagtatcgctttagattcgaggatgtcaaaaggagtgaacgtacccatcctgaaagagattgcaccgatcccgccttctccttcctttcccaaactatccattctaaccttaaggacgacctcatccatcttgaggtccgtgacccgaactgtaccgtccaagaaaccgacaccaatcacgtccaccgcaggactctgaacgagcgccgttaccggactgggtgctactcctggcggaggaaggaatgtatggatcaacgacctagatcgaatattatacagcgcgagtgtaccttgggtcgaaccaagtagaatcttgttgagatatgtggaaggatgaagcatatgggttgcgtggaaagttgaggcaaaaggaatggtagtggatagttcggtggagacgaggtcccagatgaagagtcgatcaccagcttcggagagagcgagcagctggttaccgaacacgagtatttgagtaaggacatcgttgtcatcctcagtcttgaacgtgtccacctatagaatttattgaaggtccaaataacacttgcatatatgtcagttgcctgttctgatttggagaaacgatgctctgcaccccttcatctatgtttcttgaagtgagaggattgggcttgtaacgagggcacatcaaacgcaatcaaccctttgcacctgaactcttccctcttctgctcttcttcatgaatagctcctacatccgttcagttggctaattaatccctccttcatttttcttccgtacccgacagtatcatctatgatcgacccaaaatctgacgaaaacaaaaaaacttaccaccttgcctctctcaaacttgacgaccaagtttccactagacgcataaactacatcgtttaccaattgcattcccttgatctctttgggtagtccctgaccaacgaacaagagattcatcctgcccccctcccataaagcccaagcgtctcccaggcaagaaagaattgagatcgacggaccggacgtcgcatgcttggaagctctagtctgaatcgcaaacgggacggcattggtgatgaagcctaaagctcggaatggagcaaataaccttggagaggttagtttaggaagcaaagtcggagaaggattggacggcttagaccgcttcgttggccgagtcggaggagccatagttgtaagagaggaccgggaggacacaagataatagaacagggttgactgagaaagaggtaaaagtcgtttgtgccttctgggagtgtccaaaatattttgcctacacagttggtatgtctgcacagccttaagcgagatcacgtgtctttgggtcaaatctcttttcacgcacctcccagtttaagctgacggataggaaaaaagatcttcatggatacatgcgcagataaagcaggagtccaaccagatggaatacatgctgagagaagatacgaaagaaaagataccgaaagatggccagacgcagcaccgtaacatcgtggggcacgagtgaggagagaaaagcacaggaaagattgacgagaaaggatagagtgaattgaaggaaggaggggtcgacagcatgtcaaatcattgttatgagagagaagaggcgtgtggacaagaatagaagagaaactacaaatttgcttttgttgtgtatacggatctgttgtattttcttttttacattccaggaggaggtccagcagccatcaaagcacccagcctggcatgctcagcagggaaagtctggatgattcaacaagaggaaacaaggattaacgatcaggtatatcaagtcatagttttgagattaatgaaactgaacaaaggaagacgcacctccataaaatcgatctgagccttagccgcctgccagaaagtgatctgtttttttttttcgtgcacatccgtctcatgaatcatcagttttggtattactcgtgtagaatgaaaggccattgactcacggcctgaacgagttcctcctccgacctggcaatatccatggcttttctaaacatctcctgggcctggtgaatctttgatgactggagactgatctgagccaaggtgaccacagcgacatcacactcgggatcaatgtcgatagccttcttgatcaaagcttcacatcccgggaaatcttccttgtatcgaagcacacagtttgccttgttcacaagaggcagaacgttctgtccacgagacctgaacgacagagaggcagaattataagggtggaagaaaaaagctcgaatcaacgataaccccgcctaaactaaagacaaggaagaaaaaaggagcaacatacttggcactctcgatctcaatagccctgtcaaacttctcaagcgcctccgggaacctgttctcagccaacaacaattctccactagaaccgacccaataacacgcgtacattcccagtgatcagcaattgggtgatgattatttcaataggctcactatgcatatctatcatcaaggatcatatggcaggagacaactggagaacaagacatactagtagttgtaggcttcacttcgatccgggaaatccttcaagacacgtcggaaggaggccatagcgctcgcgacgttgcccattcggtactgagtcaccgccttctgaatgtgagagaagatgaaagtagagtcgagttcggacgacttgatgtagtcggtcaaagccttctccaaatcaccggcgatgaagtagactagaaaatggatagattgggatgtgggtcagattcaaagtacaaaagataggaagacacggaaagatatggatcaaaccttggcctcgatggtagtagatatcagcattactggcatcttgggcaatggcggcctcaaactctccaaatgtatcgttgatgtcacctgacatggtgaagggtcctgggacatataagtaaaatgaaaattatgaacgtagcaaaaagatactgtacataccgagttccatatccacactggccaacttgatcctgctctgtactagcgtcttgtcgacctcgagactctccccgaaatcactcttagcgcccagcttgtctccaattaagaacttgaaagttcctctcaggttcaacccaagtgcctttccggcgatccaggactcggtgagcccgtggccaagggcctcgttgacgagagtgaaagcatgtgcgtagtcgtaggcgtgaagcgcctcgtatgcgagcttaagggtgtggtcaccggtcgaagggtcttccggcagcgcggggaaggggactgtatagattggcagattttggaagagatcaatactatcagaaaggccagaaataatccacaaggaataaaactcggaacgtacaaggccggaacgcattcaagtaggcggtaatgaacgtatcggaaggcagagagggctctctggtctgtatatatgaggaagaaattcagtcagcttccccttaaaaaatattgttgttgatgggtttgacaagagtggatagtgttttgaatacgtacctcaaggattgtctttgccttcttctcggaaagcttcttcaagatcttctccaagatttctccgctaggaaggtccttcttgtcagatgctctcttgggagggtttagcgcctcaagcaaggtgacggcagtgaagtctggccacatgaatatagtgacacagtttcaaatcagatttgaagtatggaaagggaaggaagagaaaagtccgagaacactaacctcgaacggcctcttcgtctcggtcaagagcctccagtgcgctcgctcgtcgtttgagagctttaagataacccttgtctagcttgagcgcagagtcacaatccttgatcacgttctcatgatcagggggagtcagcgagttgtaagctgagtgagtggtaagtaagaatgatcacgaggtgaacagaaaaggaagtatggatcaggtcagaagaaccgaagactacgatcgaggagggttggacaagtatggaagataacccaccggcagctcggttggagtagaaaacggccgactcctcatgagtagtcgcaatcgcccgagtgtaacagtcaatggcggcagcatagtctttcttggaaaacagggtatttcctctagtcttgagatgaccagccaaggtgtttcgctcctgttggttcggattcagcgaagttcaaacgaaaaaagaaacccaatccgatgtgatgatgtgagtggaggcgctcgacaaagatcgagaaatgagagagcaataaagaaaaaggacgaacctcgttggtcatggacgcgatatcattgctctgctcgacaatgtctaccaaacaaaaaagagagaatcgacttgagcatgtgtacgaaatggtgaggctcctctttgattatgctctctcttttgttatgaacagtttcttgccaccgatgaaagaggaagagccacacgggttgaacagagagaaagagtcgaccaaccatcggtctgttcctcaaccttcttctcctctgtcttgggaggaacaacctcctcgagaagaggtccatcgggatcgttcacactcttcttctttgactttttagatttcttcttcttgctaccactcttggtagtcgagctgtcgtcctcatcagacgcgcctttctcaagatcggatcccttcttcctcgaacctgcaggtgcgagataatagtagtaataagcggcagatccgaacaaggcaacagaggccgagatgagaacggccttcttgtgctccctaacgaaagcggaggatctgtcaagaattgaggccgaagcggccgaggtcgctgacgaagacgggtggatcaagtttgtcggcacggtgtgtggggcaggaggaggaacaggtccgaggttgtgaatgggacctagggaagacatgatcggagaagagatcggatttgtgtgagatgtgttctagttttcttgctgtctgtctgtctatctatctatctctgtaggaataggagagatgagagatgatgatgagaagagagtaaggttgaaatgagggagagaagaaaaaaaacgaccaggagatgacggatatcgtaaccatgtcatgggcacgcgtaacctctacaagtgattattacgtcaacaccttctcttctctgatcgttgcacccttgagagagtcactcagagatgcgctgtcatacaaactcgactctttggtgttcaacgtcgagacttgataacaagctggtcgtttgtgtttagtctgagctagatggataaattttgagataccggatatcaagttttctacttttgacattcgcagttcgatataatgaccatctcctctattcaatccttcctttgacagtcacatttcgacaaagctgcagaatatacttgaacattcttcttcgcttttgtctttttcttcttcttcttatggcactttagactcagttatgttgaacctaggttttttcttcgtcctctctacttttagcatctgatacactttagagataaatcatatgtcttcactagcttcccttccgcggcttcttacaaacagatccagtattcaattttgtctgtgtgtacacttacatcaccctgttcaacagtttggtatctctttcacaccgatttctgatttaatctgatcgtgtctcttgacgttatgtgtatcgaatgattccacttgtcaaacatcgattgccttgtccatgtatgatgcgcgcattccctctcccctttatcgtggatctattcatgcccgtctctggcgctgactgatagattagctacagtatctcctaaagacttacctccagtgccttctgatgatattcttaatgatatagagaacgatatgaaacctgatgaagatgtcgagacggtcgttgagggagttgagtcaatgttgttaacgcagtttggcaaggttctccttcatccttcgttctcttgtatgtcctttgtccttattttcgtgtcttctgcatgcttgggttagcttaagaaggcaatgttccatcgcgaagcaatgttggtttttgaaacacggcagaccagaagtcctacgatcttgtgcagcaatcagattttgctgaatggacaaacgagccaaggctgatgccgtcggtattgtattctttactagacatttcacactcaattattaaagctgcccgaagaaagacgtctgataggagatccttcagccaaaacagcaatctcaagatttatggttgtgatgtatttaaatatgagtgcatgtgttcaatctggtgaatctcattcgattcaaaggatcaatccgaagtgaatgctgaacggtcaggtgactgccccacctgtgctgtctcatacaaaatggccaagcccagaacacgcttgtcaacttactgcgccttactatctgccgtcagggcgcgtgtgaattgcgccaagccctgtttccttgggtacctcgtaccttttggaaacgtgcctctccagtggtgcctgtgccttgactctatgtccaggctgtctgacaccctcgcccgcctgcgtgcccgttatttctccgcccaacaagagtgtttggattttaaacccgctgaagtcgaaacaagaagagacaagatactggagagataaacccagctcgtctttccatcttttcgttctgacgaccaacattcagtctgatcatctgctttcgtgatacgtattcactcgctttcgacctatcaagattatgcgcacatatgccgggtatgttctatcgatcatccttacccttaccttggtggccacggtgagggcacaatcactcacaggcgaccagttctgcaacgatgtgagttctctgtagcacttgttctctcttttgcatccttgattacacagaacgcctgagtgtcttcttcactcgagagcgagtgactctggatgtagagaacaaaatcgctttgttagctaaggaacaattttgacataagaatccgtcctaactgctttattctggtttccttgtgaccgtatcttttcctcttccttctcacgctcttttctctttcactcttcaacaaatccaggtgatttgtgtggaggcgataaagagttcgacaaagacaacatgtaagatcagaactctacttgatctcgagcgcaaaggacgtgttctgtccgatttagctcgtcctcattttctgggtaattagatacactaaaacgatcgtctgacgccattaaggacgaggccggttttggatggattgctatgtgggtcaagccctgacgaaatcggtctgtttgatggtttgtactgatctgttgttgtgctcgccgtctcaaattatcttctcagtggatttggtaccacaatggcaaattctcccatggtgattgcagtacgtacaactacaacacatttcaatagcagattatctcctctcgctcaacagtgccctcatgcttgtactctctacgtccgctctccagtggccgaataccgaaacgaattcagtcacgatttcatctcgtcaagcaaactctcatgttcagccctctgtgcttcaatcgaccgacgccggattcatccagaccaacgcgacgctacagaggcagcagacaaaggtcaacggaagtgacaccgttatcgtgttttctgtcccagacactggcgaccgagacgtcagagacatcatctgggcctatgttcgtctctttttctcttctcttctgcttgttctttcgatctgacaagatctaagattcggtcatcacgtcctctaccacaacagagctcggtcaacccagactcgacgttaagctctgcttcgctcgcccaacacgacagcttcgataccgactcgttgaatctagcccaagtagtctctagcccaaccacttcgacggccagttcgacagaggccgttgcaacagctatcaaaggaaccggtcttcccgccagttagttcccttatgaatttatatcggtcttgattcatgaaaacgacgtcatgaatataaattgttaaacaattgtctattctgcatctttgatcgggacttttatcctctctttttctttgctcatagaaacaaccgcgtcacttacacctctctcctcgacaaaggcatcggcttcttcagttgccaatcgagtcaaacccttcaacaaacgacaaaaactattgatcacccatggtaccctcggtggagttgccatgatggtcttcgttcctcttggtgttgtcagtttcatcctctctttctgttttctcatgatcatagtctgcaaggctgagtcttcttgttccaatcctgtttcgttcctcttcaacagctcgttgccaggcttctgcgcgtgttttatccatggtggatccaggctcattggatcatccacattacgatgtctgcacctctgttgattgccgctatcgccatatcgatccacgtacgttcttcttctctccagttctgcgcggtatcgttggtcatttgcgcctaaccacatgatatctaaactttcgtcgctgtcgaccttcgtttcgattcagactacaacggtcaacattggcaatgatcatttcttctcgactcatcggcagttggggctcaccgtcttcattattttctggcttcagattattttgggagcctttgtgagtgtcttgcttcatgttctctacttgtgctcgactcgtttgctctaccctatcgtttccaaaaccaaccgttagcattaccatttattttcccttagattcattggcgtcaaccttcttctgccaaaaagattcgacgaaaatcgatatacaattggttccatccattcttgggagtgactatactcattctcggttgggccactgtctggaccgggttcggcgagtgggacgattacaacgttggtcggcatgttggttggggtgtcaaaggagcttgggtcgggctcgtggtggtatgaacttctctttttctttttctttttcttccttttcctttctgtggctttcaatattaacctcagaaagctttttccctcctgttagctgtttgcgctcgcttatctcatagggcttctccttctccgtcgccaattcaactcatccaatcttcgagccgggtcttctttacactcactcacgacacccatcacgatcagttctccaatccggtccgaatcatttcctttggacaaacatccatcaccgacttattctgcagaaagagtgggtggaaacacgtttgattcaaacgtttttccgtccacagataggattgttgatgagcacccaatgacggagcttcggataggtcaggctatttaatacacgttctccttctctcggtttcttctatttcctttttctcccttctcttcattttgatcgtttctcatttggtcatgttcaatttgcttgcgtacacgcatgtactatatcactggcttgcctacctcatcttctatctgccctctcagtttatccatccttgtcaactataaacgagggaaaaaactctatttttgactatcaacaactcatccaatcgtcaagttctttagtctacagctctttcgttcactccaagatcgagtgaacctctccggatcgtttgatctctttgtccacataatcaactatatttatctggtttcaatgtatctctggatacaatatgattgttgttccatcctatccgaacaagcttctgagcataacaatctaaactcttcgtgacgctttatgggcaaccatcgtttagaatgaacacaaccccagaaatgttgaatcatgttgaaggaccaactggccatatctattgtcgaaaacccatgtagatcctgttcctgcccctgcccttgtctatattatctcgatcgcgggtcccgactcaagcgtcgcctaataaaacatcccacatcaccccgcctaaagtggtcagcccatcatggggccggtctgctctgtccctagcttcaaccgtcatctctggagtgaacaagcccgttgatgatctagcatctatgatcttctgaacgatcgatggatgaaacttttaggtttgcaaggaagagaaaaagattaggggactgctcgtctttagaacccggatcgatccataaaaagaaagagaggattactgacttcgggatgaccctggaaccccaagatatggatcttttgttcctcttttcggttttcagacccggtctcggaatcattgaatttgacgaatccttggatgggacttcgctcggtcgagcctaggacctgaagatcgccagacggaggaagagcaggcgcataatccgagtgctgtcgtttgatgtataaaaggtgtagcacaaagtcagcttgtgtagatgcacgagttatgtaaaaaaaaatgagatagcgaaccatctgctgaatgttgactgttggagtcttgaacactttttgaccgagttcgttcagctgaacttcatacgttccgatctatgattgcgatgaacagatagaaagaaaagcacgcgatctgagttattttgcttcctacgtttctgcgacttcaatgttaaaaactgaagagagatgcagagaaaataaaaaaggaagtaaagaaaaagaatgttacctcccaaccggcaggattcttgacaacttttcctccataggccctagtgatcaactgcagtccgaagctggatggaaaaagggtgcccactcgaggagataggaccaattaataaaccattacctagctcatgatatcgcttaaaacccaagatcaagataaaggacgtaccagatcccgatgatcttgatatgagatgcttcgtctcctacttttttgatgaattcgaatgtaggtcgaacccatgggttttttttgtcatcgaaagagcaatgcgcttaaagataaggagacatttaaccccatcagcatgcgggcgcactcgggcttatgacatgaaaaccatgccataggaagactcgacatatgaaaagaaaagaaaaagaagaaccactcacccgacccagtgatcatcaaaccttcatatgctccctcttttccttgttcgaatgagtctatcgaaggaagtttaccctccgtgacttggtaaccgtccaaaacaagttcgatctcttcacctcttgctttggtcgcctgagcagccggaagggaagccaggagatgtgttctaaagatgtccaggtatgtcccatgagcttgacgaactgccgggatgggcgtgtcgcataagagaagcgcgatatgaatcttgcgaggcatcttctatcctgagctcggtcgttctcgtgtgtgttttgttgatagtttgagattacaccggatggacattaagcgtcaatgatttaggcttaccccgtccaaacctgacgtcatcctggggcacaacacgtggtagggttagcaactttaccccggacagaaaatcccaaatcgtacaaaaacgtcgactgtttcttcttttcttcttttctttttcccttctttcatcaccatctcaaaggactaatctcgactaccatcctcttatttgaaccactatgtccgactctaacgctaccaacattgagacccagaccggatccaagggttcgtcttctcttcttctttgaacaagctatctttcttcccatcgttcttgcgctcatctatcatttcctctttttttttttcctttcttaccttgactggtctcatcatctgtcgtcaccacaggcctcgaggccgctggaggaatcgagggagctctcgccaaggagagagagtaccgaggtgggtcttgttctacctcagcgcatcatcactctttccctcaagcagattgaatcaacaaggtcttgccatcgaggtaatcgctaactgacttcaacaaccttttgtacgataggtgacaagaaggaccaggagaacagtaagcctttgcttcacttgatattcaatacgaattttccttcaccgaatcaattcactcacctttctttctcatttttgtcgctgatacagccgatgaggagcatggaaagggagtcggcgccgccaactaaaggtgttccgtttccagcccatcggaccattctttcttctcttataaatagatacaccggagagttctagacctgtagcattatgcacaatgtatctattcatgcccgttcccgtacatcgcttatgttgagctcaaacggttggagatggcaaaaaaaaataagaaaaagaagaaagaagaaaataaagccagtcacttcgtcaaagagaagaaaattatatcgtagtagcacaagatgattcgacaactacatagagtctaccagacttttcaaagtctcttccgacaatatttcgaacccgttctccttcgtcaactgcagacgtatcatcaaccaaaggtgcatcgtgattgaagtaagagaaggagcacgtcagtcgtatactcaagaatactattggcaggacaaactcacctgagcgagctggacgttatgctcgttcaacttctcctccatcacctgcttcagaatcttgagcgtaagcagatgagcatcgttcaacgacatatcctgatgaaaacgatgacaacaatataagcagacacaacatatgaccattgattcccagttgtgttgtcagcttctgatgctcaaagcttcggggaagagaccagaagcataccttggtgtactggtcttgaagctcggcctgggcagcctccgaacctgagccgattgccttagcatcatgtcgcatgaatgttccagaaggatcggtgtgatagctgatggacaaaaggcaaggttcagagaaatgagcgctgagtatctaatctttcacaataaggaagaaggaaacatatgtgcgtacagctgcggtcctcgctcgtctactcctgcgattaggaaagccactccgaacggtcgagactgattcgatgagcaacaaaaccatcagtctttcatatcatatacattcacgatccacgagtgttaccacactctgaacggaaaaccgactcaccataagcgcatcatcgtcctctacactctctccaaatcgcatagctaaatcagaaatactctgggtgcaactctcgactccaatcggctcgtcgtacacaaacgcgtggttctgacttgtcactcgggcatgatcaatcatcgttcgggcatcagccgtaagtccggacatagcacaaccgatgtgcgaatcgatctccatgatcttttcaatcgaggacgattctagtagcttggaagacactcgcttctcgacacccaggactacaccatgaggcgtacgaatgccgaccgttgttgaaccaagctatagatgggggtgtagagtggtatgcttagtgataaaccgggtcaaaatgcaacaacacacaatctatgaggtaacgcaccttgatggcttccatagcgtactcgactgaacaattagatgaaccaagatcagaacacagagtttgtacagatggacattcttcgatcagccctggtcgacttaccttggaagagacgacctttgaattcatttcaaaaaagacttataggtaagcttgcttgatttcctattatttctatttcacaaatgaacaggcgaaagtcccgggcaagacaacaagtatacgaaccttcaggcgagaaagtgttgactcctcggtctgcaaagcatacagagaagcgatcacagacagggtatgagattagctagttgctccgtgactgcccatctttacacacgtacggagtaaaactccgagcatcaagtatgcagtcgtcacttaccatactctgaacgtgtggcaaacatgacttgtgagatgtaaaacagaaagtatgaaagatggttgttgctgatgaacgtcgagagttgatggttgtcgagacgtccacgtaccatctggctaccgtaaagtcacgttttctcagatatggttacgtaatttgatgcattacgtaaatcgatgtagaaataggaacagttatagaaacggaagactagctggtgtacatgatttctgtgaagagaccttgataataacgagaaagaagcgatgcagctatggaaggaaagggaaaccggagatgaaaacaggaggagagtgaatcgaagatgaaggactaaattagcttttagcggaaccttgaataaagcaggactttaatcattcttctcattgatgttttgtactgacgatcccagtgttccggatattgcatcacagatcaaacttttgcgttaacgactcaaaatgttcctacagagaggagaccgggaagggtatcttcagatttaccaagaatcataatagaatggcttggtgtcatctcgggtctgcttttgccgacaaagatgacgcgagcgcgacaatacgatgcagctctatcatcagaatcaggttgctcacatcagccaaggacccaatatttgtaagggaacgatgaacagaaaccaaccgcacaggctcattgcatctgaatggcctgagtttattgtgcttctactcttattggtcaagacgatgttaacgttcgaatgaagagttgctgtatcttcgaatatataatggtgaggttggctaatgattagaggctcaagaagatggttggtaggaacaaggcgtagataaagggtgagtcaacgtcaacagaacctgccattctgttctgtcctctccatgttgccctatacgtcgtactccttacactcgaaacagagaatatgtacatcaagagagcgcatctgccttcccttctgttgtgtctgtaggtacgaagagcggatgatggtaagagagaagatgatttgtgcgcattggttacaattgatttctctctccactgtaaccaaaagccgcctctgaccgatcccatcgactaagaaacacggtctacgcaaacagaacatacaatcacccagaagatctcaacatccggacgattcccatcgctgactgtatgacatgcgccctagttcgatcaataggtctacacaagcagtcaagaaacttcttgctccttcagcttcaaaactaacagaacatttacaagcatcccaaccggttctattacagaatataatcgatacctggccagctttagccacttggacgatcgaaaacaatctaggtcgattgcgaagcctggctgaaggatataatgtgccggtagagtggtctcagccaggaagagggtttttggacaaagggaagaagggaaagacgatgatgcctttaggtaagtgcttttcacttcttttcgcgcgcaacaacagtcgatcaaactgaacctgtactttctcttctgattttctaccttgggcggcttatgcgactggaaaaaatgggattgtttggtaaagaaagacctgtttcttgacgcattcattctcaaaaagattcctagacaaggtagcgatccagcgaacgacccagtgttctatctggcccaacacgatcttcttgcacaagtcagcatgttctttctctgtgttccacaaagccaaactaattcgtctgaacctacgccttctagatacccgacttaaaagatgacgctcctggcacgtttgtggacaggtacctcgacatcgataagaaggagttctggcgatccaacatctggatcggacctaagggaacctttactccgtttgtccccttgcattactcaaaaaactattgattgagtctttcgctaaatactcaacaatccatatttcttgcaggatacacaaggacccatagtaaatctctgttctcgcagtctgtgtgtttcgttcgactctagcttattcgattgctcgccaccagtcacaatttgttttgtcagattctaggatccaaaacgttccatctctaccctccgactactgaatcggcggccttgtatttgtcaccttttccgcaacatcaaacgtcttcgattccggtctcttcaagccacgttccatcagaggaataccccttgttcgaaggagctaggaagagagagatcgaggtggtgctcaagaagggagaagtcttgttcttgcccgagggatggtggcattcggtcgagggggagggagagggagaagaatgcgcaggtggtcgaatcagtctcaattactggttccgatgagactgaatgtcttaatcatgtttcgaattgaccagcctttaatcaatttgagaaccacccagaatcggaattatttcaattgaaccgcacattctgtgcgcattgtatgtgtatacataagtgtttgcaaatgcttaagtttcagatccgaatgatctttagaaaagaagagcagcgtatctatatagaagcagcatgggcatcaattgattgctcaaagagcatcgaaaagttgaaagtattcactcacccggcgatcatcgcaacaccaccgaggggagtgatggggcccaagaatcggaatctgagtagacggtcgatcgagtaaaatcggtcaatagtgcgaaaacaagacagaagacaacgcacacatacttcttttcccggtcaagtacaagaccaaagattgatccggagaacagaagggtgcctccggcgatgagtctaccggcccaagcatgataaccaaaccgagggtgaagagaaactgccatcaaggcaattccattgaggaactgcaacgatgaagtttgaatgaaatcagaagactgcccatcagcaaagggaaacttagtagatagagagcttacagcgtagtgagaagcggtctcccatgacttgatcaaatcaggagtgataccaactcgagccttcaggccgtgagcaccgaacgctccgcacatgataccagtaccagctgtaacatatagaacgagacgtgagccggacgaagcaatacagttgagatgactgtcgaagattagcactacggtgatctcatttcgtatcgaagtacaacatgtcttctgagaaaagagacaggctcaccaatagcggcgccggatcgccaaagcagctgaggagtaggagtaaactgtagagcgaaagaacgacaattagaacacacacaatactcaactgaatcccggttcaaaccacatctacccaccattcttttgtgatagtttgaaagaagacgaaattcggcagggtcgttcagaacggaagatatccgttgggcacaagcggaggtacgattacgtaacgcaaccatgtagcatgcgctcatgtccgaggagatcttagatcttgacaacttcctgaaccaaaccaccatagtcatggcttcagctcatcctatggcctcgttattcgaggtccacagcgttcgttaggtcgctcgttggattgagctgtttctcttattaggttcatggtattcgtgattgacaagtttcattggtttgatcatcttcccaactataggttctgtatggaggtataggagacgactctcacctcactcacataccttcatcggaggaaatcagacttgcagttgagcgttattacgagctagatgctggttagtcacgaacagaacatagctagcaccattcctttttgtatccccgtttctggaagacaagacaacaagcaccgccagtgtttccaatattggacgtttgcagaggaataactctagaccgagtttcagcccatacactcaacccatataacgtttgcgccttgtccacgtccctttgctgatccatgtgtttgaaatgatagtttatgaaaatcctatcttgtcattttattcaaaaccttcgataaccgacgcattccttctctcccggtttgtgtcctctttccgaggacctgcgctatcagtcctctatccgaccacttgggctcgagggaccatcaacatgatcaaatcaatatggggaagccaagaaaacaaaaacagccagtctgagcatgggtggaaagtggtgagcgtttggagtgagattggggacgtgaccgaatcagagagttttggtaggtttcatttctctctcacggtagccgataagattattctgattcaactcacgcttgatgtactcttcgtttagatggctttcatgtcggcattctcgatcacactcttcatatctccatacttccgtctctgtttccactcagaatctttggtcactccccacctctttccgatactaattcaagcgattcttcaccccaccctgaggtgctatctgtaaccgaagtattacctcactttgccggaccaggcaataaatctttgctacacatcaacctccgaattgtaacaatatttcagtttaatgataacggactgatatcatatcaccgagatcattgggacgtacgggacctcatcgaaggcatcatccctttttcaggattagcagggtccatcggtcgttatctcggaggacttgctcttaggggactcggaactttagcaggaggttgcggagaaggtgtcagaggaccaaggcctgctcctacagctctgaaaactggagaagatccagacgagacaaccccggtcaatacttcaccctcgaaagaggaacgttccgaaggattccctgcgttcggggaatcttctgttataccctcgaccttctcatcttctcccactacacctatcatctacatgcgccctctgtcatccgtctctagcagatcgtccgggcatcatcacaggacgcattcaaagtcttggggatcgggcagcagcatccatcttttctcacccatccgatcggctcagccgcttttcaatccgtccgattctcctataggtgcattaggactgatgggacaagggtctagggggtcttggcagcaaactggagggctagagatggcccctgatcatgataattgatttgccttcattctcctacactctccttagattcctatgtatcggtctttccttgtactttgtattttcttgttcctttttatagattttttgtcatttcctcacatcttctcgtgtccagatactgtgtttcacctgttccgaactcagtttttcctacagtacatatatttctgttcatatcccagtctttactcttgatctgaaagcttcagacagactactgtctcgttcattgtatggacatgtttgatgtattccatcgagcggcatattactgagagaaggataacacatatgcacacgattgatgaaggcacaagacgttcagctcagacatacaacatagctctgagctaagtatatagcaggcggcggtgatatcatttctggaccagcacgcacttggaatttcaacccgggttgttttgatcattgtcgattttgagaagaaagtagttaatcgggcatttccttactttcttctcagcgcatcctgaatccgagcgcttcgttcagcagaagaagacaatgtggaagtccggttcacgtgctcgatcaggtggtgatatgggtcatttctgcgcgatctggtggaagatatctgtccatagagatacccgtttccaagcaatttggcataaaagatgagtcgacttgttgaaacttacgcacaacaccggtctgtacgtaccgtatttggagccctgtttaaaccccacaggttgagacaacgcagctcgtttgtggacgtcctttgtaagggcgtgtatgtcactcttgtcgatttcttgggtttccaagggctagacacgctaattcttgctgcttttggtttcagtttgagtgttgatggggccggtatgtccttagtaagatcatcggcagttgagacaattactgtctggtctggtactcgttcggtcacaaaacgtatatcctcatccagggctgttggtcctagcctcaaacggcaactgatctttgagaggaaaccagaggcagaatgtagttgttcagatacgactgaagtgatctgaggaaacgaagtttccagtttgtcaaactcggccaccatttcttgagcctgattaagaaaggaataaccattgagttgagcagagttcaaaagattgtgaacagaacgagaacgtacagatgaagacttgactgctttattttctccagccgtcgagtaaggtattccgtgtgctttatctaaagccatctcaactaaggctggatctaacaaattactttcaccctttgaatgtgttgttccatccatttcaaaccattgtcgaatcaagtcatcccactcagatattctgtcatcaagtgcggcccgcaagtcttctgaagaagttttccttatcttgggctcggagacatcgggcttggccatcaaggcctgacagtaacacggcttgtatgagtatgcccctctctacttcaagatctgaattcatttagagatacacacctgaatctccaacagggtttctcgacgttcttccaaacgtttgatcctttccaatggttccttttgaagtgtatggatctcattcatagctgtctttaagttcctgaacagatttgttatgcgctgctgaatgaagaggaatatcaacaagctgatctgtactttatcgagaattggtgagagctacctccgcctggcccttgcaagaaaggtttggagcacctgtgttcctcatggataaagaggtcaatccacaaggaaacatatacatatcaacatgcagactcacaactagcaaatagttccggtcttgattgaagagtcttcaaaatatcccaatagaccgtctgacaggctagcgcaagaaggatctggtcaaatctgaattacagcgcataacaacattcaaagcatacaatgttgttcaggatacgcaataggttgcagatcaaacgagctttgcgtagaacataccttggcccagcagcctcgctcagatcgctcttcctgatacctactttcaattctaaccaccaggacttgtcgagtccattcgaactgatgatttccctccggagctctgtcagatagccggctgctattcccacgaaagatttctcttgagatggtgttgggtactcgtgcggactcaatggcctaagcttcggacatatttgatggagaggactatccgggctactcaaatgaatagatagagcacggagaatcacatcccgagttttttgtcttgatacagcaggcgtctgggggtgaataggcaggcataacgaggcgagaggttggggaattgctagtagtgaaagaagggagaccaaaagggtcgtgcttggcgttgaagacatgttctagtgtccaagattatctctgcaaacctaatctgatcaacgagggttcccgagacaaaacagatcgatatcaatatctagtcggctgtatatgtgttgaataatctgatggaatcaggtctgaaagccgaagtgatcgtggttagagaaacaattgtttttggtcgtccttgttgacattcacggccttacccgaaggtatttcatcatcactttcgacccagttggttgtcgttctttccactggatcctcaatttggtacccaaagaatttctatttgctattataaaaatcatcgtaaggctcaggacccatatacaagtgaaggtttattttgtttgagaaagggataacaaaaagtcgatgaaagaataaaggtctttgcgttgaataaagagctagagaacaagataaaaagaagagaggaggggtatttgttcgtccgcgctaggagaatatctaatccgccatataagccaacaccctgttttgttttatttcaattcgaaaaactttgattgggttatcaatctaagcgtctatgaaagtgagctgggacgtggaggaagacctcttcctgaggttagaatcgagaatcttctttcgaagtcggacagactttttgagacgaaatagtgaagaaagagaatgcagtgagtttcagttattatttaggggaagtcaagtgcaggagtgaaaggcttaccttgggcgtgatttcaatcagctcatcttcgtcacagtaagatatgcactcctccaaggtctgtatgagaaggaaccaacaagtcgaggtcagcttgagagaggatatcaatttttaatcttgagccagatgcctatgaccaaccatggttcgggcaggagcaacgaagattccgtcatcctttccagctgctcggaaattagtgaggctgaaaagataggaagatcacatttcagcgaggttaaatcaaaacgagataagcacatgagtccgacttacgccttagtcttggtaacattgatctcaatgttctcggccttgttgctctctccaatgaccataccggtataaactagatttgcgatgtttgatcaatcatccgttagtctcaatgctcctagtcaacatattcagtgaacgtcatatcacgtacgggcctgtccaggagagacaaacatcactcctcgagcctgcaaaggctggatggcataagcagttgcttctccagtcacgctagagatcaagcatccctttcgggaggtgttgatctcacccttgaaaggttcgtaagccttgaaaatatggttgagggttctgtatcccatttgaagtagagtagcagaagggaacttgagtcaagcgcaacgagatgctggcccaatagaatatgaaatgaacgtacccttgtccgtggacatcgttgttaaactctcccgagacatatccgaggagcccccgagcgggaacctccatcacaaccctgaccttgccatcctcctcatcatactggagaatctcagccctacacatcaatgaaaggaagacagtaatacacaaacaaatacgatgagtcaacaacacttgttatgtggtaggcagtgatgtataaacgttgcttactttcgcttggtcatcttctcgatcacggttccgatgtaatctgtgacggagatagttgatggaagatagaaaatcgaaacagttttagaacgacccagatacaacaccacgcctgttcaaaaaacttcagcagagacaaatgcagaaaagggatcaagacgcactgctgtcaacattgatggtgacctcctctatcggctccagaaccttctttgtttccggatctctcttcaacacgggcctaggaggcgaaacagcgatttcgaagccctctcgtcgaagagtctccaaaagaatacccagatgcaatacacctcgacctctgatctccagagattccgattgagggttatcaatgaccttgagagcgacgttagtttcggcctctttgagaagtcggtccttgatcacagccgaggtcaactttgttccttctttaccggcaaaaggagagtcgttggcagaaatgaacatcgagatcgtgggaggatccagaggagtagactagcggtcagaaaaatgtaaatgtgataaccgtttagatatatgtatccgcagaacttagtgcgcgacaagattaagactattggaaacttacaggcaatggagccatgtccgggtcgtcttcagcacagatcgtcacgttgacacctccgcctaatactccggccacactgatgatctctcctgctccagctcgttcgaccggtaccttctccaacccagttctaccgaagatctttgtgcactttccttcaccgactttctttccttccggatcaagcgccacgagcttttgaccaatcgaaatgcttccagactcgattcgaccaaggtataacgctccgacgtacggatccgagtcaatttgagtggtgagcattcggaaaggcttagatctgtcgagccgcaccggcgcaggaacctcagcgagaatcaggtcgaacaaagcaaccatgtcctctgcaggcgcgacgtttgtcatctcttgttcggcagtcggtttggcaggaggagaaagtgaggcccatccttgtttggcagaagcatagatgactgtttaagagtgaaaaccatagaccgtcatcagcatcaatttcaaagcggttggcacatgataaaatatgagaaacttactcgggtactcctagatcgacgtaacatgataatcccagactgttcagaagctgtgacatttatcaaaaggttggcaaaagaaggagaatacgaaccatctgatcgtccgaagctccgagggctccgaaaaggtccaaaatgtcggaatcaacctgctcgggtcgagcggtagacctatcggccttgttcatcacgacaataggcctttataagaagattaacgcaaacgggaaagcgcgcgcgtattcagtaatcattcaaagctcgtgcgggacgaaagacgagaacagatgatgcgctcacttcaaaccggccttgagagcctttcctaggacgaatcgagtctgggtggaaggaccttcggtagcgtcgacaactagcagaacaccatcgaccatggacaagactcgctcgacttctcctccgaaatcagcgtgacccggggtgtccacaatgctgttgacagataatgagacaggctagtttagcaaaggcttcatgagcaaaaactcaaatgaaaaactagaaggcgcacttgatgaggtgaccgttgtagttcacagaggtacacttggagagaatggtaatacctagcagaatgagtgacgagatatgaatgcgttcagtgaaatttcggttggctatcagatcaatgtacaaagaataaaactatacctcgctccttctcgagatcgttagagtccatagctctggtaacgaatccagagtccatagcgtatccattgtcgggtccacctgccgcaagggtatcattgctcaactttttgatggttcccgactgtcgaagaagctgatcgaccagggtagtctatgattgtgagatattatatatgggtagaatacatcggaatacacattgaagaaggaggaaaaacatccgcaaagcacaacaacataaagagtgtgaaaacaagccaatgagcacgattcggttttaacgaacatgaactatatcggatagaacggaagctcacctttccgtgatcgacgtgagcgatgacggcaagtgttcggatatgtgacaaatcaatgaaaccatcctcgttcacaagcggagttgaaggagcgatagaagcctgggccggtgtagatcgactgaaggatcgttttgagtgaaggccaaacgatcggggaaccacagagagagtggtcgaccgaaggccagatttagaggaagacgaaagcgcacgagccggaaagatggttcggctagttgcgggcctcgcggaagcggcggtcagccgaggaacagacgaccttgctgacctgagaagggagagggacgaagccatttggaggcgagaaggatgagcgacggcggtgagcttggatggttggacgcaaaagaaagaaggaaagtaaaaggatgggaacgcaaaaagcggagggcgggtgtaaccgcatggcatagcttttggtcacgtgttgcatacgccacaactacacgtagttacatgtatcctgcttcttctccttctctctttttggtcgactggctgagaccttgccttcatcatatctctctttggctcttaactcaccctcagtagatcaagcaggactgccagtcacagaacgaccaacgccgtcactaacaccactttgaatatcaacaaatcacaatgggaggacctgctgttaaaggagctatcggagatggccgtgttcgaggtcaatttttccttcctttccatcctcttcctagtctcaagaggaaagactgatgtttggcttttaacgtgtatacgtttttgtggacacagtcacctacaatgatatccgttcgtcgtgtctttctcttagtattgtctcttttcttttttgtaacagagaattctgatccacgtctctgttcccgtcgtacagatatccttatcggaaatgctggtaattttcgatttttttgtctcgtccgttttggtcggagctcatccgggcttttgtcgctttgcttttttcgggttgcatttgttaatctcagccgaaagagtcaagaaggacttgtaagagcgatccttgttatcatcttttgtacctatggctctctgaggttcttaaccacattcttcacccgtcctctctatcttcaattatcttatctcaatgcggtgatcaaaaaacagcaaccctgatgtcatgattgctatcggaggaggaggtttcttgtaagctttgatttttcttgcaattcttgttgattacaatcgtcgacaagtgttgacatcagctctgtgatattcagccctgctcgagtgatgcgaacgttcctcaagtgcagcacccgaaagaccaacatccctatccgtatgttgaattgagataaacatcatcaaaacgtatattttctctcccacatgcgcttattcctcgtttgctctatcgtaaatttctacaaacagaggctattggtctctccttgtacgagagcttgccctcaactactgctgagcagcttggagtaagtcgctttccaaagtagcatatcgacatatcatccttctcaagcattgatctctatgtgttcacctgcttgaacatgtacagacagaagtcgttcgaactcagtggttggacttctccacccttggagccgctggagcttcaggtcttttgggcaagaagatcttggttgttgatgagtacgtataagcgcatcacaagacatgaacgccgataggagaacgaagtaaaaaagagctgacagaacccaatgtctttcaaaccacttttcattgtccttcatgaatgcagagtcgatgacagccgaactaccctcaggtagggcctacttttgtttccttcttttttgttcttccgactgacagcaaacaatatgccttttccttctcttccttcatataaaattatctcggcctatagctacgctatcactgagctccagaaggatatcgccaagttggaggctcagttaacagatgagcagcgcaaggtcaccccccctacccagctcggaatctttgttgtccacaacaagtgagaatcttttttcttagtttgtcccctttcttgcatgtttgaacaacgactgatgctttctttatgtttttcacccgcacccggaacacttgaaatgaataggttgaagaccaaagcagccgagatccccggtgacgtcgcctacttttcgggtgcagatatcgaggaccactggatcgagtacccttgggagatgcctgatatcaaggatcacgaccgtacgtttcgtctctattccttattgtaggcttctccccttgaagaggctttgtcgctgtcgctgctgctgacgacaagttttgttgacttttcttcatcctcggacatctttaggattggcttacggagagcctacgcgtgtggaacgtacgtccctcctttctctactcgctctgtcctcttctggagggaaggcataactgattttttgtgattatggtggcatccgaaaacgttttcttctttctaaacaaaacacacagctaccgccacatacttcggagacgcctaaaaaattcctttttcacattcggatgttcatgtctatgccggtttatctttttcatcctgttactatatgatgctttggtcttcttttcagtaaatggacatagttcatcttagggagtaaaaagacgagagctagatatagaacataggcgaggaagagaatggtgtagattatacaacgagagaagatttgaagaagaaagaccaaagcgttttgttttgttgttttcgcccaagggggatgagcaaggaattcaaacctttctcaagctgtctgctctggagacggaagatggatcgaagaacggacgttctccaacggagatgactctatcgcctgatcgtccggtgaatccatagtcgtttgtctgtggatgattaagaattttagagaatgaaggggtcgaagatgtcagccatcgagcatctgacggaacagctgatactcaaaagagaacaacgatagaccacgtacagcacagtggaaggtcgatcggttatcccagagagcgatggcgttctgagaccatttgaatctcacttggagatcatggttcaacgtgatatgatggtgtaagtaagacagtaagttttctgactcgtctactgtgagttcattgatcctctttgtgaagctggtttgacgtatgcgcacaatggtcccaaggagaagaggaaataacgtgtcaataagaaggaacggcagaagtgataccagccccaaaacaaatcgaagaacgaacgctttgttcacgaagagtccacgccaaccggtcacagggttcgttctgatcaccgggtggacggcctccaggatttggcccttgttctctgggtgacctcttggttccgcaaacgtcagtccttctcggctggctttctccaggaatggtgaaccgatgtgagtggccgtcaggccagagaggaaggtttggaacgctggggaaagtcgatcgtaggcttcgtaagctgatgcccagacctagatcacgcagagctgtcagttttcttcttgtcgcgcaggataccaagatttaaaaaaaatacaaggatgagaacgaacagtgtctccaccggtagtgggaaggacgttgagtttgaggatggcatagtctgatggatggggctcgaacgtgatatccgagtgctgtatgtcaagtcaattccaaatatgatcaaaccatgtcagtcctcgttctctttcagaggagaaagatgaatgatgacaaatcgaaaagatgtgacttacccataagtttgatgctcgtgtgctcttcacataagcatcccttgtggctccgttgaattcttttcagagacagacatgatgacacatgggtatacaaaacaagataagcagcgaattgatttaagaatagagcgatgtcaaagaaaacataccaggagtgatcttaaagatctcgccgagctcatctgtacccgccagcggatgaacgtgattgccactctcggctggtctacctgtccctttacccattctcgccaccagctcattctgctcagtaggtgagatatcttggtctcttaagaacacgactcctcgttccgaaacaaggatggcgagatctcggatggctcgggcagactcttcggagggaagggagaggagatctcggagctggagagaagagatctcggtaccaatgctcggagtcaagtcgaccgaagggtaggcagagagagcctggctagagttcaggcgcgatggctgagaagaggatgggtttgcgactggcatggtgtgtatttgtgagtatgtatctgtgagtatgtatctgtgagtatatatttgtgagtgtgtgcgagagtatgggtatatggttaatggtacagaagaagacagaagagacgaaaaggctcgaccatcatctatatttatcgaccatgaccgatggcgacttgattgtgtcaaattgagcgttcaaggtcaacatgaaggtgatcgggacggatcgagccgtgtggcgttttctccgaggctgtacagcttttaactaggcaagccatcagagtcacttctttggcaatcattatatctgatgtttctgcctcggcgatgcgaccttgatgagaaatgtggtgctcgtatgtttttagttggaaaggagatctaggctgtgaatgagattctatctcatcattctagtgacaagagtcacaaggcgctcctcgtaggctgaatccacggattgtgctgtaggcaattgttgcgcccacgtcccgagaggatcacctgcattgtgtgattagatacgttcacgctttcgtcagatcgcctttgcgttgagagacggagatcataaggatgagcgatctttgatccattcatttgtaggtagctctcttcggagagctcttggctcttggctctgggatgacgcgtgcgtgtatatacatatgtcatccctccgactcagcccagagtgaagagagatagacagatatcggtcgctttagatcttacatcgttgttatcgacatcagccttgctatctgaccaaggagtctgactcgaacgatcttccggtatatcaatctactcatgtctgactaaattagaccgcgttttcatccagatccatgacatttctctagattaaagattacattgaaggggctttgcgtagttgccactcgagaccgttggaattcatttgtatgcgagcacttgacaacgcagcatcctcgtaaatgtatatcttgcgtctgctgtatatgagcattcgtacgcataccacggatcgatacatccgtcttttcaaccttccaggtcatattatagccaatggcagacagccttcctcgaccgtgtcagacatgacctcaaacaagtccaactgaactgtatgcggactcgaatactctactcggaggggcaccattcttatttacttatctggcatgccttccagtcatgcttcatagtctcggttttccaaacctacatcgaacactaccatcaattgattctaaagattctcttgaatcgagcatatgaacattcggtgtgacctcaaagattcacgaacccaccaagataacaagttcgaacgacaccaattagctgcaatttaatggcattcagcgctctcgagttttagggttgatcatgacgtaatcaatcacgtggagctcctcatgatgccagatggcgtgtcctgttccttcctgcaaacgagtcgaacgaggccggggacatgacgatcgtccgggtgcattctcaccttcgaccgggttttatttgatgtccagatagccaagcccaatacaaattgaagagacaagaaaaagaagcataagtcaaagacggcatcgaaccatcaagcttcgattacagctcccgttccagtcccagttccttcaccacaacatccaccctcatactcccgtgttttgttctccgatatgacagactacaaggatccgagcaggctaaacgctcccgctcaagacccaatcgccggaatgggattcggaaaggagccaaagagagatacagtgtccgtcggctcggcagagatctcacttgagagtggtcaaatctcagagagagcgttgagttggcagaggacagcagtgttgctgttcacagagtatatcgtcctggccgtacgttcgaatacatccaatccttctcttgttcatccatgtagagtcagaatgaatgtctgacggtatcaccacatactcctatacagatcttgggtcagtctaccgtctctcatatctagaaagaagcacagaagaacgagaaggacgctagctcgagaaaagttgctgggaagggaaagggaacattgaacaaagcaaaaaaaaaaagatcaaacactcaaacgaaacctatctatctgcgtccttctctcttttgtatgcacccgctcgcttgttatgcaaccttagctttcccatacagtttccaggtcttaggtatggcaggcggtgtcatctcgacgtaattatcctcttcctcctgatattcttcttgttcccgtatatgaacaatcttgttaatctcggacgatattactctcaactttgaactatagtttgatcgtcggtttgttcactctattcacgagccatactctctggcagtattgcttgctgttagtccttcagtcttgctctttctgtaagtcttgtctcgatcgacattgacactcacccttctctcttgtctaatagacacccacaaatccgggatatcgccgatgccgcttattgggtcagcacttctatctctatcgcgaccttctctgatccatggctgacgctttatccatggttcgaaaactcttgctaactagatctttggagaaaagagaatatggtggtatattggtttcacagggttggcttttgtaagtttctatctttctttgccatgcgcacagaatggtatgtcagttctccgtattcgttgtactgacaatcaaaagcaaattgattggcttccggaacaaagaacaacatcttcatcatgggtctccactgcaacgcaggtgctaccgccatcaacgtgagtccatatgaatcttcgttcaatctcaagcgactctcatgctgacagaacgtcaaattgacaccttctcttgtttctcgttatgatccatcctccttatctggaatatagacgttgagacccacgatttgcacttctctgtgggcattcattctgacgatctttatgtgggctggctcgttgatccgagacctgaggcataccaccatccttggtattgtacgttttacttgccttcaatcatttctttcttcgtaagggactgcttcacttcgtctttacttacacaacttacacatctttgctatcgggattcttgatttatgctgcccatgttaggtttcggccggaaccatgttcgtctgcttccttgtcgttgtcatcggtcacggtgtgcagggtacacccaacggatacgtgcctgctacagcgacgacgcctgcaaccgatctcagctggacggtttgggcgccagaaggaacgacgtttgtacagggcgttagcgctgtcagtttttttgccctaatatctgaatttcaagtgggacgaagactgaacttctcacttctccttgtccgaacttattaatggacatcagctattgaacatcgtttacacattcgtcggtcaagccctcattccctcttttgtaagtttaattcgctctggtgtaatctgaagcccacatgatctcatcgacttttcaaaaacgggctgtcctgggtgacaggttggagatatggctcgacccgaggactttggaaaagcgctctacctgtccatggcagctgagcttctacttttcaccatcaccggagctgtcgtttactgtgagcctatcgtcattcatcttcgctcgattatatctacggtattaattaagtaccataattttcagcttataccggtacccaattgaccaccgctcctgcatacggatctcttagtcagtcaaaacatgatctgatagggctccggggcttgccactaacagtttgtctattggggattgtgttgacagtcaagagatttggtaagcctgccgccgcgctcactttgcccacgatcatcatcgttggaatcttgtcagtatctttccattgcatttgaatctcatcttgcaagtcaggtatccgctgaatttctcttgcacatttgttggttgaccatatccgtctatttcaattttgacaaatcaggtactccctcgtcacctctcgcgcaatcttcttccagatcttcccagaacactccgtccaccgacggacacacaccaagaaaggttggatcgtctgggtgtcgattgtgacggtcatctggatcatcgcctacatcatcggagcttctgtcccattcttctcggacttgctctctttaatctcgtccttgttcgactcttggttcggtttcatcttttggtcgttcgcgttcaagagcatgtacaaaagatccggttactttacctctacctggagaacatgtcaaacagtattgcacatcatttctttggtggctggtctattcttctttggtgagtcacgaataatcctttccctttccggtcatccctgcctcgactggttgtttcgaccaatcttgaagagagcgaccttccttcttctactacaatacttgtttatggactgactggaaccgatttgtgaaacctgaaatataaaggcgcgggaacatacgctgctgcaaaatctattcaaatctcatacagcacaggggccgtcagtgagtattgtctcactatctctctcacagttccctatttggtttctctccgaagatgatcgactgactgtgtccgatggacataatctggtgcggtggttgttattagaaacgcctttcacatgtaccaacactggattcctgtacgtccttccttcctctttctgcttttcgttatcggctgtatcttctctgaaaccaaactaacaaacggactgtatcttatgtgactttacaggttcactcgttaatgaattcttggggttttcctttttcctttctcacttagatcatgaaatcgttttttttttaaaatttttataatagataagccataaactcagtaccacgtgtccatgtttcatccctttcattccaatctcgttcttcttgctcgttttgttcaatcttatccatcaactcgttcaaatttaggccttattgtttctctccttcgaatgtacacaaggtttcgtcgtcttgcgcgcttgtttatctactatgtcatatctagctgattatgcgttgtcgaggaaaagaagacttgttcctcacgaaagaaagaaggaaaggcaaacccatcaatgaccagtacactgagattcgtagagtatagagttcacaacacatcgatcaataacctcgaaagaaatacagtagaatgagggtaagaaaaacaaacacgataaaccagacgagtgtcaaagatctaatggacacccccccggtgcgcatgtcaaaaaagaaaaaagaaaaaaaaagaggtggaaatcacatttcccagctctcttcttctcctccaagagaattctttatcatcttacagacaacagtatccaccatcgatgatgatgtccgttcctgtcacgtaagaagaggcggacgaggccaagaagatgtagacacccttcatctctctggtatcactatctcttcccatcggggtcttttcgtaccactgacgaccgaacagtcagaaccccaccagaactatcgtcaggtcggtgctttcgatttggaaactcaaaggcgatcgaactcacgacaggcttcatggcgtcgtaatcaccactcgcaggggtattgatgtacccaggtgagatggagttgacccttgatggataaaagaccaggggttagtacatgatttgtttctcagcttctggtcagatgaagagagtgcataacaagattcccgggtagactctattcacttacctcacgttgaacgcagaatattcaacagccagggatctcacaagatgaatacatccggccttggcggcgttgtagatcgactgggactgggggacgttcacaatatgcccagacatcgaggcggtcacaatgatgttcccttcaatcttgttctccttgaagtactgtccggcgatctggcactggaagaatactccatcaaggttgctgaaggggcccatagaagagagaaagtggcatcgattacgattaacatccggatacaaagagagaggaagttcaagccgagagatgggaaaaagaaacttacacatccatgatgtctcggtactgcttagggctcatcacgagcgctatgagtaaatcgatacatatcggttggaaacaattcaaagatcaatatgctgcatcgaccagtttgaacatagctctttagtgaacacaccaggagtagtctgctgaacaccactgttggcgacgacgatatcgtactgtccaaagtctttggcgatcttggcaaaggtttctttgatcgaatcatagtctccgacgttgcactctgcaagttcaagggcaaaggaagacaacagtcagtcacatcggatcgatcggacgatatgaagaggataaagggacggactgtaagcttcgacacggacgccatactcctcagagatttctttggccctgtcgatggccgagggagaagagttgtagatgatggcctatgataagaggtcgaagggaaaaaaagttcagtcatgactactaaatacatcggatcaaagcaagaaggatcaagttcactactcacaacgttggcgcccgactcggcatatccctgcgagacggctagtccgataccagatctggagaatgaggagttacagatgctatcagctcagaagcacctgcgctgtagaacttaaaccctgatccgaggacaggtgatgcttagagatgaacataccctcctccagagatgatggcggtcttgcccttgagggagaaaagatccttgacagagtatgactggacaggatcgggctttcgtctacgatcggaaggagcgaccacggaaagagatgatcatcagaggtcaagaccaaatgagatgctagttggtgatgagtacctactggtaatcggatgtagttcggtcagtcatgttagatgttttgctcagataggttgaaggtgaacagaaaagatgtatgtggtagatagatggaaggagaaaagagaagagaagagagtccgatacagaacgtcatgtttatatagaatcttcagcccatcacttgttctcgtcatccctagcgctacgcgtttcccctccggcaaccctcgggataacatcgccaagcggaggctttctcgacgcttgacagtcaggcgaaagacgggtgacagtcaaagaaatagaaccgagtgaagatggaaggtgagcagaagagagtcaagaacagtcgtttgggaggggccccagatggacgatcacccggctcgtcggcatgtccactcggtccccaactcattgccagctcttcatctactcaattgaggaaaaggaaagtacatcaagacaagattacatgttgatgagtagcagtgcattctagtgtttcatagatgatggtcagagtgtgcttggaaagagcagaagtcgatgtctaaagcggcaaaagattgaagagttgcgttgtgttcaaagaagatacacaacacgttcattaaatacgatgacgacgtcaatgacaaacacggaagtcatgtccatgatcacagtcaaagcagagagatatacgccaacgttatcagacagagatgacgggtagcacaattatcattccatggtgttgaggtgcacgtcggagatagacattaaaaaggatacaactggttgatacagaatacaactcgagttgatggaagcaagaaacacgcgtgtgtgtgtgtgaagataagaggcaatacagatatagaacacgacgggaagtgaaacgatatcggatcgtacgtatgatagaaccgcgccatccggttccaacgacgagattgaaagagagttgtatagaaagaagatggaacatgggcatcgagggcatcgcttgaggtaagataagcacttacacctcactccatccgccgtcgctagactcatcctcggctccgaacggatcatccgtttcgaaacctatactcccactcacacttccaatcccgctcgatagagagcctgacctggaaagcacatgtctcgatatgtctgacacggacgacaacatgtcggatgaagtggtcattccagacggagaagacggccgtttaggcgtttgaggatcagtaggtgtcaaacactgactgggcgggtcagaagtagccggcgtgaagaaagtcggatcaggggtgagagcggggatggacatcagttcgtttgagggcgtgcggatagaagaaacaggcaagagtggtggcagatcaatccggtcggcatagtcaaacaaagtctacgctgccgacgtatcagccgaacgagctgacgatccaagacaagactttcataagaaagaacccactctagtggtatccttcgctcttctgtgtctcaacagcccgctctcactctcgatgggttccctgctgtgcattaagcctatattcatcgagcgatcgtcccatgttccactggacatcatatcgatgtcgagagaggatgtttgtgcccattcggctggctgcgcacgaactggctgtcttctgttctgtcttcgggtctcaagaacgccatagagccatgtctcgagcctgtccgctaggtctgccgatcaggtcgtgagtatcaatccggtcatcgaacactgcacacagaacgctggacagacacccacaaggttcatacacaaacgcataagccagccccgagagggctgcgacagagagaaagatagggactactggaggcatatcttgctcgatgcagtcagtgtgtcagtgcgtgtgagtaagtgagtgggtgtgagtgagtgtatgcgtgtgctgaggagacgatgggaggttgggccggacacaaaagctgtacgtcacgtgaaatagatttactcacgtgacaatcacgtgagcgctcagcccgccggccgagtctttgcccgaagcccgatcaaccgtcgtccgctcaatgtttaaatcaaggccaagacgaagaagagcaagaagagcaagaagagtaagaaggaagaggaagaacaagtagatcactcgctctcagtatcgttctctgctagctgcatacatatcatacaacacccaaacctcgaccatgaccagcgatagtatcacagagacagacaccgccgtccttcctcggatcgatctcgacctatttcgggcagatccgacttcgccagctgctctggcagaatgcgaaaaggtatgcacatctctttccttctgtcgtctggtatacaagacagttgaaactgatctgattatccaatatgattccgttctgatcaacaggcagctttagctcttcagacttttggcgctctggtcttgagcacgtcgacggtttccgatgattcaaacaccgaattcttggacttgttcgaaggtgagttgagatcagacttggtcttttacacgtcggtcaatcagtgcactgagctcgataagagagttttcatcaaacagactactttgctcagccggacgaactactgaaaaaggatgaacgaccccagtatggcttccaagtaggaaccgtaagtttcctcggacgtgctttgtctacttttgtaattcttgggtcttactaacgtttgctctttcattggttcttagactctgtccaacactgaaaaggtagatcgactctcaaacctccttcgagattcatttctcttcagactgacaaacttgctgttatcgttgtcagccaaaatgtcatagtaatgatgaatgtcagagcgtgatcagcaatctcgatccggctgaaagaccgctggatttgactgcttccttcgcagacccgaaatgcagagttcgtaaatgcagtccaaattttaaacgtatcgaaatttccttatgatgttgactacttgcatatcttatgctctatacttattcaaatagttcttctaccgaatggctcaaattcctccttatcagtcaaaattctctaccgctgccatgctcaatgtagttcctcaaggatttgaagatatatggatcgacaagtgtgaagcatacggaagcctcgtaagtgcttctgaatatgtgttcatcactgccttctgtgctcacccgggtctcattctttgtcttgggacatagctcaagagtgccgtcgaaggattggcagagatgtctgcaattgggtttggacttgataaaagcattttccttggtgcgccttccaatggtcaatatagagttataagacagatgactgacgtatctgcgttggttcttttcttgtgcaacacacaccgttagatgctgggaaatacgggcaagtatctcttgatttcgctatgttgtgggaacgtctatcaactgatcttaacttatgttccctctttagacctcatctccttgctccaactgcaaccgatctggtcaagtatggccaactaggggccatctttgccggctttcatacggtaggtgtgatcctcatatgactttggcattcttcgatccgacctgttgatgaatttctaaataccaatgggctcaggatctcaattttttgacaattcatggtccttcgagatatccggtgagctttgattccaacctccttcgttgttttctcgaagcacgtcctctcataaacaaacactgaatgttgctttcaacagggcctgcatatttgggcacggaacaccggaaagagaatcgtcgcaaaggtgcccaaaggttgtctttgtaggttctgatgttttacatatctttccgttcctacgttctttcgttcttgcgaccgtagcttgatagtcgtcgttctggtgcactcaaagtggttcaagccgggaaacagttggagatcgtgaccggaggacttgtcagagctggcttccatgaagttatctacaacgaacggactcacgctgtgcgtcattgttctttgtcactgatgagtgcaattctcaaacgcgactgactcttcaccaatttcgaaattcgtttatcgacaccctaggcggtcgaacaacgcaagattactcatcccgataggcctctgattcggatctcgagtactatggtaaatatcacgatagaatgcctcgcgcgaatttagcacaacgagctaacacgcttcactcgctttgacaattctctcttctttttctgcttcaaaaagttctggcatctatcttcagattacgatattactcctatccccgcactagcccaaagagcggtggcgctgcgtaagaaaaatggggaaatcacaagttcgaaaagtgaggacgaggatccttataaggaatggcgtggtgtacttgtaggaaatcaggttttgacgtgagtatatatcatttgtaacgtgtaaacgctaggcagacccccactgatgcacttttccctttcatacgtgcgaccattagtgagctcggtctcatcaacctggtggcttgagtgtaacgaagcttgacacctacgccagatgttttttttttcatgtgcttcaatatgtaaactctgcccaagactacgtgtactgtgttcttccacatataccatgaatattgttcttgaacaaacgtgttcgtgtcagcgttgtgtagccatccctgttgggcataataatgatgatagttgtggaagaggatgtggttgcaacactctgcattagattcgaatgatgaatcatcgcccacaatttagttttctcaaacattcaacccatccgtttattcacctccatcaccatcaccagcatcatggggtttctttcatttctctcttcttcttcttcttcttcttcttcagataatccttcagcacctggagaagtattcacagccattccttctagtcctatagcccattctcctccttctcttctcgtgtcagcgatcccaacctcaacatttacccagacatcttcaagacctcaggaagccataacgatcatcacgcctgatcctcaatctccgagtttacctccagatatacctcaacagagaaaagaggttaacccaaatgcgtctttatacatcttttccatagcgggtgtatgtggtcctctgctttattctcgacactcctctttctatactcaggctgacttgaaaactcatatatcatatggaaatgcgtctgtcttctgttgttgattcaacaatgatgacattatcggcaaccgattctaggcggcatttgccggtggtctcattctcggtgtccgaaaagctcgaaggatcaaattcgagccacatcagatcgaagccgccttgaaaaccgatcccaagaatgtttcttccaataatttgaccatgcccaaagtcacagccgctcctacagggggttctcctttaggagcgtttagtaagcccggacgaacgagctctgtactttctcgaggaggatcaaccatcaagcagggatcgggcaagttacctcatgagagatcaatgaatgatctgtcggccatcagtccaatctcaacaccgaaaccaaagtcggccgctccgtcaccacttttcccctcttcgtcggggagaacgagccccaaagtatcttcatcaacatcagcacatccatctttgaattctgccgtcccgactggtacgatccagcaaatatcagtacaaagcccggtcccgacgctcgctcaaactgccaaggcccggccgacgtttgctcaatttagacaaatgtatgccgacagacacaaagacgccctggaggatggcgaacatgaagatgctccaccgataacagcaggggcggtcatgcatgctgctcaagcatttgtgctggcgaccgtgttggcagttagtttggtcggcgtaccgttcggtgcaatctgttggtggctcggggtcgaagaggtcagttttctcctactctgtttctcttgctctgtataaatcgactggagacaaagaatctccgtttcatctgaactgatatcgatttcttttctatctttctcttcttattttttcctctcggttcgcgcaaacatctctctacttcagccggcagatttcacacctcttttccgacaaaaactaagcgtgtacttccctacccttggtactgaatacctccgtcctacggtccccgaagatccggcagaacccccctctccttcctccctctcgtcttcatcgtcgacgatagcgtcgtacctacctgatttccttcgttcctcatcctcagcagcggcgacgaccgacggtcagtctctgggtggccatacgctgatccttccgtcgattctccaacaaggtgcctcgcctgaaggggtagaagaacagaacgtgtacacctggtttgaagaggtcaaggatgcgttcgagaaggatcggctcgaggagatcaggaagaggcaggaagaagatagggagtggaaagcttgggaggaagagatgaagatgaagaaccaaggaatcagtcaaagggtttgaaagaatgggcagggctagtcatcacttaggttaatttaatttaaatattaaacaaaaaaaagatttctcgt

SEQ ID NO: 846 - DNA, 59616 bp, Xanthophyllomyces dendrorhous
ttcgtattcctttcactcgaggtttgatatatagtgagaattatgaaagaacattctatagtgaaatataaagttatggtacaacagattctttataactaagttgaaaaggaagcggccggtagaaaaaaataaggtataatttatgaacaaacgttgaatatacagagaaaccccagaagccgagaagcaaaagatggaaggacgaggggggttggggtgtctaacaaattatacatttcccgtctagaccagcgctttcctagaaattcatgtataacaacatagttcgaactcgatcagcgaaacaaatttttgcaaagctcaggattaagtaatgtacactgaccatatcttccttcgcgacttccttctcgttctctcgctgcttgattttgacctctgtgaaaatcaaatgaaatttcggtcccgggataagttaatttcctctatgtagaaaagaaagagccagaaaagcaaagacagcatggcgttacctcgagggaagtataacttcatgtaacttgagaagcaagtaaagaattgtatcagacttgctgaatatccgaattgatacgacagaaaatagatcatgagaaggtaaacttactccatagcttcagtatccagattccctaaaatgaaaacaatgaaaaatcagaaagagtcaataatcgacgtatttctgaatgcgtctctgtctgtcatctgcaataatttagagatacgtacgagcattagcaatcgccaacactggtgctctacacaacggacacaagtcttttcctctacgttgcattttcgccaagcacctgataagcaagaaaaaggtgttcaggttaagagcaaaattcctcaagcttcctggcgtagaaaaagttataaaacaaaaggaacttacctgacacaaaagagatgaccgcaatctagacggatgggcttgaaggcgatgctggtacagattctacacaaacacatacagcatttgttcgtttaaattctcagcctcaatgcttctgtagaaatccgagatttaaaaaaaagcgcaagtactaacaagcaactatagtcttctaaacttggaatgatgggaagcaacgtggcggttaacgaagcgagcaagacatgaggaagtgacgaatcaaacagcgtccaggtcttgatgttatccccagaagccgcatcgagtgaggagcgaacgaattgaggaaacccttgagcggcggtcaaagccgtccgtttgtcatgcttcttgagaatctttcgggcggccttgacgttggcggtctgaaactttttcaagtcgagtaacgtcaggttaagttgaaggaaggtattaaaagccgcccgggaatctctggatttcaacgtccgtcggtcgcctagatttctccttgtgagctctccagcaaacgcttttaaccttttctcagcctcttcgatcgatcgttccccacggtctctctccgccccactctcgaaaatttcggcctcgatccagagcgtgaatatctctctccaagcatataaatcggaataaccatcatgtttgctgaatgaggctttgacctttgcccctagagagttttttgaatggatcgtaggatcgttcggtttagaagctgatgagatagattcgcataaatgctcgacagtcttcctgaatatggcctgttggtttcgttgtaaattgtcgagagcgttgagcgcatgggtgaggacattgaagaactgagatggaagattgttgaaatggaatgtttgtgagtcaagacatccctcgaaggtttaatacggaaacaaaactacgggcgtcccaactcacctctaaatcagaagccagctcgatgtacagttctttctgcggcggtctattgaaatcaaatttcaaagaaaaagacacagagaaagacccgaaagatcgacatgttaggaacgacaaacagcgcaagcaggataagctcaagatatgaactaacgcgactctttccgacaagatcttgccgtcgacttgatgagacaatccgttggttatcacggatggttccctagccccaccaccatccagctcgaacgaatcttcgtcctcgaccggtttgccagctcccccgtactttagcattccctctggagtagccggttggatggctaacagaggcacgcataatcctggtgaactaccgatgacagaagtgaatccgggaggaacgacttcgctaccatctccgtcctcatcatcctcttcattctcctcgtcttcttcgttgtccgcctcgcaaatcccatcgtcttctttcgtaagtgttgccgacgacgacgatgacgatgatgatgacgccacgttagcagtttcggtcgatttcttatcgccacgactggtacctctgcgaatcccagcatctaggaaaccttgttccgagccttctctgagcgcccagatcggagactgaacaacggttctcccactgattgctccttctcttccccctcctcctcctcctcctgttagtcgaccacctcgcgcttttcctcttccacgtgcggtagcaaacaggtccctaggcgtgctcgccatcagaggttccctcggtccgtcgtctactcctggcgtgggatcattcgaggatatctcggaagttgcttctgattggacatcccagtcgtctaagtgaatctgagccaggcgccgattaaatactggctgcgcgaactgagcgtctagattcgaaggcaccggcgaagaagaggaaagggaaggagaagcttgaggggattgggcattactggggcgagagtcatcatcagtgggtagagcatgatggatagacgacggagaccagtgcattggggctggagaggagtctagtattcgtgggagggaggatggagagggtgagtgagaagtatcgagtgaggaatccaaagattttcgacgaatggacgtggcagaattatgtaatggaactaatcgaagtcgaggaataggatgatttgttgagcctgagagacacattcgagtaggtgcccatgcgtaatcatgtcagtccccaatagtctacaagatagtgataatatccagacaaatagatgatgaaacctctgaaacaaaatgactgaccaccaatctcgtactcggccatgaatcctcctctgacggccacgctctccctccggacctttctctcattccgagtcctgattctcttgtgcgcgagctctgcttcggcctcttcctggccgacggcaaagtcatcctcctccgactctcctgggctgacaccttctcctcggactttgactctgaacctcttgccggtatcatccagccaggtctgtacagctctcttgtgagcaccatcatcatccgaaatctgcgcattcgactcttttcctttctctgccgaggagaaactggcgttcaagtagcggctgttactctcatctctgtcgtcatcctcatcctcatcggatgactcggcgagaaattcaagttcgatctcggagtggtcgactgaggaggattgatcgaggtggcgaccggtactaccctccgatggagattcagacgggtgaacgaacagagaggatgagcgttgtttgtgttgatcaacagagagaacgggcgggatcaatttgtcggtcggagccgggataggtggatgaagaagcctgttcagcacaacaggattgagtcccaacgacgtgagctcgtttgagacctttttgataagtttcttgagctatcaagttgggtgggtgaagtgggtgacggtcaggatgtcattctggagtgagggttttgcgacaaatgaggaagacaaagctctcacctgcttgtactcgatggcagactggtttgaggcgacaagacgatagaaacagacatgataaggctcgaggactcttccgagacagaaagacgtagaaggaatgaacgggtggttactgacctctctccattctagcgggaaccctgagctctccaggattcgggcgtactcctatgtgttcatgacagatacagcacggagagcagcaagaagggagagagaaagagaaatagcgagagcaaggccgaagaacaggaacaagaagaaaggaaacccgtcgggttgttagcaaacgctcacaagtgggggacaagggtgaactcgaaagtcgaccgacctgactgtacttcatgacgtccaaggctgacgaaagatgaagatggtgacgacgggataaggggtttgcgtggatgtgatggagataatttggccgaggtggagtcagttgatctttggggtaagggcggaagaaggaaccaaggaaatcgttaggaacaggaatttggggacgaaaggcgcaaaggaacgaagtttacggaacaacgtgatttcacactatggctcactctgatagccacgtgcgcgtgtggggacacgttcgtcgcacgagtaccgtcaccaacaccaatgctaacgatagggagagtgagatgttgagcagatggagaatcgatgtgaagatggcgaagagcatacacacatccacaagatagacagatagatatcaaacaagagatagacaagttgaacaaaaaataggagacaagagaagaaagagcgggggaagacgattcgctcagggtttttatctggagagagcatgttccgtcttcccccaacggaatcgaccattgtttcctttcctttgccttcgtctcctttcctttccttcatgtgtgcgagagagagagagaaagagagggaacacgcacatactctatctctctctcttcctccacattcatccgtctcttgttccttccccatcgatctatctttgagttctccatctcgtcctcgttcttgtcgccatcaccctcgagcacttgctgcgtttctcgcggaaatatgcacatgcacatgacatctcgcttagagatttgatcaatcgccgggttatcgtcctcgagcaaacgaaaaaaaaaaacgttcagattccgttcttcttatcctttctgttcttcttcacatgcaaaaagacgaatacatatatcttggagattaaacaaagtgctatgtgatgataatgatggtgatgatgtcagtgatagtaagaagagtgaagaagagatatgtccgataagtccgtatgcctctttttgttctctcgccctctctctattcgaggtcaggatagaattgatggagtgtgaaagagagagagagggagaaaggggagaaagagcaagagtacatgtaggaaggggaaagataaattgcctggtagaatgaccaaggcttatgagatataatggcaaggacagagaggaagatcgataaccaaacgatacaaacccaaagcaagaggaagaagaagaaaacaccagaggctagagaacgaagaatagaaaatgaaaagcgaaaaacgaaaaacgaaaagcaaaaaaaaaaaaaagatcaaaagacaacagaaagaagaaggactgcttcaatcactctccccatcagagtttaccactctgctgaactctctgaatccacctctaccggtcaacccgccactcgcactcaatccaagaagatcgactctggatgagttcctcgagcctctcgtacttccacctaacgaggccggaccggctggaggcgtcaatacgcccgaccggatatcctcttgcgcttgcgtctgcgtctggaactgtcctccgctcgagctaagattcgagctcgagctcgaaggtctaggtcgaccgctcaacagcccaacaggcgggtcgttccaaccgctccccccggcgagagacgaaggcgcagatagagtgggtaaagatgaaggcggcaatgtcttcttgaggatctctctcaatggcgtgagatgaaagtcaacagcgattccgccgcttgcgtttgaagaaaacctcctgagcgcacctcctgccgacccgttggtcggacccaagacgcctggtgaacccgaaccactggcggtctgtgtgaatgatctgaaagaaggagccgaggacaaggcatgtgtctcgttctcgctcactccgggctcgtcctccagcgacagggccaattgaacggatgacccgggcgaatcaggagagccaggctcgagatcagaagacggtcgatatagccgtcgaggagacgacggaggagagaccgtggtcgaactgtgggcgagcgaaggaatgttcccggatgaaagttggtagaagatcgatgagctcgacaatgccggtccggatcgaccgaaagtggagtgtgaccccatgaacggtggcgccaaaggtgctggcggaggggtagaggatgaacgcataataatcggagccgatcgggtttgtttcaacgcccgtggtcggtttggtcgatggaacaatatgtgcttcacccgagcagcgatcgtcaacggccatctgcccgaccgactttttgaccaagaggaagaagccatcgtcagtgacccgtttacacccatccccgattcttcctcagatgcagagttatatccggatgacagtccttcctctaaccccttccgccactttctgcctcctgcaccactgacgccaatacccaccccaccggccaacgacatctttggagaccggaggatccgacgcttgaaattcttcaagaagaaaccaaccacgcctaggaggacagctaggtaaagtaaatatgaccatggtccaacagattcgatacttccaccaacgatcccgttcatctccctcaacctggcaggaaagctgaaccatctttctccgtacgaaaagccatcgagagaaattgtcgaagaagaatgcgacgaagcactaggagcaatccctttggaggcctcgatcaccatctttcccaacgtccaggagattgctgtgtcacccactgtgtcaacactttgaaacgccggtcggacactagactttttcttcttttgagatgggcccagattcttttccgctgcctttgcagacgcctcgctctctgtcgactcgaaagatgaagaagacgcagacggatgagggtcgatcgtccgaggaagcccaatcccttcgtgtaacacattcactagccaagcagctttgaaacattgcatctgcaaccgtgggatttcgaccttgttgaaccaagataagaacgaatagacaaacatcgtcagatcaaagaacagaagcaaaaagaaaaatgatcataaagagtaccaaaaaagacccttacctctcgtccccatcgaccgacctcgacaactctaccctctccgtccaacacctcgccatcacccgtccgtggcttgtcggcgctttggttgatccacttgctttgaatggcaccccagtccgtctgacaatactcacttgcttttttctcaaactcctcaaagtcccaggcaccgccgagattgaagacgtgttcggacgagtaccaatactcgctcaccccgatgaacctgtgatggtcgaaatcaatctttggtgttggcagcgcgtcaaatagacattgatgaggttgaccactcggacaaggcaaatgtttgttgagtagcggttgaagggatagtaggcactcggagaacgatcccgttcctttgagtacatgaggaagtgacgcctggtgggcttcttcggcagagagcgaggcgagtgatagtggggatagctttgagttctcgtgcagtgtcagatgtttgggtagacaaggatctgatatatgtctttcagccaaagccgtcgagtctggtccttttcggtcgagctcatacttgtcgaccagggtgccgacgtaacgttctctcgctcggtttgttccgtagcccaaccaagaggcaacgaacacatcgtagtcgagatcttcaccagaaagcaagcgtaacttgacggatgagagtgactcccggtgtgccgaggcttccgagtccgaaggagtgaacgctatctgagtggaagctcctcccatgtcgagaaatccatacggatgaactctggacgaatgatcgagcgtagaagaaatagacgttggtaccagctcagtcggttcgccaaacccgtccatcagataattcaccgcgacccagccccagaggccttcttcctcgccagagatgattctgaccgtctccccgcatgggccaccaggatcttgactggagccgaccataaacggatagtcctttcgtaaaacatcacatgtcgtctcgatcaactttgaagataattccgatggtaacagtcgcattcccgcagttgcgaggatgtatatcggagtggatgcatattgggaaggaggtatagagttgatcgcgtgagccatcagagggtcgatatactcggctaccgaatcgtatgtgattggagatgcggccagactcgaaatgcctgaatgtgtatgaagggtgaggttcgagtcgtgttaaccaagagcaccaaatcagccaggacagttgagcctgctgagcgtgaaaagtttgatactcaagccagaaaaggttgagcgagcgagcgtacataccaggctcgaccttcttttgccattcgcccatcccgtcctgaacgcctttctcgaccctgggtaaccttcgaagagcttctcgctctctctccttgccctttcctttattggaaggagcgacagatgaaagcacaagctgacgctctgccttaggatctctccatgaatagatctggagtctagacccagacgagccggcgtcgataacgagggcatacctcctgctggcaaacgcgttcaggggaggaggcatccttcaggagggaaaatgaaagagtgggtgtgatgccgaaggaggagaaacaaccaagaaaagaaagaaaaaaaggagcgagtgggatgattaaatgaactgggatttcgcagagctaatcaagacaagattacgagccgggtcaaacaagaagggaagtagaaagagagtgagtgaaaggttgaacgatgggaatgtttgacctagtccaaaaaaaagtgcgctttcgcccgaaccctgctcttctttccgactgcggctgtctcactcttggcgtctgttgtttgttacgtcgggcggctatgattttgtagtgatcgattaggaagccttgtctattagagtttgtgatcggcctttgtaataggctactagagaggtttcctattgaatgtgtatgttcggtttttctaatatgttgtgtcagcttattagagccatcctctaatgttcttccggagtgcaacacactacacaaattacttagtatcagactacaaacaatctctattgctttttttcgtggctcaacacactcactcggtcacttccgatctcatacctcaccatcttcacctcgtcatcatcatccaagtcttcagggcagacacccgatgagttcaatagcagattcttctctgcagacatctttgaaagaagtagacagcccgctcgatacctcttttctttcgacgctcgccaaagataatctcgtccaggccctgaatgctgtaattggctcaatctcttgtgtttctcgttctcgttctcgttctcgtcgttggaactcacactcatccccatctctttcggctttcctcgttagatcaatggagcaaagaccttggtgttagatcctacgttggcaggtcctctcggcctggtaacagaggtctcgttactcaaagttcgttcatcagaacatctgtcagacatccttcatcgatctgataataagactattcgcctacacaccctatcagcatcaagcggtcgacaagatgttttggctagagaaagggccgttgaccgcaccgacaaagaacatcatttggatgtgtagaccaaagatcagttggatgaagacgattgctagtgcgtcttgattgtttcgcttaccttccctatattcatcaatttccaaccttatgtctttccttactttctcgatcagaccagatcaggtcgcacaatttgtcggcttcttcccacacgtacaccattttactcgttccccgaaagacagagctttgtagacagattcttgaggaagaaggcgtcttgggagatgtcaagctcgaagagtacaatctgagcttcatcccccttgagaacgacgtgttgagtctggagcttgagcatgcagcaaaagaaatctttctggacaaggatgagacatccgtcttctactctgcccaagctcttcatctccttcaaaagacttacggtatcattcctcgaataataggcaaaggtgacgtgtctaaggttcgttcgctcgttctttctcgctccaaatatttctcttgttcaggtgcgaataaatatttgtttatgatcgtttctggtatatgattcgacgcatggccgagtagagactgtcgagacaactacagacattacgtcggacagactcctcgtcgaccggcccagtcccgctcactctatccactcagatcgactcgctcatattgcttgataggagcgcggattgggtgacgccgatgtgcacacagttgacatacgaaggcttggtcgatgagacaatgggaattaagaatggttcgtttttacaacctgtgtcgaaatatgttacgctctcaagtacttaccaacaggattgaatatgtttctgcgcatcacagcccacgtagaagtatccccatcactgctaaataaccaaccctccaccgtggcttccacaagcacgaccgagaccacaccgtcactatcacagtccacaccggccacatcaggaaaaaagaagaaagtcgcgttgaattcaaaagacaaggtgttctctgagatcagggatctcaacttcgccatcgtagggaacagattaaatgccatggcgaaacggatagcgggcgcgtataaccaggtttgtcttgcccgtgacgtttgttgggaagagggcaaaagataaagtctacgcgaactgttggctaagacttgagtggtttgaacgttcgcaaataccaacaagggacggcacggcaaagatattgcccagatgagagactttgttgggaagctcagcgggcttcagggagaacatcaagctctcaagcttcgtttgtcctgtctcttttttgccccaaacgttctcacccctacattgtatcactgactagcgtgatgtatatcgattttggtacggacatcacttccgaaacaacagacactggcttgacagaagagatcatggcgatcactaaaacggatgagtttttgaagcctctagagatctctcaaagtatggatcactgtcctttcccagtctaccgagcgctttgttggatgcagttgaccatgattacttcttcccatgtagatatccttgccggatacgaactcacaaaccagctgagcgcgattgaggacctgatcaatcagggcctgcccttcaataccatactcaggttgttgattttaatggctgtgacaagtggaccgttaaagggaaaggtgtacgataaccttcgacgagaaatccttcaagtgtacggatacgaaaaactacctctacttctctcgttggcttcgctcggtctgttccctaaaacacctgcatcatctcccccaaaatctttattcccgactatccggaagtctctacgactattggttgacgatctggacgagaacaatccggcagatatctcgtttgtctactctggatatgctccgttgagtattagattggtccaatgtgtggcccagaagaacgcggtgttgagtacaccggtggtggctgacgaccgagcggtaggagggtcttcgaacggagaggatggagaggagactttcctaccgaaagcacatcctattgttggatggaaaggattcgaggacgtggttgcttgttagttggattttcattcctctaaattatttcaccgagcgaccggaagaagagatagattggttgctcacaaatattgcgtctgggttttgggcctttcggggggaaaacagacgtccctggagcgactttcgacgagatacagagcgcagatctccaccagcctgtccaacgacgtacgtatacacataaagcgctatctttcaatatcgtcgctaatccgattgcgctgtgatctctggtaggttcgccgaaggaacaaacgaccacgacaatcgtcttcttcttaggaggtaagtattgttacttcttctttcttccgttccctatcctgaatagttgactcaaatggaaacgtcccttcttgcttgaatctcttcgcgacctcaggctgtacatttacagagattgcagcgttgcgtaagatggctggctcttcaaaaggtacgtttgagcttcactaccgcttgatccacctcgtccatccttgctctattgacacccgttgtttttctcccttgaatgtacttcaggtcgacaatttttgatctgcaccacttccatcatctctggaaactctctggtgaggtcacgtgtttgtgattgtcaaggagacatcatcattattaacgctaccttctgtttgctgtcatttgcctctctgaaaagctcgattctattgctggcgatgagcctcggccgcttgagccggcggatgtataggcgctttcgtcaattggatggaacttagatcatcaactatggatgtattacgtgtgtgcatgcgaacgggcaaataccaaggcgaagcacgccgggcgttactctgaacggtttcgattcccttccgttctgattcgtttagaagcggtggtgaacgaggaaggaaatttttgatttgaaagaagcttgttgaaatgaagggtactcatcaatttgagagcgctttgattcgctgaagtttttgcttaacaaaaaagtttttagtcaaaagctgtgcaaacgcgttaaaggggacgatcaactcaacaactgacgtgctttcatgactttctttcctttctgatccactttcatccagtctcatactctcatccacgctcattgacacactcactcacacacacacatccatatatacaaccacaactatgaccactccatcgacatcgaacggagctcaggctctccccaagcgaagcaagaaccaggagccagctaatgcgaccggctcatcctctgcctcggaaacagccgacgctgccggcaagtcatccaccctttggcccgtcaggtcgtcttcacctactccctctagtttgagagcggtggaggatgtgttgagagctcaccagacgggtgacccgttggctactaagtgcgcggccgatggtggtgtttgctgcaaggacctcaaggggtatgttattggccctttttgaatttaactaggctcgtttttgaatctctagtcgggagacctaacgtgaatcgtcatctttcgttgtcttcatctgatttcacttattctagggaggatgagaggacgttgattgatccggatgtcgttcgagacgtcattattggactgagtgacggattgactgttccttttgctttgaccgctggtacgcgcgtttgtcatctaacagtgctgaaagttcgttcaagacttgcaggttctaattttttgtgtcgtaatgtcgattttttgaatcgacaggattatccggtcttggtgacgctcgattggttgtcctaggaggattggccgagttgattgctgtatgtgtattcttcacacactgtacttatcgtctcaccacatcgggcttatgtttgtttggttggttgcatattgttggatggtctgttttgttagggtgctatctccatgggaatcggaggattccttgcttcccaggctgagcttgaccagtatgtatttgtattcatatgaccagactgattatgttccatgtattaattcttcgcccgaattgtccaccctattcatatccactttcagcttccactaccttcgaaagcagacccacgcccgagtccttcgttcgtgcggtggagagatggagcgagaagttcacggcgtccttggttcggtcggtgtagacgagtctatctctcgagttgtggcccagagcttgctccaggtcgagtcggaacacgccgaggccggtgactgggatgaaaacactagtggaagcaaagctgcctggtggaagtttggtttgggcaaatctgatccggaggagggctcgacgttgaagtggagtaaagacattggagtcaccggtttcttgatgaggttcggagagggtctcggtaggtacttttttcttatcaagttgagatacgtctcgttaggacaagtcctgaaaaattcgttacttctttctctctcgattcggtatgtagaggagactccggtgtcgagattgtatatctctgcgatcactatcggtcttgcctacttcatgtaagtctcacttatcccatttatccggtcgttttggccgcgcacgacctgttcctgactcgacctccgtctatatttcttgactgctcttatcagcggtggactttgcccgctgttgccctacttctttgttgaggacgtcaaacacggtctcatctggtcctctgctttcaccttattggttctcatggcattcggtgtacttaaaacccacttcacgttcgtacacttttgtctctgctagatatcttctttcttttcatgtgcttacttggccttaccattgtgtcgattacttttttggatagcggtgctactggaggtgcgggaggatatgtttggggagctgtctctacagcacttgtcggaggagtcgcaggtttgtcctttcgcgctatttctaaagttattcttgctctaagctcacgtcttttcatttgtcccaattagccgccgctgcgtttggtgccgttcgattgctggaagttggagtttaatgccttctttacttttttcgccgtttctccttgttcctcatccaagaccccccatcttgtatcatcaacatatttcgtttttccatccggcctgatcgaacgatgaacaatgcgattgcttgttctttcatattttttggttttcaactttcgctaggcgtgatggatcctcttgctgcgctacctcttcttcccctgatagtgtcatctttctctcctgtcccgatcttacattgtctcttctaggtaattaccctcttcaaccctttttggcttctaccattcatgtcccctgctctacacgtgtacttatagattcgatagattggtttgcttctgctatttaaagacatagtttttttcttcttctgaccgaaaggatgtgtgcgctataagagcagaaggacagatgaatagtagaaaaaaacatgagtcatgataagtggctaatcaacctcctcctccaaaccatcaaacacattcccggtatttcccgctcgttccgccctccagttaacacctttgttcccaaactcgtccactcccgaacgccattcagcatcttcccccctgtctgaggaaacaagtttgatagcccgttggaaacgcgttcggctccttctcttgagcctatcaggtttcctccacctggccctagctacatacgaacaaatgaagagaggacgttgaatgagactcgagttgctgaagactgtaggagtgaggacaaatagaatcgaagacttacttgaagacctgcgtagccacccatacagaaaaacggaacgtccgctctccattgacaatctgtagtcacaatcattcagctcaacatacagagagaaaggcaggagggtaagagaagtagtaggattagtaaggaaaacgaaccgtcagtgaggataggcattccgccaatcgattggataggatagtctttgttaagttcacgaaggaaaggaagtccttcgacaccgaacttcgacccagtcgcggatctgttgcgtccaaaaaaaaaacacttgagatgcgctgcaaaaaaaaggaaggaaaagaatgggctgagaaactaggtgaatgaggaagagactaacactatataatcgatatcttccaacgtttctctcgtgatctcgaacgttgggccttcttcacaacaatctggcaatactgtcatgcttgattccttagtcgccttttctacctcccgttctctttccgattcggcctctcgtggatcctctgcccattgcctgcttcgacggcctcttctctttgatcattttccgttcgcgcgcagctcggccttctccatcctaggacatttgacagcagctttcttcaaacatcgatgctcgacctcgaccgaccaagttccagtggtcgtatctctaacgagagattgtatcgtggtttgagttcggaggtcgagcttgcctgctttggcgtgagactgaagaagtttatagtatgcggcaggaacagaccctccattcctagcggttcgaaactggttaagacgagctgtaacaatgagaagatagaacaagaatagagacaggaatacaattaatgatcagggatgagatgatcgataataagacaggctaatcgagctttcatacgaaccagatgggtcgtcttcttggtaaaacatcatctttaataagttcgaatatttgcccacccactcaactgaaatttcggatttaaaagtttggacacagttcagaggaagcaaagatagcatagcacgataaataagacagggactcactgcctatatcgaatggtttgactgtgtgtattatgataagatggagcccgaacggtgttcagattcgacacaatttagaagatatccgataaacccattcgatacgcacctttgatgaaagatctggcaacaaagacgacctttgtgaacccattcgagagagccagatcggcaatttgaacagatgttagcctgcgcagaaccaaacaagccacagaacggtgactgaagagtaagtacatgtatgactggcattcaaagcaaacaaaggagaagaacttaccctcctccgattacaagcaacgttcctccttttccagacgtgatcttttccgttaatcgtacgtcttctttcgggagaagtgtcctccctggcttcaagaatgcagcggtatgacaccatccttctccgtcgatcatgcctgatcgaccgcctgaaagataatcaggaacattcggaattccgcctggtccgatactcatgataactgctttcgagtggaagacttgtccatcaccggattcaatagtaaaatacgaatcagagtcgtcgagagacttaaacagagagtctgaagagtatcttgtggtcgggtctgagtgagcatggtactttacgctggtcaccagacctttttgcacgatggattggagagagtagcgttcgataacctcggaatggatgaatgatttgaatagtggagtagagggaatgaagtaatcagaaatatctctaagaccgccaggtgataacggaaaaatatcagttttctaaaagtgtacggttccatagagagttttgcatataaaccttaaattgatatgaggttgttgaggcgcttttcctttgatgcgagcactgttcgtaagagatatccatagatagacacatagaagttatctaatacagcctttcgagatcgagacaatgagttaggaactcacgctttcttctgatgcttactccattcagttcctacgacgttctcgatctcaatgagcgcttttgccctgtcgtttgcatgagcataagactttaacgcgtcgagatctcctggatgtggatgaaagaagagaggagaacgaagatgctttatcttgaaggcgtcctgtaaattgatatggcaggcagtcccacacgattgagcggagtctaatttgtcgatggttctagacaacgaagagacatagcttacaaagaaggtatcccaagtgcccataaatcgcgccgcctgtttatccataaccatcacctttggcctcttctctgtcacatcgtttttggttcttgaaggtgattggggtgtcttccgctgctttgaaggagattcccgaccctcagctacatcgtctgggacgattctttctgtcttacctggtttggcgtgctttcgaagccaatgaagacgggcgtgctcaaagtcggaatagagagcggatggggtatcttcataaagtcgggagacggcggccaaagctttgagagttcatatgattcgatgagtgaaagatacgacggaaagagaaatgtatggccttcgttagcgcaacatgtatttgactgaagagagaaaagcatctaagaggaaatcgcatacaatgaggacctgcgccaataatgaagatgtcgagcattgtattgaagaaaacggtccagatgaatgagagattgagattgttcttaagcgatcagcttggcatttcgatctcatatatacatgagagattcagccggtcattcttcgcgatgtttcgttagaactgcctcgtcctcacccaccatagcggaggaggactgagaggtcgcctatagaacaatatatcttcaggtcacaacgaatccggttagtctccgaacatatcatcagtcagtgtcattgccttcaacatctacatgaaagtatcagtggttttcaaacacgctgcgctctttctcagcaaagagaaagatattgacatggaagatacgatcaagaaagatacaagcgtgagttggaggtaggaaatcacattattgtcgaatcacgtgaccatgattgcaccggcccgatgatccgccgagcggactttcttggacaaatctcagaggcgggctaaacgagatcaatttagaagggatgaagaaagataaggctgatagaagagaagaatgaggaggtaatgcagaggacggaccgcaaatttttggcatctagtaggagggggagtacaaaagaggcgacatcggagagcaaaccaagaatcggatggatggactggagaatgtatcgtttcgtttaatcagctgataggagatcaagatgggatacatacaatccttataagaactctacaagccgctcttccttggatcttcttgttcaatctctggctatctatcctttcttccttctattgaacatgcttctcaagtctctcgctgaagcttccgttgtctataaatacacaagtctgattcctccattcagacgattggcaactactgctagcctatggaagaagaaaggtaaagtcgaccgatatgattctaagctctatcgatgtctcggagagagatcctgatattatatcactcacgatctatgtggtgcagattctatccccaagaaggcttccgagcccgcttttcagatggcacctaaacccatcgtcggtgtacaggctgctctgaaagctcagagtgacccaggttacaaagtgttagtatatttacatacatttgtccgtttctttatcttcttaaaagatgcaaacgtcttataaaacgctctgtttgtctggaatatcaatcacataagagcgcctcagatattcaaagaattttctcaggccgggaaggtcgctgtcatcactggtgagtacttttgataaatctttcattcgcatccaaatactgctcaccaaccccaagctatgtaacttcaacaggagccaacggaggactgggacttgagatggctcttgccctatgtgaggccggagggacggtgtatggaacagatcttgccgaaacgccttctggttcgtggcccaatcttgcgcattgatacagttcgccatgcgcgtactcttgggtcttattcgaattgacctgggttttcaccggccttatagatgactatctagcctctcaaaattttgtgaaggccctcaacaatggaggcgctcttcattatatccaaggagaggtaaccgtcaaggactctattaccggtgtaatcgatcaggtggtcaaaaaggaagggaagattaatgtggctatcgcggcagctggaatcctgggtaccgctacaggattcgattgttgggactttccagaggctgaatttaaaaaggtatttcacagttgttcatacttctcttgaactcaataatagactagatactgagcaggcatgatcttaaacattgctggcctacactagatttttgatgtgtaatttctcaatcacccttgttcaaccacttgtcgattagaaactgaacagttctgtccctctttcatctccagaaatgtgaacggtgtattctacacagcgcaagctgccgcaaagcatatggtcgataagaagaattcaggatctatcattctcattgtatgcattctttctactactgcgttcaataagaacagagatgcttcttgtattcaaaagatgttatgttatatctggtctcacatcaggcgagtatgagtggtactgtagtcaaccgtgtgagtgtttctctctctcgtattatatgtttatcttgattgcgccagagctaatcctcctgctattcgacaggatgaacgatggacggcgtacaatgcttccaaatccgccgtgcttcagatgactaggtcaatggcggctgaactcggaccacatgacgtacgggtcaactcactctctccaggtaagaccattcttccccatacccgcgctatgtttggatcatatatactcgttcccacgttaatctactttatctgatgaactccccacgatcgattcaggacatatctacactaacatgactgccgcacgactcgataaagaaccaggcacggctaagagatggtgttcactgaatccgatgggccgactaggtggaactcatgaagtcagaggtgtcgtagcatggttggcctctgatgcttcgagcttttgtactggatcggacatcatcgtctcgggtggacataccgtttgtcctgttctttgaaggcttctttgttcaagttttggtgtgcgatatgcgctaattcgggtggatgttgttctcgactttattatttccgacgccgacactcttatcagatctggtagagaacatctctgatggtttctgttacaatttcacactatttttgtgatatttttaatctcacttgtatttatgtcgctttgaaggtcttgttgtcagtttgttccgcctttcctacttatcggcatttagcctataggatacctttcaaatatcatacgtccaaacaagaagacaggaaagagggatcattctaataagatataagattgatgagttgtataaacattctattcgaaacaaagactaaagggtatacatctgaagaacagtacagtctagaatgtgaggccagaaagaatgaagataaagagagtcgatgcttgatagtcgaccagaaagtggaggatgtttcctacttcactcggggacgagcatgcctaccatacacccgtccatcataaaatcagcgttcacccaagcgtgggtcgccactagttcagtaaattcggaatgaaaaatcaatatatcagtgatgactaatttaatccatgaacgcagaacatgatagagaaaggtacggactaaagagttttgttccgtcccttcctgcgcatctcaacagttctttttctcctccgggatggaacttgttgtacggcgtcaagttatagactcttccgttgattgccgtccatgcgtcatgcggtttgtctggtttgtgatccagtcagaagtcaaagaaagtcgacaggccaattattagagactgaggaaacatgggagaaagaaacgcactatgcttcttaagctcagatggagtgactcgcatggggaagtgcgtgatgtcaccctgtcgaaattaaccatccagtgatgtgttataagtcaagagcagagacaccttcgaagagctttcgttctacacaaagggggagaacgtactttcagactcttgccctgatactgcccgctacttttcactctagcccaatctagagctgaatgtcctggagcaagcgccaccttctctcgagcttttaccaccttcgtcgttgttgtcggtgtaccgagacttcctttcgacgaagcgacagatcgaggtttagagggttttgggtcgtcttcaaatgtggaggtcagtgggtcgcgcaacggagcggaaggcgccgagagtgtgaatgatggaggaggaagaggtatgcttggtttctttgaagaggacggtccagacgatcgttgatgagattcaagtagaggaaatggtggaggatcatcgtcgtcctcctctttgtcagcatcttgggcaggaggattgaactcgaatacaggaacaggaggtttaggggttgatttttcactctcagacaccggaatcgatggcggagcagggaattctgggcttgaatcggagcttggttctgactctgcagaaagtacagacagatcggagggaactaagggagtgttttgaggagtagacaccgaggcgaggagggtgttgaacgtggaggccacagcttggtttaacacaaggcacaatccaatgttcagcgttccgtgttttcagaccaactcaatagaagaacaactcacatgtaggaatccaggcagacatgttgggtcaaacaagatcccaacagtgaacaaacagtcaacgtcaaggagcgagaagtggatatcggatagaacagcccagccaattcagaaacgtcgattacttgcctgagtagtctcagccaacccttgtgagggatttgatcttatcttatctataagctaaccctaacaacgtatctatcgtcgtcactgtatttaaccatcgtggaaagaagaagtgatcgtgataagcgaatgattctccgatccataagttctaaaagacgatcatcatccacgcgtcgactgtcaacaatgtcaaaacttcccgagaaatcgtcccaaaagaaaccaagagtgattcattggtacaggacggatttacgagtccacgattcgccaagtctcaaaaccgttcgttctgttacaatacgcacgtcggatcggtataatctgataggtttccttgatttttggaccaacgattcatgtgacccttccaggctattgacctcgatcccgaatgtctgtggtctatatggttcgtatgattcgatctgatgagtgaggtgccgatcgagtgctaacccggtaggaggtacaggatctgggacccgacatacgttcaaggccatcgagtcgggatgaaccgtcttcatttcgtgttggagagtatgagagagctatctggatcgctaacaagtattgattcgggccataagctatctgtcctcagaggaagtccggagaaagtattggattggattttcaagaattgggatgtgacccatatcgtttgggagatcgtgcgtctgtccttccctatcttactcgggattatttcgacgtgttatcaacaattatcactgtacaacactccaaaaggatacatctgcatacgctcgcaatcgagatgctgctatcatggatctagctcagaaacacaacgtcaccgctcttcccgttctgggtcataccctctactctgtccccctgctcttgaaacataatgccaacaagcccactacgacgatgcagcagtggatgaaagcggcttcccacctaccttcccctgaatttcctatacctgcccctaccgagcttcctcctgctggcaaagttatactcccagaaggagggttcattcatgatgacggaacagaaccaaaggatgtcaatttgcaagaacaagggggttggaggcgagaaagggtcagttgctttgataaagaaggtagaacagcgacagatatcccttccctagaatccgtgggaattgtgaaggaagaagttcaatctctgatcccaccaggagaaagagttgcactggatcgtctagcccgtctctgtgtgagtgaaatcatatgtaactactttaatcagaccgtgtctctcgatcattgaagatgtcccgccaagttcttgctgcttatagaaagataaagcctgggttgcggcgtttgcaaaaccccaatcctctcccgccgtcgtcccatccgaatttatggagggagcaatgtataaaaatccttcccaaaagggcgaaatcaagaatacaaaggcggcaggcggcagcacgttcgtcttgagcatgttcctgaagtatgtctttatatcagatcggcgttgtgatgttcaagcgatagttttgaataattcatcttgagagatcacttcagatttggttgtttgtcggttcgaacattctatcactctgcaaaacaggcgatcgaggattataaagcagcaaacctcactggcgcggttgtaagtggatttgagatggcagctatgtttattgacaaactcttgtcaagtctgcgctgattgaaatcatttcatcgtatcccctgatcaggttcaatccgagccagagaacattgtctgtccatattctccgcgccggcatctagttaaaactttgaggtactatctgacgtctttgtttgcgcgttcatcggtcatttgttgcttctttcagatcggccagttgaaattcagggagatgtacatttgtgcagaatatgcgactccaaacttctcaagaatccgagggaacaaactttgtcggtacgcctctcgagcgcttctcctagggtgagaactctctcatgaatctcgttctcacctcttaccttccttccctttcctttctttcgagacagttatatttcttggaaatgtccgacgcggtatgacgagaatggagtcgagattcatcctcgaccaaaggatgatgaagatgcggagaaaattctgtatgcttgggtaggcagatattcaactcctaacagcttcccaaacatagtgcaagacaaatgatttatccttcttgtgtggctggttgactatcatggatctctgccaatcagacgcatgggcagacagggtttccatggatcgacgctttggtctgtgtcttgcgtctctctgttctggaatgtgtatggtatatttgactgacatgaatgcattcgcaaacacatgcatagatgcgtcaactacgtcaaacagtgtgtccaatacattggcgatataccattcagtcgataccatctgatttactgatcgatattctcttgtgttgcgcttgaaaatctcagggctggatgcaccatctcggtcgacactctgtcgcttgcttcttgactcgaggacagggatacatctcttgggagagaggagcagaagtgtttgatgagcttttgctagattgggacccagctgctaacagtttgtttgtttgtttgtttgtttgtttgtttgtttgacgcctgttaatccgaggcactttttggtttgtggtcaactgacgggtgatttctgtggcccttgtcctcggtggttcattactttgatgtatcatctgctcaggtggaaactggatgtggctttcctggtatgtaatcaaaaaaaaactttccaagagtagatgttccgacttggttgctagctgattcgatacatgatgggtttccggaaaattccatttctcagctcggcgttctattcaatgtattacagggtctactcccctgtgtcgttccctcagaaatgggatcctacaggtcaactcgttagactgtattgtcctgaactgaaggactttccagacaaagtatgtgaatcggccgtttgttcttgtttgttctggtcatctgatagattgatgcgccgttctgattgatattcctgatatggccaatactactatgcagtatatctacgaaccgcacaaagcgccgttatcgatccaacagaaagctgtcggtgccgatctttactgttcctcgttcttattaatatttcacactgatcaacatgacaccttccttttgatcattcattgctatcttagaactgtgtcatcggtgtaacataccctcatcctatccttgatctcaaaacatcccaagcttcgtgtcaacgactcatgaaacaagcgtatgacgctaacctctacggaacctcaccggctgttctggatgggagtgctcaagatttgttggacattcgggcgaaagcgggcaagacggcggcggatggagatggaggatcgacttttaaagaggagagcggtgtgaagtcagacaaggccaagggagcgccaaagcgaatgaacccgttcgagagggcgaagatgggttctacagcatcgacggtcaagacaaatgatccggctgttaagaggaagaaactttcatgaagagagaagtctcgcaaagaagattattgtcttctttatcaagaagatgtatcatatgtcttacatgcactgtcttatttcagataactacaaagcgttatatgatctttcttcgatcttagtcaagtctttcaatcctgactgagcttcttcaaactaggatacattgacagatggatatgagctatcattcatgaaaagacacggacttcaaacagaggcagattgaagcgtgaaacgatggagaggattgaaggtcatgaaaactaccgtaacagaggatgaaagattgggaaagaagagatacagatcgggcgaaggtgtttacgagatcatcatgtgaacaaactcctattgaatgagaaaaaagagaaaaaaacaatatggaaagaccaggtcagacgagcaaagccagactaagtgttgtaaacgagacaagcaacgcacattgtagttgatctggccatctccgtcgatatcagcctcccgaatcatctcgtcgacctcagcctgcgtcaacttctctcccaagttggtcatcacatgactgtgtcgacgatcaatgggaatacatgagcgcaagatgaatagagtatcatatgtatgctctggttcagcatagatgaagacgacgattacaccaaggttgaatgaaaagacaacacataccgaagttcagcggcagagatgaaaccgtttccgtctttgtcaaagaccttgaaggcctccttgatctcttcctcagaatcagtatccttcatctttcgggctgcatatatgacaaaacgacagataggattagggcgctgcaggacgagcgatgtcaaagaaaacttgatcttacccatcatcgtcaaaaactcggggaaatcaatctttccgtttccatcggcatcaacctgagacagcgatcgtgtagctcgatgtcagttggaaagacttcaggggatggatggatgggtggcgtgtgatacaatagagtttatggatgaaactggaaacggcataagagaacgtacctcgttaaccatgtcagtcaactctgcctcagtagggttctgtccgagcgacctcatcacggttccgagctccttggtagtgatggtgccgtctccatctgtgtatcgggcagcccaagagtagatgaaacgctggtcagaggattcgcgttcttcttgtttgtatgtctcggcggacgcgaatataaaaacaagggactgcggactaggaggttcactgctcgtagcgcaacagaacttgtcgagccagtttcaaagggctgtaggatgggtgtcaaacccggagagagaggtgacttacccttatcgaacaaggagaaagcctccttaaactctgattggaaggaaaacatccagatatttgtagaagccttgtcagtactcggtgggctgagacgacgaacaaagattatgacagtgcaggcgacggccggataaaccagacaaggacgaaccagcaatttgctctgcgttgagatagacagagtaaggaaagatagtgagctaggagactgtatcatacaaagatcggacaacaaaccaagtctactaaccctcagactagcaagagtacaaattaaagcaagaagacaacagagtataggtggtttttcgatagagatggggattcgagacgaaagagaaagcagaaagcagagatccggagagtcaactttatattctaccttgacactggaattaatcacagtacgaccgatcccagctagtcagactctgtacataccaaagtatcagccatgtcgtattattattgaaaagagtgtatgggatatgtgtgatgtggctgtcacgatggtaagaacagaagaaagaacactcaaagatggatggaaccatggggtgtgccagtggttacggcttcagcagagatgagcttgcatagacaggtaaatgaattatgtaaaatcagatactttgtgaccatgcgctagaagcgtaagcggttaggaatactgtcaggggcggaagctgggattgataatgggagggttacgagaagagtaaccactcaatgcttttgtgtttcaaaggagagaggctcaggctcttgggattgggatgaagggctaatagaatcactagggccaaggacaggggaataacggcaatgaagcaagggcacagaagcaaggaaggttggaagcagaagtaacaaaggattcaagtttaggattttcgtctacaaatcgtcgagaacgcccgtcctgtatatggtccccagaccctagaagcatggcacagaacatactacagcgcaaagctgcgttggagacacgaggatacgctggagcgagcgacaaagaagaagtagagggttgagagatttcgcgtcacagctgacgaacacgtgtgatcaaggttacatctttgatatggttactgagactggtagctgtcgaggaaagtccaagctcaggagtttaagcttccaggtctggaggaaacaaggatactcgttatcaagcaacagagctgactgatagtaggtactgagctaaggatcctagcttcaacaaccacgtccagcagagcgcgcaagtgtaagaaagaagaaacatgacaaaacggaaaggcatgatgaatgataaaacaaggaaagcggtcacacgaggtgtattacctaatcctgattcataacataaaccactgagattcaaaaaaccagcccttaattattttccacctgccgtcgctcgcccgccagtggatttttttcttcttctttttctcttctctcctttctcctcaagacaccaccttcacccagtaaaaaaaatggtcagtgtatagattcagttgatccttgttctgttctcacatgctgtccgtcactagactggatgagcagagtgtataatgtgtgctgacggctcctttttttctttttttcctttcgaatggaactgttcctgaattcgtcgtctcataattctcttttccttctgtccaggcccccaagaaaacttctgcccctaaggacgagaccgtcaccaccatgggaccccagatcggagccggagagctcgtcttcggtgttgcccacatcttcgcttccttcaacgacactttcgtccacgtgactgatttgtccggaaaggagaccatctcccgaatcaccggtggtatgcaggtcaaggccgatcgagacgagtcctctccctacgccgccatgttggccgcccagaagtgtgctgagcgatgcaaggagatcggaatcaccgccctccacatcaagatccgagccaccggaggaactggaaccaagacccctggacccggagcccagtccgctctccgagctcttgcccgagccggtatgcgaatcggccgaatcgaggatgttacccctggtcagtattctcatttttgccttcttgtctctttgcttggtgcttaccttcctggtcataccttcaattcaacagtccccaccgattgcacccgacgaaagggtggacgacgtggacgacgactctaattgcctttatggcaatacttcctcgcctcccctcgctttcccacggttgggctctcttccctccatcggaggagatctcggtcgttgcttggggtttctttactggtcgctggccgctggcttaaatcccaggcgtgcccccatgttcgctatttaatggtgtcccaaaaaaataatgatgaaacacgtgacatgaatacaacacacattaacaacctttcggcgggttcaaccattgaaaacagtagtcttttcagaggacagcatgatttaagatgggtcagatacaacattcgaaagaatattgatatgatgcagaagcagacataacatgacatgtgcagaagacggccgttcgtccatcgccgacgggcctatcttagttcgtcgacgtcccttccgatggactttcacctaggatcttcatctcaaactacatcacttcattctctttggctttctcttcttcgtctactcgtgtttcaccttacgttttgccgacgatctctgttcatagcgatcgaaccgtacccggctacctaaattacttccttgatagatactcgctctggcgacccgatccaagacatatcggcctcagagtcaacatcgtcaacccaccaccccgtgcatatagttgtgagttctctctgctttctttgtatcttacggagttcgatattttactgaaaactaggcatcaacggtcaactcttcggtctttcattttctgtaatctatcttgtgccgaaaaaacgaaagtatgatggaagatgatccttggtcttcgtcctccccgtgggacgcgccttcatcgtcgtctgcacctcctttgccagcatcctcttctccaacacttcccagctcctcaggaacacctcttaatacgaattcagaagacgacctaggtaaacttccatcgatcgtttccagtgttcgacgtccgtctgctgactcggatctatggggtagtggcggcggcggaggaggaggaggagtttgggggtcgtctcaacaagatgaaggaacagaatcaggaggcatggacgacggtggatgggggagtagtttggagtatcaacacggagatgtatctttaagagcttccaacttggaggatgcaaaagtctccaaagaagaagaggaagaagatgagatgatgaagcaagctgatgatggatttcaaaaacctaccacagagtcagcatcaccgtcagcatcaccatcaccgtcgccatcaccatcatctccgcgaccatcttcccttaaacagatatcttcgcctcccatatcatttccttccagtccgtacccgccttctgtgtcgttctctcctcctactgagcccgagatcaggccagaacccgagttcgaattcgttgatctcgcgacgaacgacttttctcgtccaatatcccctcttccagcacatgacattccttcgaatacatcctttgatgatttcggtgactttggagagtcatccggggctatcggacctgatatagctatcgaagatgatccatgggcggtacaaggggggattgatcatgagcaagctcaatcggaagaggaggaagagacgtctatgccgaacaagggctggagcgcgccagcagacgacgatgaggacgacgcatggggagcacgcaagaacgccgaggatggaggcgagaccgcgaagaaagctgacgagtgggagagagccagaagactggccgagagaaggatggcgagagcggtacgttcatataactctcaactatctgttcatggattggctttcgatcgttcgactttgatggttttcactaatatcttaccaactctctgtattcatctatattctggatgaaactttcttcagcctcctcacgttatatccgaattgaccgagaagtggtctgttctcgcgcgcgatcgataccctgatccagacaagaaaacagttacagaaggagaagaaatcgaaaagacagaaaaggaagaaccaattcaaaccgaagtggacaagtatctcgatgtgagactagcaaatatgaaggagatgtaagtgactcgtggatctgaaggatatctgtttgctatcggttgacagctgaaaggacgatctaaatgttgatgaaataacgatctctctttctgaaacagcacgaacttgctcgtagacctaactgatcttcctccgactataacatcattttccaaacctctttatcgtgcatcccttaccgagcgccgctttcgagaatctcttacccggtctagtcgactatctaattctacatcacttctggtcgtccctcgtcgattgccttctctaaatacgacctaccaaagtccctcaaccaatcaggattctgaccgtaatactggcgatagctgggcgtctcgatctagactgggcgaaccggagaacgccgaggcaacgatcacagaggatgagcaatcgtccagaagaggtctacttagcttctttggacggaaggtcagtggccagactacgccaggcatgggcaaacggagttcctctgtttcaagtctggccagcttcagttctcctcctagcgaagacgctacaaaagttcccgtcacgactgctatcaatccttccaccacatcacttccagtttctcagccggtcaaagactcccttgaacaaactcgcttgcctgttgaccattctcctgatacatacaagccagcaacacctcggccctcgctctccactcgaagttcaagcctatctttgccagccgtttctgagctagctccgtccggctcaacgaaaatgagtccatcgacttctgtcgatagcacttccgccacttcggaaactcccggcccagtggctccctcggcagtctcgagattccttaaccgtttctcgagaaaaccacctgctcggaccacagacggtccacgcgctctcgagctttcggctggtgactttgatttcttggcagaggtcgaaggaatagaaagtggagaagatctcgatagcgatttcttgggttcatttggcgtgccttccgactcttcgtcgtccgtcggtggactggaagacttcctgaaaatcaaagaatcgaaggacattccgttaccggctcctctagccccccctcccagagcctcagaaccaattcgtttggactcaactctcggcgcatcggtgccaaaaacattggaaacgccaatggacgaactagactttctgggatccagtgggctacaaagtctggaaggatctgctaatggtacaaacaaagtagccacgtttgtagacgagtgggatgatttcctctcggatcaacagatcaaacctatggctgcttcatcgatcataccttcaatcacaccgtcaatcactcccagttttgttcttcccaaaccaccctcccttagtgtaaccacaacgttcccttctcttacaccttcgtcacctcttgtaccttcgcgaccgccttcgacatctattcccgctacgaccgttcggtctgatcctttctcgtctcattcggtcactcctacagcccctgtccaaccgatatctgcatttactcagccagtctcatctaaagatgggtttgcagacgaagatgatttcggagacttcggagactttggccagtccaccatgagtgctactgattcaacttttcaaccgtcttcgaactcttttgacgactttgacgacttttcttcgttctcgcccgcgtccactcaaccaccagcagctcccccgcatactgcaactatcattccttcaccgctctctctattcgcacaatcaccgatcaaacctgtaaggatcagcatgttgacttccgaaagtcctccacctactccgatcaacaaatccccaagacatcaacgtagtgaatcctacgctaggagtttcgaagctaaaaacgaccgtcgaaaggtcgaagcgaaaccagccactctacctgccctcctactaccaccgccttcctcttacagctcaaaaatatctgcagcttctctaatggacgattcgttgtttgagaccacagaccatatgagggtaggacaccccgttgccatcccagtttcacggacgtcgacccccatcacagcgccctccgctgcgtcgccaaaggagccgactcgcggatcgacatactcacatggagcaacctcgggttctgcacgatcgataggctccatgtcggatttgctcatcaaagcccaagaagtagatgtcgcgaaagggcattggacgtacacaggttctacgagtcccccggtcatggctttgcctcctcctccttccatgtctggatctagtgtaggaaccggagcaagttcgccaggattcttctctcaaggtaatgaagacaaactgaatgggttcccagtacttggagggatggcgatcagtgatgccgtaggatcagccacggatcgagaaacctcaaaaggaggactgtcacaagccgatctgagtttttttgatggattatagaatgatcctcgtgcttccaaatatgattgttcaagcctcatcctatagacgtttgattcatattgagattatctatattgaatgattgtttgttgagaagagagctctatttcaaaatatctagatacgtgctccatctatcccgactccgcgttctcatctgttttcaaaagcagcaacatctattcctactcctcgtccgacttttcccattcatcgtcgtctgtcacaggtggaggccggtaaacctgaggaaccagcgtggtcaaagttgatggagcctgcgacaaagtcaatcctcccaatgactgtctaacgacatccgcagaagcggtagtggaggctgcaggcacggtttcgttgccggtgggtttcctcagggcgggaggaacatatggtgaactggacctcgagatcgtagctggcgtagaaacacccgaacctggtctagaactcaacgcagaggacgacgcaaggactgttgagctaggtccggctgcaatcggggttgccccccatggtttaggtttaggggccgaaaccgaggacgatgaggatgccgatgcgaccgtggagttggcggtggaaggacgcaaagtggtattgagaagtggctttcgaacttccgttcgtcgagcagattcttgagctatgtaagcagatagaaggggtgaaggaattcgactgtcgatcttccttcgcagttgaacgctgtaaatccataaaccaaacgatcgatcagtcaaaattcgggctgataagggtttactgcaagtcgagataagtcaattacctgcgaacgggatcttgatcgacaagcgtggtctcaactcggtaaagctctgcaacctggatgaccagatctctccgagcaggcggcatgtatggcaagatttggttcattctcgaaccggttacaaaccttatcagagaaaggagatacatgtatgaataaattagtcaggcgtccataaccgattccgatggtaagaaaaattacttgctcttccagcgccttttcgaccaaaccgaggaaagcagacccatgggttatcgccaacgaaaccacttgagcgggccattctactgcgttattttgcgctgctcgggttttgcttattcccaaggctgcagcgagcctttcgttccgtttcgctttctcgcaagcgtcaatgcatcttttgtaagaaggaaaatttaaaaatcagtcaacttttttggggacgatatgtattgcacgatgaccgaactcacttcaagacgatatcttctcgagatgaactattggaaagacaagccccacatgtcgcttgctgctccattcgaccacatctatagagtcaaaccacaataacagggagaatcctcagtgtctattgacgcgttggagcggcatcagagacatcacttacgcgcaactctggatcaccgtgctagggcaaggttcggattgatcgcaggctgccggagaatggcaaggtttctggcaagggtgaccactgtacgaaaccgatcgcaaccatgacggattaacgaaaacaattctgaaagtgtattccatcaattgggacgtaccagatcttgagtggcttcccgcaaggtttcgtgcatttttcacattcgccaggagagtgacacggctatttaaaagaaacgtatacatgtttatacagtttgaaaagaacattatcaacagctgttgacttctgtaagagatcgcgagagagagcaagagaccaacagaccttttcgcaccgatgccacccacaacccaagatctctccacagaccataccgcaagatactttctcctgagagcatctcacattcttgacttcagcctttccgcaagcgcatgtcttcgtcgtcaagaagatacagggtgggcaagtcgatgtttcatggcaagcgtgggatgccttaggatgaccacacggtggagccggtcgagcacatggataagtgcaatgaagtgtcttcccacaagaaatcggaggagggataaccgttcgcccacagttgcaaatcaacttttgacaggaaagatgaagaaggttagtatatttgggttatattaaccatcgtagtatcgaaatcagggacaaacctcgtcatatgaagcttccaagcacggcgggcatcttcctgtgtggtccggagcggggcatgagtggttcccacagctcaacatcttaccacacaccaactgacactcgtgccatgcactctcttcctcgtccccagcgtagagatccaactctcggcgtttacctttggactttgctttccatgccagggggcagcaggctcggccgcattcatgttttttacacgaccgaagcaccctacacactcgctcacaaagaatttcagccgaggcggacaaggatgtctcttggaacgtatgacattcgagtgtgatctggggtgatcaagaaacaagatcaaagtcagcaaacaacgaagctacgaagacgaacgaaccagatgagaggacgagaacaaaccttagattctgcacaacggcaaggaattacgacctgttcttcacaaggcatgcagggccctgttaatgatatcaccaaaatgtagacagcaactatcagtacattgctctcacaccgttgtcgaacagaaggaaggaagacaaaccgttatggcagatcattttgcacgtatgttcacagccatccaaactcttgccacaaatactcttacacgtcttaaccgggtctgtacatttcgttctcaacccagtatcattcggaaactctttgagatttttagctccgcatggacaactccagatgatctttggactgaaggggcataagtttggatcttccgtgccggtgcgagaatcaacttgggatgacggatgaggatggcagggtaatgaacattggtgaatgccacaatcatactcctgaaaacaagtcaaaagacaagaataagagccgagccacgtcttgtcaggtgatgaacaggggatagtggtggaagaagaagacccgcaaggcgcagaacgggttgaacgagagcagaagcaagtttgctcctcaagaattggacaaggcgcacaggggccggcatgacaaggttcctgtgagaaaagatcaaagtccaaagttaatgatgacgatatcgaggatgaacaaatgcaacggaagaacgaaccaagcaaacatgttcagcatttccgcagccaagttgcctcttgcacacctctccgcaactagggatttcatccttggccgctctatgcgagcatctgaccataagcgaggtctgatgtgatccgcaaggaagcatcatagataccgaacaaggtctgtaacgatggtcgtataaacctaaccagcgattagttcacagtaaacaagacagtagaagaaagaggaggacgtacggacacgggccagggtgacagctcaatggacaggggtgatcacatcccatcttttttcgagagcatgactgagcacaagagtgtggggtgaacaagcgaggtggcttagggtccttgatagcccgacagtagcattcgtatcggtttgggacttgtcttctttgcgtctacagatagccaaaagcgtcttccgttagtgatttcgaaactagagataccacaaagatattgaacaatgatagaagatgaatcgacgaacctgacagcctgggcatctccaaaccgggcttccttcctttgctggattcgcagcgaagtccttgactgatcgagaggcccaatctgatatacatttgaggtgaaagattccccagcaagaagagcttccagcgagcttgatttcatcatccttgatgccatccaccaggtgatcggagggatgctgagaaggcacacaagaccagataggctgttcggcatgtatggaactataagatgcaggaaggtgtcagtgatgtgggagtgatgtgggagtgatgtgggagtgatgtgtaagaatgtatggttgcatagatgtactgacttgaagcaaatagcacaatcaggccagggagggtagctgacggcccatgtcaacctggtagcaagatcctcgtcctctgccggctgggggactttctcacggggaggtccccgatctctgcgctgtcctccattaccccgtccattgcgcgcagggggttcgttgctagcaactgaggtggaaggacccttgggagctcgttgacgagatcgttggttgggcttttgatcgttgtcgccagcgccaccaccaccaccaccaacagattcagatagctgacctccaaacccagcgcgtcgacttgattgattcggaatttctctagaagtttgaggagcctggtctcctgtggtaagggaagcctgatttctcgaggagccttctcctgatgcggaattagctcctccacgaccagatgatccacctcggccacctcgggaggatgatcctcctcgacgagatcgattggagtttctagggtttccgttagctgcaggagtcgcttgaggagcaggaggaggaagaatcgatgccatcggtcttgtgttcgatacagacgtcagtgtgtgcaaccaagcagcaaagattgtaagagagatgaccaaaaggactggtcgatgtgcgaaagaagcgaaagttgttggatgagtaaaagtaggaagtggcgaaggtgagtgtggaagagcacgccacatttgataaacacgtgatgttgtgtcaaaagtcattacaaagatttatagtcagcacaggttttgtcgctaatccctccccctagtcttcaccgcccagcctggggtttttctccttccactctctcactcaaaacgatcatcccacaaagtctcatctttgttgatctctcgatcctttctgtctcttgtcataaacacatacatatctacccatgtccacagatcaggacgagccgcaaggacgtctgttggactcgttcactgctccaaaggtacgtctgatgattcagtccgacatcgttcaatgttcttttactcatctgttcatgcgtgtttgttcgtggcctgccctctctcattcccttcattcgattctttcacaggatgtcttggaggagtttgcagagatgaacgaggctgatgatgtcgacccttttggagagacagccaaggctcgtcaagtgtctgccaggcagaatgagtatcaacttcgaaggttcgacagagaagagggcgtgactcgtaagtctcttgatcattcctttctatcttcacacccgaatttactcatcaagcaactcctgtttatcaccatatgaatctacatacaattctccgcttcttcgtgaacactctcttctcatgaaacccaaggttcggatccgtttgcccagaatggtgaaggctccggtgaatcttacgccgagaccatgcgacttcgaaacctcgaacgagatgagcagcgtgtaaagcaggcgattgctgataaagaacgtcaagatgctgaggaaggaatcaagaaggtcgaggacgataagacacctccccgtggatcagtcactgtggcaggagatgacacgcctcctagttcgaccgccaccaagcgtcgaaggtgggacgacgcgcctgctggagctgaaaatggaaaggatgcaccgacaggcgactggtcgacttcagccactgctaccaatggtatcaatggtaccaccgcccaaccggacgagaccccggttgttaaaagaaaacgatcgagatgggatgaaacccctgttgcgacttccgccgttgcggaaacccctaccggtagacgttcccgatgggatcaaacaccggtcaatggtgctacccccgccacaccagtcgttcctgttgcctcaacctcatccactccctttggtatgatggccgaagatcctcgtaaccgatacttgtctgacgccgagttggatgtcatccttccttccgaggggtacgtgatcgttgagcctccaccaggttatgctcctgtccgatcttccaagcttggagccattcccgtcaacaacactggattcatgatgcaggacgaggcagctgccaaggctgccgtcgatgccgctggtggatatgctcatgacgtgccaactgagatcgctggaattggttcgctgcagttcttgaaggcggaagatcaggagtatttcaaggatgtgctcaaaggtgcagatgatgaggatggtacattgacggtggaagagctcaaggagaggaaaattatgcgattattgctcaaaatcaagaacggaacgcctcctgtgagaaagtctgctcttcgacagattaccgacaaggctcgagattttggtgccaaggcgttgttcgacaagattctaccattacttatggaacgaacactcgaggatcaagagcggcatctactcgttaaagttatcgaccgagtgctttacaagctggacgaccttgttcgaccctacgttcacaagattctcgttgtgattgagcctttgctgatcgatgaagactattatgctcgagtagaaggtagagaaatcatctccaacttgtccaaagctgccggtctagcccacatgatctcgacgatgcgaccggacattgatcatatcgacgagtacgttcgaaacactaccgcacgagcgttctcggttgtggcttccgctcttggaataccttctctcttgcccttcctcaaggcggtaagcaaatcgaaaaagtcctggcaggcccgacataccggtatccgaatcattcagcagattgctattctgatgggttgcgccgtccttcctcacttgagaaacttggttgactctatcgcccatggattggaagatgagcaacaaaaggtccgaactatgactgctcttgctctggccgccctggccgaagccgccgccccttacggaatcgagtcgttcgataacgttcttaagccactctggcttggaatccgacaacaccgaggaaaaggtctcgctgctttcctcaaggctatcggattcatcattcccctcatggaccctgagtacgcatcctactacgtcaaagaatgtgtgccaatcttgattcgagagtttgcttcggcagatgaagaaatgaagaagatcgttctcaaagtcgtcaagcaatgtgcagcgacagagggtgtcactcctgcttacgtccgagaagaaattctccccgagttcttcaaggctttctgggttagacgaatggcattagatcgaaggaattaccgatctcttgttgagaccactgtcgagcttgctcaaaaggcaggtgtggcagagatcgttggtcgggtagtcaatgacttgaaggatgaaagcgagccgttcaggaagatggtaatggagaccgtcaccaaggttatcagtactgtcggggcggccgatgtggatgaaaggttggaggtcttgttgattgatggaatcatctacgcgttccaggaacagactgttgaagacaacgtcatgctagatggtttcggtacagttgtcaacgctcttggttcgtccttcttctgcctttctcgttctctctcagtggcgtttgtagatgctcatttctttcttgagctttgttcttcgcacaacaggaattcgagtcaagccatacctcacccagattgtctccactatcctttggcgattgaacaacaagagcgcgaaggttcgacagcaggctgccgatttgaccacccgattagctatcgttatcaagcagtgtggggaggacgctcatctaagcaaggtccgtgtttgccagttttgtacagatattagtcaacaattgaatcatgggctgatatcgcatcatgttttggttgatacaatagttgggagtagtgttgttcgaacagttaggagaagaataccccgacaccctgggaaggctcgttatattccttctcgcaatatctcgtattcttcaatgcgctgacattctatcaaatcgatcaattcttgtatccttagtatcatcgccgctgagacagctatcgccaacgtagttggtatgactcagatgaacccccctgtgaaggatcttcgtgagtttatttattcgaccagctcatgttgagatcaaccctgtcatatgtattgacccttcttttatttcttttgtttcgcagtccccagaatgactcccattcttcgaaacagacacgagaaggtgcaagaggcttctatcaacttgatcggtcgaattggtaagccttgtcgagttatcgtcttttttcaacgtggtaactctacgtatgtatcatcctatctcacacaatcttgtatttacatacacaacagccgatcgaggagccgagttcgttcctgcacgagaatggatgcgaatctgtttcgagctactcgatctattgaaggctcataaaaaaggaattcgacgagcagctgtcaattcgttcggatatatcgccaaggcaatcggtcctcaagatgtgttgagtgtccttttgacaaatctgcgagttcaggaaagacagagcagagtgtgttcgacagtcgctattggtaagttgggcttctttatttatcatatgtaaatgcccacttatgcttacccgacattctttgaatattcacgctcgatagctatcgtttcggagacttgtggaccgttcaccaccattcctgctatcctcaatgagtagtacgtgcctaatatgtatctttacaaagctcgtccgacgttctcgaactgacctttatgctttttgatcgaccattctcatagccgacaaccggatttgaacgttcgaaatggatgtctcaaatcgctctcgttcgtgttcgagtatgttggtgagatgggtaaagactacctactctcctgcatctctctccttgaagatgctcttaccgaacgagatgccgtccatcgtcagactgcgtctgccatcgtcaagcatctcgctcttggagtagctggattgggccacgaagaagcgttgacacatttgctgaatctggtttggccgaatatattcgaaacttcacctcacgtgatcggaggagtgaacggagcgatcgaggctttggaagtcgggttgggaagtggagtgttgatgagttatactctccagggattgttccacccggcacgaaaagttagagaaacatactggagactctacaatacaacctatcttcgttctcaagacgccatggttccgttctatcctaacctcggacacctttctgagaacgaaaatgactatcaacgacatgcgttgtactctttcctttgatttttataaacttgttccactcaatctgtcttctcttggcttcctacccttatctcttggtgtctcttctatatccctatttcgaggagggaaaaaagttctcgtattcatagtatttagcatggccttgacttgctcccgtctcttggtggtctgttgttctctgcttctgcttgggaccgcccgtctttctaaaacaaatgaactgtcactttgtacttttgtgaactggtttcagcaacccacattgataccagcacagacataaccctttagatctccctctgatgcgctctcaaacccagaccaatagacccatcaaaaagatttgagcgatagctatgaagatcaaaaacctcactcttgtcgttctctgtgcgtgtgtgggagaggtacggaccgacaccgaaacaggtgcctgggttgatgacggatctggtaagacgacgtatttgagtgaacgaagctgattcgatttagcagaatgagggggggccgatgaagaagaagaaaaaaggaaggtgagacttgatgggatacatctacagatagatcaagaggagaagagaggtgatgacatacgaggaagaaggcgttggcggaaaccatgtacaaaaacacactccaccagatcaacttcccgaagttcatgatggagacgagcaagcacaaaatgactctgcaggtgatgggagtttttttttgaaacatgaattcgtcaaactcgatatacgcatgcttttcatgatagagtttgatgatatgacttacccaacgaatttgtaacctccatacattcccatctccaagcttccccccacgccttcaccacctccaccctgaacgtccaacaaatacgtacccaacttgatcactagaaactcaagaaggacgactccgaaggcttttgaagcggtgacacccaatacttcgggatggaacctgttatccaacccagagtacagcgcggagagtaggatatacgtcacgagggacatgcctggaagttcgtcatgagacaaacgaagcggaggagaagatcgcagtcagaatgaagacgcattaatgagaacaagtgagagagaggtcaacagagagcatacttactcgggatatagaggtcaggagcatttatgtcctctcttggaggaaggtacccttcggtggaaccgtcctgcgaaagccgtgcctgcagaggagatctggcatatcagtctccgcgcctgaatcgtgctcatgtacactgtcttacggtcgatatttagaggataatatatatacgaactgaacgagcgaacttcccgtgtctccacggccataagagaataccaatctttttgattacatacccattcgtcacagcgaacgagtgtttgagcatcgacataggaagatgtctagcgaactgtataacgtagatagttcatgaacaagaaagcgattcggtgtttagctaattgcgactgaagagcagatggataaacagaaagatgaaatccgagactgactgtcttttcgacataatcttgtccggcgccgatggcactctttccaaactgcattcccatctgggctgtcgcgtcattcatacccattccccatgggacatgggagccggaagctgtctggaaagaatgtgactgtctagattgcccttgcccttgagaggacatggatcccatctgaccggcaggtggaaaggaggaggagccagccgagggctggtagccatatgctagattgatcgtacgagttgcatattgaggtgatgacagtagggcgtcagaagatgtggtgaagacaagactcgaacaagagaaacgggaaaagaaagatctaaccattttgcccgtagcctgtctgagccgggttctgctgctgcttctgctgctgttgttgttgatggatacctccaaaggtctgttgctgctgttgctgttgctgttgatactgttgcgctggaggactggagaatcgcatgtactggggctcgcccgacatgccttcggttgaggtccgctgggagggtaagctgtattctgtcgacgaccgtggtggctctggaggattgaacggagctctaggaatcgggtgttgcagaggaggaggcgtgtagttcatgatgtatgagtgctggatagatgatcgtcgacgtaagagggaaacggagagaacgagatggcggttctgtggagggactgacgaaaaaaaagtgataggacattttggagctttcttgtaatactcgattataagagttttgtagtctttcctcctatcatccatccatccatcaacaacaccatcgacgacttgcaccttgggccaatactttactcttcctaaatctctctcagccgcaactgaatgtcagactttgaggcaacagaactcgtggaggcatacggtgagatctcgcgttatccagatcatcaagcatgtctattgggatgaactctgaatccatcgctcatccccgatctctctctttcggtgggaaacatagactttctactgaagtttatcgtcattggagagggttcgtcttctttctattccctgtttggactaaacttgcaaggatcatcactcgcttaccgttgtgtgcttcttcaaaatgactttcgacagccggcacaggcaagagttgtcttctgcatcaatttatcaacaatacctgtaagcaatttctccttgatgtgttcccgcttgaaagtccatagtcggatgcataacagactctcttgcctttctagttaaagaaaacagtcaacatacaatcggggtcgagtttcagagtcggaccataccaataggagagaagcgagtgaaacttcaagtaagtctccactcgccaagccaacattgtgtcgaacgaccgcatcgcctggcgaaaagttcttggagggctgatcgaattacttcattcatttcgtttggaacgaatcagctttgggatacaggtgagtgaggaagatgatatgttaatgcatatgctcctgtatttgccagcgatgtgttgatagctgatctctttcctttggttggctgaataatcgatagccggacaagagcggttccggtatgttcagcttgctttctttcctttcacctttttgaccggatgattcttggtttgaaccggcttgctcacgatctgagaactctaattgtaattgaccagatctgtgactagatcgtactatcgaggggcggcagctgccatcttggtgtacgatatcactcggttcgtctccgctatcatatatcctgtggatagcgagtgaacatccatcggaggttataaccttgttttatgacgatacttacgcttcaggtcatgcttctcttctttttcaccttcttctttctatcgttctcgcagtcgctcgtcgttcacaaatctgtctcgatggctggcagatgcgcgcgctttggcgtctccacatctgaaggtcgtgctcgtcggtaacaagctcgatatggaggaagaaagggaggtcgatacgttggaggcgtcccgttgggccgaagagaacgttcgtctaatctctcgttttaccgtttccgccattcttcctacgcgcttgagattaactatatttgtttctgcctgtgatctaaacacatgcacaaatgaaggatgtgattcatctagagacatcctcgctgacaggcgcgaatgtgtcgactccgttctttctcgcatcacgttctgtcttgctggcgatcgagtctgggaagctcgacccggagaatgtaggcaccggtgtcagttatggagaacgtcagctgagaagctttggaagttccagcatgttgaagggaaagtttggaagtcggaggaagagtgtggatctgggagatctagtaggtggacggaaggggagatgttgttgagaggtgctcttcgatttctcttctcttcagagtttcttctttctctttctttttgtttttctttgcattcgatttcttttcttctcttttctttcggtctcctttcgctgtaactaacatcctaaacatcaactcatccactcattctttcttctttctttctcgttttttctttctttcatgatccttataacgtatacgcatatacccatctttccgttcttttctccttctcttttcactgattattctctcttcttaatccgtcaatctcttttcctcttgactctcgtatacgttcttccaatgctctccccacgggtcgagctctttgttgtcctgttctccttctttgtatcactttgtacctcgtgcttcgtacgaaccatgatttgactgagctttggcatttctttttcttttctgaccttcgtcttccttcaacgattcttggacaaaagggacggaaacacatgctgataaagctcgaggatgacgggggaagataaaggatagaagaagcagaagcggagtggctctacttcgttttagatcggtctacattaagttcccagggattaggatgtctacagatgaaacagacggacggaagatagataagtatataaacaaggatgaagagggcgattacagaaggcaagtgatggatggatggatcgatcgatggatgccaacagagaaaaagaaaaatagtattaccgaaatcaaacacacacgcacagtaatgaacgaaaaatatacaaagacaatgaatgagaaacgttttcctaaagatatacaacgatgatgtaacaaacaaatagatgatgaagaggaaaagaagagaagagaaaaacaaaagagaagaagaataaagcggtatgcacataaagcacgaaacgcaaagcaaaggcatgattgcgaaaaagcacgcaaacacagcctacctactgtctatctcccaacgaagacgactgttcctcaactgtttggttcctctatcatgcttccaaaccaagatccgatcccaactcttgtgacctttgcctttaaggatcttgccctgtctgatcatctcgagctggacgacgaatctgacgagagcgtggggtttgagcgcgggaaagcccggtcggaccacatccttctgagctgtcggaccgggggagagcaacaagagtgggagtgaagaatggaaggattcttctggatcgaccagcctggatctagaggtactctgtgaaggcacaggcacgggcatattgacgtttgaccttggctgaatggcagcccaggtagaagatgcggatggcgaagcgaacgtcgaggcagaggcagaggggatggacaatagtttaaggatcgaaaggtaaaacaggttttgagacccgccggtttcgacttcgcttggtcggaccaccagaggtgcgtacttgggtcgagtgatcggaatgtcagttgccatcttcgtcatcatcgtcgataaggtcggtagagatgagctgcccgtcaagggacatttaccaatctcgactgattctctcacagctacttcacttctcagtcgaggccgagttgttgaaggttgaatggactctaccgagaaacgcctattggtggggatgaagcgtggatcttggagccgacggttgattgcgttcgcaaacacctcccgctttcttgcgctttcggtctcaccgagagcagatgaaaagccatgcggatcagattgatggggtgagtcgagctgggtgttggcgatggcagtaggggagtctagagaccaaaagatatcggtaccttcggtagagctatcggaacaagaacttccgacaacgctattgtttggatcgtttcgggtgttgttgtcgtcgtcgtcgtcgtcatcgtcgtcatcattcgagcttggtgtgtggacttcagatagatagctggacgagtcaccggaggtggagaacgaccgtatggaggaaggcgtccaactgtgggcaagatcagacgttaagggtgatcaagagaaaggtgatgataagagggcttgaaaagacgaacctgtatgatgtcacagcatacgtattcgaaggcaaggaggaagagagcaagatcgagacaagacccggggtagacgaccgagctttgaggttgttgacgccgtcgaaacttgtctggggaaaaagcggtggccggtggggggtggaagtaaagtttacgcggacgggattgtgacaagaatgatccgaagaggaagaggtgagcggtgccgagtccatgctggtgcaaggcgatgcagcccgtgctttacctctcagccgtagtgaccgaggttgatgaaggtggctgtggttgtgaagatgttgacgttgatgttggtgttggtgttgacagcatgggttccgctgtcgacagcgattgcagcagcaaggcccggtctgacaatgggatgagttgtgggcggatggagaccaaggacgataaggcgaccttcccttccgatgatcctctatggtcggtatgattgatagcgatgtatgagtgtgtgtatgggcgtgaagatgctcttgtcccggtatgaatcgaggttcagagttaggcaagaaggatgatgaagtacaagacgatggacgatgaaatcgatcactctgtttgaaggtggaacaccccacttgatcgagttgcgattgcaacagggagctctgcaccatcaggagaaagcaaaacagaagtcgacgtatgaagcagatgaacgaacgaagagaaccagcaactgtccaccagacaacgttctaagatacgagggatgcggaacacaagcgcacaacacacatccacagacgacacacaagacgctaaaggaataatcgataaagatatgacatatgggtccaccgttggggcggtccgtgcgggctctcggcgctgaaactgctgcgcgtggcttggtaggcaaccagccagccagcctccatgcggcccgctccgggagcggccgacaaaggtggtgtatgtgggctgtacagtcgggtggcgtcgtagcccgggttcgacagtggttcggccacgtgatttgactcgctttatctctccttcggtctctgaccgtgccgatggacgtcatttgactatcagccctctttgtttatctttattttccctgttttttcaaagcattcgttgattgtatatccggtgtgtctatcggacttcactatatgcaattctctatcgactgctccgtgcactacgatgataattacgcacaagctagcgcattttgaactaattgaaagctataagccttaggcttggtgagagtgacctgaatcgatggtggtcgatacatggcccttttagactcgggtgtcctcagaccacaaaccaccctaaacactatgggctatgggctcagtttgcgcccgtcgatggagtagtatcagcagcagcggcaaataccagtactaccgatgagtattcaacgcggatgattgttcatagcaccccgacttctttgtgtcttataagctgtagagaccgaagcctgcttctttgcagaaaatttcttacgatcggttcgtctggctgtaggtcatgatgagtgacctgatgcaggctctggagttcacagacaaagcaacaggcagacagagagacaaggagacatagaaacagaaggacgacgaaacaaagtagagattcttatgatgaaggtcatatattgaatcgaactgcatgcagcgagtctcagcgatgttcatgtagacatccggcgtcaagtatacaacatgaacctcagagtagtcgagtcggccaacagtcttgctgtcgttctcaatctttgatctctatagaataagctcaacacatactcagatgcttgccttgccagacttttctcttctttctcttctattggacttgcgctggctcaattctgccttgtgataggtaagacgagagatgcttcgaacgaagacagtggaatctaaacttgagagagaagggaacgacgaagaagggcaaggcgaaaaagcagctgtatcactctgtcgcgcatggctaggagccagatgatgagattgtatatagacagcagaagcgggtagatgaaagaccaattgaatcaacactgtgtgatcgagatttgatgtaaaccactcgggtcgactccttacatctggattatctcctgctcagattgactctctcactctctcttaacttcaaactgctcgagctctattgaaggaacatcagactggcctaagtcctcgctatcgtctttgtggcctaccacattctctttcacccaaacggtccttctctctccgactcgttcaacgatcatcagtcatacccgccacagtcacgtgatgtgactagctgtacagattatccccggccctgatttctccatcttgttcctccttcccatcgctcttgccggccgtgtttctacgcttatagtttcttttcttcatacatcccaccttccatcttcatcttctgctcattactctattgaatgtcgactgtatcgtgagtggatattgtgagtcctcagcctggtcactaagctgatgttgctgtcctttcaaatcacaaagactaccatcgacgttcgttaattcgttctggacacaggtaatctcgaatccgtctctacatcgcttcgatccttcttttactcacacccaaacactctcgctcatctggctccaaattttcaggactatcggaatggtctcgagatcctttactccaagctcgaacaggttggccctatttctattcctttgattgcttgcttttcgttcgaatcacttgtaagcccggctgtgccgctttcgtattcatcatgacattatccttcttctactgccacagggcttcgcagaagatcaagagatactcggtttcatcaagtctaggtcggcggcaactcagtctttttccctagctctccttgacttgccgccaagtctaaattcagacggctttgacaaggacgaaggcgccggcttgcgtttcgcctttagaggcatccaaggtgcgtcttcctctgccacttgcttccgctgcggtagacttagctcttgatctcacactttctttgtttgctcgtgctctacctctctcgcattctcacggccatatatcgcttccccttactcgctgacctattcatcaatcctcagaccaaagcagagcacaggcagagatacaccttcaaaccgctaaggcactcgcaaacctagtcgccgcgccttacgagacttggtcaaagaatcacaagacaagaattcttgaaagtaaacaactcgtttttaattggatatctgcctgggagaatcagtcggccgatgtcaacaaggtacgctataacccctcagcagatcacaactagagtaaactgacccggcttttggccttgccttgttcttccataaaatcctagctgagggtacattatcatgagaaagccagagacgcagaactagcggaagctgagtgcgtacttgactatttagtctctccaaatatacacaatctgatcaccgttatgatgtgaacaaaccacagagctaggttctctgcgccagagacacctatcatccaaaggtcttcccgacctgatgttcctcttcgtcgttctccctcgacttcaatcccaagttctcatcaaccggcctctccactccctctcggcggacacgtcaaaaacgattctctcacagatgatgtccctctcgctcagttacagtcgacccctgtatcggatcgaccgagaccgccctccatcactgtgcctcttgtgaatagctcctcagatcgaccatcaagaccgcctgacggagctgcctcttcgacaagcacccctccagctcaacatctgctcctagctggtctgccattgagtcatttccagctttctcaactcgttcttaaggcaagagtgaccattcccaaccaccctgtccggcttccaatcctcggagagtacgaacactgcttcaaaggtagagatctcgtcaaatttcttgcatccgaagtcagaaagctagctggaaaagaggaagatgcggctaaagagctggttgagtcttttgggctcatcaaacgggttggtatcgccggtcttgctggtctcaaacccaagggttcatggggtggcggaggggacgaagtctacgtttttacagacaaggtgcgcgtctttcacatcatcgattagaatgaaatataacactgacggtaaaatccgcttctttctttccctcgttatccactttcttaatagaccattgactcatctcttgaccagaaggtttctcttcccaactccccaacatcgccctcagcgacgacgtcacttcctctctcattcctccaacgatccagctcaatcgtcagcaaccttcttgcctcaccggctaccttatcctcttcaagcttccctccggctacgacggaatcttctgacaaagctcgagaacgagcagattcgatggagaaagcctacaaagaagccgtcgacagactcgacggcgtgagatgtcgaatggaagagatcatcgaggaatctctccggacgatgggccgatgggagaccgacaggctccgagcgattaaaacggttctcactgaataccaaaaactttcgaaggcacaaacaacctcgctcggatcgacgatcgactcggtggatctcttactagactcgtacgtgcccgagtctgatttcaaggcgatgatatcgaggtaccgcacaggaaactacagaccggcaccagaaatctttgagccattctcaagagatctttcgaacgtcgtctttggtgggaacttacagcggtgggcggagggcaccggctgggcattgccttcttctgctcctccttccaaggcatcagacacaccggacgctgtaagtagaagtggtgacaaagaagaacagagtatctcgggcaaagatgaagaccaaaccatcaaggatgaggtaaaggaggaagagacagatgaggaggagagtttgttgccaggtgtgttgagagctttgctaagcactttgagaaagggatacgagaacttaaaggacgatgaaggtttgtctttccctttctttgtcctcatcttgtttctttgatttctcagatacattggtattgataacccttacgactcgttttgaaacactttaagcgagacgtatggtctggatttatgatgtaagtttttcttctctcttttcacgaatatgcgagattgaattcccatcgttgacggctttcatactatctgcatccgactctaggttccgctacacgtttctcacggactcagaagtacattgaaggatttaccaggcggagctgcccacatacctcctgagctactcaagcgagatctaccggccattgcagctaccgtcaagtgagcaactatctttttttttccttcttccttcgttttcaaacccatttctgcttcgttgaattctcatttgtggttgaaattatgaaaaggttgtggttgttggagctttctccacctgtaggacccgattgggaggagatcaaggtgacctatccctctggtgcgcatgttcatctttctctttccactcaaactctctcttcttgttccttcgagcctgccctactggctctgcgcacatctcctgttttcttctactcttgctttctgatgcccggactttaactccttctcgatctgaccggaaactttcaatcactctagtcggtgcaggatcagatagaccagaccaagcactcaagatcgaggaattaaaggcagttttgtcaaggataccaaagattaagctgatcgtcctaaacggagtgatttcgcatctcagacagtcagtcctcgaaacacgcccatacttctgctccctgccccgtctctattgttgaaaatctaattctgcttctgactgttgtccttcaatgactgattggaataatttcctgttcttaaagactgatcgacagaacaaaaaccggcgaggagaatgaggtatatatcacgaaactgtcgctttcgctcggtcgaagtgagttctttccttctgtctttctgaaatatacctctcttttcgtaataggatattaatactaatatatgtgttgactgcaactcgttcgtacttgcatcggatcccagccatcgtccggccagaaaaggaaacggcgctatcgatcgaagatcgagctccctccgcgttcgtcggcgatctcttgaggttctacaacgagatctttcctcctgtcatcgcttccagacggacggagagagaaagggtcgtcgttaaacgtcgggcgacgagacctgtggatagaagaccctctaggtcgaacagtacgtttttcttttctcttggttttgacctttaccgtaactcttctcatttctcctgggtttccaatgttgactaatcggtttgtttcttgttgagatatttcagtgtccgaggcagaacggattgaattgcaagctcagatggtactcggcaaactgcctcgttcggccggcagtccccccagcatgacgccagctctggtgagaaatgaaaatgatgctagattagagacagacgaacaagtcagagcggctgccaccgccactggggctagtgctgggacggaaagaggaccagacagatcattaaagctgaagacatcagttatcgaagaacctttacctgaaggagttgagtcttttccgccatctcttacggttcttttcgtagtttctctttttttcttcctcagccgctgacagttgattgtcattgttttctctcaaactctttatcttgggggtaaaattcacagttcaacttggttccgcctacgcctattgcgacatctgcaccagaaaacatccctgccgttgatatttctacccctgcccccgcccttgttcaagcatccacatctacctctacctctacctttgttgcttctggccccgcagtcagctctgaaccagcggctgaaacgggtgaggccgtctctgtcgatcagacgatccgatcaactcatgaacccttgaaaaatgtcgagacctctcaactagtcatcggagaaacaaaatctgtcgaggagccgcattcagaaaaggtgactgatgtcggtacggacgaatcattcattccaccttctgaggaagaaccaactgatcctataccagcaggagagaacatgatcgcagaggaagaaggggatagggaagagatcgaaagagcagggggggaagagggtgggttcaaaccaccagtcgaggataaaggggtgactgtctcgaggggtgttgcctctagctctggattcaattctggagtcggagcgagtaagatcagagggccgagagcggctggtccgagaggcgctagggagagacaggttcgttttctcctggcattttctttttctctgttcttctcgctttcattccctttttatcttgcgcggaagaagctaatcggcatggtttcatttttcctctggggaactcttcttggattgtcattaacgtgcccagtgaccatttttaatcgaacctgacctgaccttaccttctccttattctttctttcctttcctctctctttgtctctctcgtatctactgttcctgtttaggctcttctcatcttgttctttgcttacaacacgacacgcggactattttccccttgccttatgcttctcttcttgtcttgctctgttatatcggggtttgccttatcttttgttgccatgtcctttccaacattcctcatgtgacagacaaacctcagaaagacgcgaagggaagagaaaaagggagtgagggagcgagaagtgaacaggtcgaacaagtcatctaattagccccgatctcatgctcggccaataactagaggattcggttggttggttggttggttggttggtgcgccgatgatttggtcagggttaccgtcgtgtgcgtatgcgtaagagtgacgggtaggggtgacggcaacgagaaaccccaaaaggaggaggacagagtgtcagtcgactttattcttcgagcgcccatatacgttcccggcctgttacactcgagaacaagccaaaaggaaagagacagaggaagaggggctgaccatatttgggatcccattcgatatcgggtacgaatgactacagttggggcagatcatcgatccttcttcgatatggatctacgtttgtcatcccaccatacgccacggtcaggcaagacacatacagacagcacaacagaaacagaaggcaaagtggacgagaaaaaaaagaagcggttaactcgttggtttttctgacatgtcttatctttattcttcttcgggtgttacgaaagaaagacgggaaagcggagaacacgcacctccatgaggacatggtgaagcgctcgaaggacttcttctgatgggggactcgatggatcaggtgttgtttccggcagagaagtatctccgagctgaatagttgtcgtacccaagaaaacaatgagaaaaggaggtcagtctctagggtaaaggtctctatttgatgtctcgttcttctctttcgcctatgtgtatgatctttctagtcgagaggaaaagaaagaaggcgcgactaggaaaggaaaaaaaacgtacagctcgggcggtagctaccaaggctggccactcgatctttggccagaaccctctgaggaaatcagggttgtactctgcctctcggacttcaatctcgatgtttgacaactggagtgggaaattgttggatgtgcacgaccgaacgtggcacgcgaggatgttgctgttgggccgaataaccatcagaatacaaatcacagagagaaaccaacaagtcctggtcagccagacggtcctttataaccacaacaaagatggaatgctgactgggtgatgagtctcataataacgatgatgatgatgataatggtatgtcttcaggatgattgagtgtccaaaaaatatacagaaaaatccgataagattttggatcatacacagagatcttacttaagcttatctaagtctttttcaaaaattcgctttttctttccctactctctacttctctttctcctttcttgccaggcgaccatccatcatcgagcttggtaaacgaacacgagcatgtcggcctttctttcctcccgtctgctccgcacttcggctccttcgtcctcctcattacctagtctaaaccgatctatcaaacatgtggccaaacgaccgcacctgcctaaatacaaacaagcgatgcatccttctgcctggacaaagacacttgactccggtgcgcttctcgtgtacaaccctccacctagtgcaccttccgaccggtcgaccaacgtcctcgaaaaggccgagggagctctccgaggtcccaccagaaagatcctgccttcgagttggaagatcgaagaggggttcggtcacatggcaccgaggatagatagacgtccagagggaacaacgccgtcgcctagagtcgagattccggaggagatcaagaaggagatccgttcgttaagggaggaagatccggaacagtggacggctagagcgttatccaaaaagtgaggtcttctctgttctctacgttctatctcgctttctcgtcccttccttcgggacttcactcggacaatactgaacaaactcggaactctcgtttcattccatgttcactccctcaccagatacaacatcgagatatatatgatatccgaaatcgccagagctcctagagcatacatcaaggacatgaagcaaacaaggagcctcatcaaagaacgtttgcctctcaagaaacttctcaagcacgaagcgaaacagatcaggaagagcttctggtagcctattcttcaatatgctttttctttttctttttctctcattgtggctttgtgagaaagggaaacacagctgaaggggttgagtggaacgggtagacggagaaaaataacaaccagtttgtagagcgagctgtatatcattatgattcatattctaaaaccctctacccacctactaattcatatatcgagtcaagagtgaaatgttgaactgaatgaattcgaagagaggtggtggacggcagaggattgagaagaagaggaagaagaaaggaaagagaattggagtggtatgcgtttgttaaatacgataagagagggagaacttgaagacatctcgggaaacaaagagagaagacacgcgtctgaggtagag

SEQ ID NO: 847 - DNA, 20982 bp, Xanthophyllomyces dendrorhous
gaagtagagaaggtcatagaacgtgtggacggtggatcgtgttgtgatgtatgagaaaataaggagaaaaagaaaagaggaagaaggcgtccctacgagatgagcgaacgtctgcagatttggatttgaaacagcatagaggattatcacaaaaaaaaaccggcgagtgaaacataatggtagaggggtataggtgtgcaacagatgaaacactctgatatttggaccaacaaagggagataaaaaggtctacgacctatctttgcaccacccactgtcatcccttccaccgctaatgggcggcgtgtcgacctccttgcccaaccgctccatttggtggccctcgttcagattcgtcttgctcaagttgggcgtttcgaacggagatcggaaggagcccgtggtcgagtccgccctgcctcgaaacgcgacggagggcacaagttggtccaagttggtggacgatcggttgaccgcttcagccgcaacggtagggccgtaagcggctgcaatctcgctagatcagataaaaagcaatttcgaacgaaacacacaagttcttcgatcagacaggtacgacaacaaaaaggcataaactgtgacgacccacccagcatatccatccatcatgaaggccaaactgtcgaggttcaatcggtatcgtttgggagtaagtccttttccaaatcgataggtcacgtggttgctgcacaacaaggccgagatgatgatcaacagttggacaggcaccaaagagaacgctactgtccaccacgtcttgagaacggtcctttcgaatctcaagtatttccctttgcatccaaccatgttggatcgagagtagcacgtggcagagacggtggcctcgatgaagggagagtagtacccgcagcaattcaactgcaaaaaagtggttcgtagaaaaagccaacaaggaacagaagaattgaaggaagatgatcagtgacagaaacaatcacggagagaagagagcaaggaaaagaaaacaaaaaacatccgaagggaagaaagaagaagaaaccaaccgaatcctggattcgtagcctgtcatcttcatccagatttcgactccactgtctgttgatcttcccttccaagttgaacgcataattcttgtacgtcaaatatccaggaatcacgatgagcgcgaatgaaatccagcacatgagggtgtagaccgcaaggaaggctcggttgttgaggaagatcccggcgtagccaaccaaggaggtcaacaaacaaaacgcagctgccagcgttgatactgcaagcaaggacaaaatcgagctttaggacacaacactgagatgggaagacaaggaagaggagaacattgcaagaaacacgaacagacgaggggcgttgtgttgcctacgatgacgacgtccgcatgactccaaatattaaaccagacgagaaggagggtaatcaaggcgcctgtcgagtagataatgaactgtacgaatgaaggggttcagatgttgtgaagatgagtgagcggacaagaaaacaatagagtttgagttgttattgctatatccgcaggcatgcgatttgagaaggaaagagagagagagagagagagcgccaaatcgatggggcttacgatagtgttggtcgtgaagagactccatttgaatcggttccagaccaatttcggtttcttcttattctttctagcaggatcgacagatgaatcagtaccgtctggatccaagtcgccgtcatcatccggcattctgtgctcgtgctgttcattcacccagtcaagttatatcagcctctctcttgaaggccgagcgagctccttgtgtgagtttaacaatcagtaaaggagaaggaaacagacctcggcccaagcacctcttcctccgccaacttttcttcgatgagcgtactgtccaggaatatgtctggctgagaactttgtgggcaggtagttgattgagaggggtcgttcaccgctggcgaaaggtctgtttggaggccataaagtcgaggacgagccgctcgaggacggatcgagtctcttcagccgaggagtaggttctcccgggacgaaaggatcatgactggactcggagaaagagccaagagttctagacgtggtgccgtccggacctgaccaggaaacgctggaatctgcctcgtcgattgtgttccggtcgttgtaaaacgtgccggaggcaaaacccagattggacggttgggacgatgccgactgttgaggaaacccatagacgttttctggattggacgggtagccatattcgagcttccctgtctgatgagagtaggaagatcccccgtcctgggaaaaggaggattgatgggaatgggaagactgaggggcaggatcgtaatgtccggccatcttgaattgcaagctaggaattatatatgaaggacggcgagacaagaggaagaggaagaggaagaggaagagaaagaagaaaggcgattatgcggaacacgggtcacaccaacaaactggcaggcagacaaacggacagacagatctaacttctaggtccgcaaacagacaaaagagcgagagtatgtatgtgtgattgataggattgagaaaagagtgaatgttagttcgaagagcaaggtgcaaaagggcaaaaagtgaaaaagggtgaacgagcttgggccccagttgcgcagtcaaggcaggtgagcaagcaaacaagcaagccagccttgccgatttgtctatatttatgtgggtgtgtgtgtttgtgtttgtgtttgtctgtatgtctgtatgtctgtctgtatatgtacgcgcaagtactagcctctatgtctcaagtctgtatccaccaccggtctcgctcactggtgattgttccctcgacaacacagtcgtcgtcgtcgccatcgtgctgcttcgtcgcgcttcagccagtcgtcgttcgtcatgttgttttgatcggcacggtaagggttacatcactgtgatctgtcgagtaaccttgtaccttgttaggtaatcaatcaccaacaaagtcacgtgacgtatgtcacatcgtaaccacccttgcccagattcttggcgctcgtcctactttgttttgttttgctttgctcctcttgccctatccgttgtctgaccacctttgatcctcactcttgctgttcttctttcgctcgcttctttttcttactcttactctccctcctcatttggttcatttcaaacccatccacactcattcagttcaaatatgctcaagtcatttgccaccgctctcactcttgcctcaggttcgtccatccttggtttcgatcatcttgcatcagggccgtcttcgtgtcgtacagggtgacaacacattaggggactgttctatgttctcttctacgcacaccgcgtgcgccatcgtcttcttacatgctgacttgagtctgatgcgcttggtctccttcttcttaatcgtccatcagtcgccttggctggatgcaccaggacttacaccgtcgcggccggtaagtctttgccctggtgattcgtatttgtttctgatgcaacaaagccaagaagaatataccgcgtttcgtccgattcgaggagcaaacaagatacatccaatctctctcttatcttctgtgccctcttctggccgcgatcgtgtcgcctcggatcatcaatcgcgctcgtgtcactttgtccagtcgcgtgcgagctcacaacctcttgactggagactgacgagaccctgaatgcgtccattttatttttatttttttggtccctatcttttctcgtgctctttatccaccacaggcgacatctgcgactccatttgtatgtgtcttttccctcggctctttctcctcgcggctttctcgatgacgctcatgagtctgaccttgtacgcgaaccatcttttccttccatccttggacctgacagccaaggaaaacaaggtgtccaccttccagctctctttcgataacaatggagtcgacgacgtctgctctaaccttcaggtctgttctctcgatcttctgaccttcctagatctacctccagtttttctgtactgatgctgtacgttgttgttctcatctttcttggcttgcgcgtcgatttgggtaatctttgttggggacgaatccagatcggccaagagctttgccttggaaccgatagcgccgactgtactgacgtctacgttgttacgtctggcgagtgagtcgatttctcttcacttttggcatgttcccttcgtgctgtcttactaaatgtgttattcctgtcttgatacattttctagtacctgctccaagattgcttctgccttttctatcgattcgtcgattcttttgaagaacaaccctcaggtcagcatattttgacttaactcaggccacaattcgtatgatcccacgtttgtctgatcagacacgctatccgtcaccgcgcttttttagatcgagaccggatgcacaaacatttacgttggcgaggtgctctgtgtcgccgctcaggcgatcgcttatcccgagaccgtcaccatcaccagcgagaccagcccttcttacctggcttccgctgtacgcatcttctcctgtctgtttgtccttctagggcctagtgacgagactgattgtcatttgttttcacgttatgcgtaaacaatctcaggatgcttacgaggagcttccttggtgcgatgaggagtaactcgccttctcccttccccacttattcacaaaatctgagaattgagctctatcccatctctctccttacgttcgttgtctaccaaagacactcttttatatcataccatatataattcgtttatatattcgcgcaccctctttcttcttcttcttcttcttcttcttcttcttcttctttctttgtccagtggtttctcccctcgccatttcactatattctgaccgctcttttcttccttgtgcattggtctcttgattgtcgatcctttcgttcatcctttgccatctggctatccggaatataccctcctcaatcggctacttcttttgattttgtctatgttctaaccttgccttctgctctccctcgtcattccctctcgattccttctttccctatggtttatcatcttgaccacacttatcataataggcggacacgcatggaattgtgatatgctatcgcgatcgatgttctttgtgcttagttccctagcagcaagcgatggcaacgataaaaaggacagcatgacgtgtaaccaaagggttacacaaccctgaccagacacacttgatcgtcacccagagcacaattctccgtacatcgtcttccatctcccatttaacatgagtcgacactcagacacgatctcccttttgggaaaagatactttcgagctcgttcagaacacgcctattcttgttgtcggcgcaggaggaatcggttcagagcttcgtacgtccgccatccttttggttgccctcgatgttctcggtcttatattcatgatctcgaaagacgaagctgaatctgccttcatccttgtgatcgtctgaacaacactactttagtcaagaatttggttctcgttgggttttccagaatcaccatcgttcgtggtttttacaaaagtagcttgaagtacagcgcccatgtcctgatcgccttcttcttcttcttcctcctctttccatcacccttgatacatccttctctttgattgaacaggtcgatcttgatacaatcgatctatcaaaccttaaccgacaattcctattccgaaagccagatatatcgaaacccaaagctttggtagcagcatctaccgccaaacagttcaacccaaatgtagacattgaagcacatcatgcaaacataaaagaacaacggtttgacgccctttggttcaaacggtttgggatagtgttcggagcactggacaacatgggtacgtgtttctctatccccttggtatatattcaatcgctttgttcacagtgaatgttaaatgaacatttttcttttctcctctattgtttctttcttttcgctactgaatgcgcccggcaatcggtcttgatacagacgctcggcggcacgtcaacaagatgtgtatcagcgctggtgtaccacttttggagtccggaacggcaggttatgccggtcaagtcacacccatcatccatgtccgtctttgctcaagatcccgacaactttcctccatttattcctgtctggttcgacaagctgaccttagtgtcttctattgattaattctatgccatacatagggccttacggaatgtttcgattgtcagacaaaagagaccccaaagacctttccggtgtgcacaattcgctcgacccctagcactcctattcattgtatagtctgggcaaagagttacctatttgtgtaagtcctctttgcactttcctctgtctctctctctctccctctcttttctgaggcttcttcagcgtcgcacatccgagactgatttcaacttcggtcctatagccagttgtttggagaagacgatgaagcgggagagacatctgaacttgacaaggctcaagccgaaggagaaaatggtatgtttctacataacacttcctattctggtgtgttcgttgtttgctgaaaccgatctcaaatcttcgattcctaccttcccaaaaacagctgcagagattgaaaacttgaggaaggaagccaatgcgtttagggcggttcggaagaggatgatagaaccggatgggccgaagcatgtatttgaaaaggttgatcttcttctctttgcggtcgtattcagtcttttaacacccgaaccaacgctgatacaaccttcttctttccaatactcgttctttggcatcacaggtctttaaagccgatatagagcgccttttgtccatgtcggagatgtggaaagttcctggacgggtgaaacctaccgcgttggactacgacagtattctggacgaaacattcaaactctcaactgtccagaaagcaaatagcgcgccatctgatagcagttcttctactactgtgacgtccaagaagaatgccactgttctcaaggatcagaaacagctcagtttgaaggatactgttcttttgttcaaagaaaggtgaggaacagcttgtcttcgtttcctcgttaggaaacttctttatataatcgaagatttacaccaaatacggctgacacttcttttttactctcaattcttagttgcgaacaattggcagcacgaatcgcaaaggacccttcgactccacttacattcgacaaagatgatcaggacaccatggattttgtcgctgctactgccaaccttcgagcgacggcttactccattgagactctgactaaatttaaaattaagggtaacaacgatccaatataagcgcgtgtttcgctattgtgttcaggactgcttactgactttcctttccttctttcactttgatctttgtgcgggaggtagagatggcagggaacatcattccagcaattgccaccaccaatgctataacagctggtctcctatgcttccaagccatcaaaattctcaccaacaaatatcaagagctcgccaacgttttcctgacatctagacccgcacaacctatcatccggatgagacctcagaaaccgaatcctcagtgtggtgtttgtagagatgtctacattcctatagcatgtgacccgtccagactcacacttggtcagatccttaacgagatcgtcaagtccccatcgacaaagacgaccggtctgggatggggtgaggatgcgaaattgagtgtgtttgaagcgggcaggctcttggccgagccggattgggatgatgatccagattggatggataacggaaacaagacgttgaaagaattgggagtcgaagtggggatgtggttgacggtggtcgatgaggaagatgaagaagataaacatgacaacgtcgttttcgcaatctgttcactgtacgtatccgacccacctctttctgtttttgctccccttttcttgttgtgtgcagaaaaatgctaacgctttgatgattggcatctatctctggtctttatctttatttatctcacatcgacttagaagcgattcgacggcgaccgaaccatacattctaacttacccactccccgatgttcctactcgacctcaaccgatatccgcccccgtctcagtctctgacccagaaacatctgaacaactcgttcagattattcaccacaaacgaccgttggaagatgacgacgatgatgttgagctgatcgagggtgagagtagggctaaaaagagaaaggtagaaggtggggaggacgttcttgaattggtggatgatgagattgagatgctcgattgatttcatgtgctaccttgtactccttttctcttctttctgtctcatccctcatattcatttcacactgtcacgcaaaaggaaaaaaaaaagttcgtcatcatacctctacaatcctttcgaacaagacttttttccccatcagctttgttgccctgtcgactctgccagccaagacggacccaggctcggtcttacccgtccaagcggctgcctcccaagtcctttcttccttcggaacacccatcttgtccaacagagtttccatctttgtaggtaggatgggaaggagcaagattgaggttattcgtagagtgttggatgcatagatgtaagctcgttcaacggaagaggtagcagtcgtcgatgcccacggagaatgggatgagtagaacgcgttggcctgatagagcgcgatgtagttcgatgagaaggtggtttcagaatcagttttgccaaacgactggttcttgacgggatctcgtattggactagaggagatgtctaggtgctttactcacttcagcgactacccttaggatctccatgatggcgcttgaaatctcgttcttttccagtttcttctctacgatctctctgatctctctcaatgacttgtctatggtttcttctccctcgagaacctcaagctgaatctgattcgacgatgaggatgtcgtcaactgagattcagggatggatggatcgagaagtctattcgtgattttgggtccgctgaatcggttcaacaaatttccgatttgatcagagagtaacttgtggaacatcaggagggcactataggagtaatctgacgatgtttgttatccgacatgagaggcgcagatagacacaaacaacagaaaatcggagttgattaagtttaattcaaatcttagaaggacagaagacacagactgacctgaatcatcggccagactacctccaatgcccatcaaataagctcgcacactgtccacaccggcggactcgatcgctttgaacggatcggccacgtttcctctggattttgacatcttgaactgatcttgagtccaatgagcatgtacaagaatcgacttggggggaggtagagacaacgccatgaggaaagctggccagaagacggcatggaacctgttgatcattttgaggaggacacaatgagagaaaagatacttgtaaatactaaagtaaacttgtttatcatgaaggctccatgagaaaaaaaacgtaccggacgatatcctttccgacgacctgatagtctgctggccaacccatctgctcagcattaactccctccttccaaggccatcccagaactgtcagatagttgacgagcgcatccatccagacgtatatcgtatggttttcatcatcgggaacaggcactccccatgtgagtcttgaggatggtcgagagatagaaagatccttgagatcctcaaagtacgtcatggtgtttgacctgtactcatttagcggcatagctgtgtaggttgaagttccattccaagtcaacgacgtacacaatacaataacaatataacaaccgtaaatgtgactgaagggctaaaaaaacgaaccttcggggttttctgaaagccacttgagaagtggctctttgaaagccgacaatctgaacttgtaattttcctcctcggaccactcaaccttggaacctgattcgatagccacctaaattcaacatgcttggctaaagtatcagcatatgggtgtaccgtctttgtatatgtgcatctgcgcaccttgtttccatcggggccttcttgaatttggctttcagtataaaagcattcatcagagacggcgtaccatcctgagtgcgatcctttatagatatgtccccgggcaaggagctctttctagagtgaaagaatcaccatcagtgatttatggttagcggtggcccatcaagacgccgacttacttagatcagcttcgtggttgcagaagcagacgggacgcctaaaaagaaggaacacaacggacgcacccacatgtgctgtacagcgatcttgtgcctatcctctgttgttcggatgaaggtagtatacgagatgttggctgcgctagccaatgcctgttccatccgaaccaaaaataatcgcaaagcacaaggcgcatggtatttctggatatgctctcgaaaataacaagagacgagcacgcgaatagtttactcaccttgaatctggctgagttggcatcgcacatctgttgaggtgatatcttgttgtctttcgcagcgttttgaatcttaagaccatgttcatctgtacctgtagaaaagatgactcttcggtttggttgaacgagcctggcataacgagctaggacatcggctaagagcatcgaatgcaagtgtccaatatggggtgctttcggagaaggaaagagatcggcagatgagatttccttcttttgaattgtgtgtaactttaacgaaagaaaactatatgaatatcctaccagcattgacataaaatatgggggtagtgatgtagaatgggcttggtgtcccggaaagaggtgaaggagaggatgggagaagattgtaggccgacgaggacgaagagaacggacgaagcgggcggaccgggcaagacaaaggggggagtttgtttgaacaaacgctgcgccctctcagaaacattgcgtgttcaagtgagaccagggagatgaatgaaaagaggaaagaaagatgaagataaagatgaagataaagatgaagataaagatgaagatgaaagtagaatcagaggtagaaatgtaggtagaggtaaaggtaagaaagaaccattgtggcgccaccgtcacgtgaaatcgaaggcagtgtagcatcacccgggttgtctccttccggcctccttcgtctttaccttgtactcgtcactcttcacctgttgctcgttgccttggtgcaaacagtctttcaacatacagatacgcgtacagatacatcatgaagctgtccatactctcttatttagccctgttgctgttcccaatggcaactagcgcgcttcacttctatctggactcgaacgaggtcaagtgtttcatcgaagagctcccgaaagatactctggttgaaggtatgactctttctttctcgttctgtgaacctgatatcggcaacgactaagatctatatatacttcctgtttctatcaattcaggccattactcaacattcgaatggtctgatgaatctcaagactttgttgtcaacgaaaagctaggcatccaagtggtcgtctctgtaaggatctctctgattctgtttctcttcgatcggctcttcagttattcaatgtgtgccgagacttgttaacacttatacttttgaaacccgatcaatctatctcgcaaaccgataggaaataaccacaagagacgtcgtggtgaacaccaggggacaatcagatggtcgatttaccttcacctctcatgaagcgttcgtccattccttttctactcattcgaccaacatcttgtttctggacagagctgccttgagagagctaactgtcttctagcatgttttgaatgatttatagtggagatcacaagatctgtcttcagaccaatagttcaagctcctggttcgccggttcacatgtcaagatgtacgttctcagatctctgcccccctacccccttgcttcttgcttttcacctttcttttctaattgctaacttgatctctccgacctctccaaactcaggtatctcgatctagccgtgggatccgtcaagcatgatcatgagtacggacacttgactattcttccatcttgtacttacatctccttgacaggtcttgtcttacctaacctattccatcttttggtttgaacaaaaggaacgacaaagcgcacttgtcagatctggcatctaaagtggttgaccttaacaaaaaagtgaacgatatcagaagagtgcagcaattccagcgggaggtgagaccttctgtttggttcatcagacaggcagcattgtttctgacatagtcgcttttgttatatgcttatacctaggccgagtctcagttcagagacctgtctgaatccactaactcacgagcagtctactggagtgttttacaattggccgttatcttgtcagtatcctctcagttaaattgtgatgaggcgatgaaggtttctgttgaggctgatcatttcgatgccatcttcctcgcctcgtagtggaacatgcgtttggcagacgaggaccttacgcgtatgtaccaatctctctttgccctcgtttcctctttacactggaataaattcactcacaaacctttgccgtttgacttgatgcttttgcagaaattcttctcggaaaagaggctgcgctagacgaacaaacgataggaagcttcccattttcatacccattctcatctcctctctagtcatctctctttccttctcgtcaataccttcaggtgtctcttcttagtgtgttcttgttggttctgatgaacgtttataccatgagagtttgaaagtgatggaagctccggtgtgtcttcggagccgctgcgcctttttcggatcctataaacccgatcttgtttcgtccgcccttgcacagacgattctttctcttcattacaaccatcccatccatccaaccttgcaagattggaacacacacggtcatagcagacccgtttgcgaaagagaactcactcgcaaaactccccagcctctctttgattgtttccaccatcgtttagacggatagacgcacacactcacttacatacactcatacaccgatttgacccgatgtcaattccctataccgaagtgatcacaggcactcaatgctctgctcaccgtccaacgtctgtcttccctgcttgaaacctttttgctatcggatcatgaatctgatgtctcctcgctctgttctcctctcctgatccttctccgatctctatctgctgttcaaacgtcggataccttcgatctttcgctatctcctttcgtgaaactaaacattcttacaaattataatagaggaacattccctgtgaccttgcctctcgaggtccaaagacagatcatgatcgattccttagatcggacatcatcctattgtccaaaagacaactcggctgttctcaggagaaatgctcgatttttggtcaagatgtgtatggtcagccatgattggaaggtaagaaaagtttatccattttactccgctcgcggctcctgtattctggttctagtctttggggcatcagtcttctcaagaagacggagggaacaaggggaagagaaaggaagggaaggattcccaagccaagcgtgggctacgattagcccctgaccaatcaaccctatccgagtccttgctcagacatgacaaaagaagtcctgcttgcgagccgccttgccggatttacctggcagcttttggaatcaaagttttccggggatctccgtcaacaacccgctgacattcttccatcttcctcttccttccatcatcgggcgcatcttggacgatgtcggtgacacaatcaggacatgatctatcctatcctctaccagcggatatgtctccctcggctcaagcagcttttcagattcatgaacactatctgtgcgtctccctggttgggagagtataccgtgtacctccattacttcgacgaagttcttccaccaaaatttctgtaagttttttttgtttcattcgtcttgatttcacataccgaggatcttcttctaaacgctgttctcttgttcattttcaacacatgtcgattcacatcgaatttagcaaagttatatatcaacttcccaacctgaaacatttcctgactcaagcagatgctagtacgatccttgatggagatatcgagccaagcaagccaaagcttgctcttcagtcgttggagatcaatccgggaatgcacgatggcacaggagcttacaagaacgctaagattgataggttcggatatggtttctttcccaatgtgattttttgtgcaaggtcttactgattccatttcgatatctcctcgtaacgtagatggcttgacatgagcaagcttgcgtgagttcaatatcactcatgcagtctcaccttcttcaaatcttccgaatactcattttctttttcctttcctattgtcgaccagttcactatccgtcatcggcctcgaaacccccaacaacatcttccagtacaacttcccattcctctgcgaacttcacctccagcacgctgacgacgagttggacgagtacccagaagaacatacgcttgtcctttccattcttcgaaaacttggccgtcagctatctctactccggttagatgaggcttcaatcgaactacttgacgcgcctactcagctgttcgaactctgtcctgaactcgttacactctctataagtggacttgtcctagatccgattttcaaacaatctcacccaaagctgaggaaccttcttttgggtgatccgtggagttatcatgtagaagctagagagctagagacagagggacatttgcttcatacattgaaggaggaagacaaggaagcggcctggtcggtcatcgataatgccgataagtacaggttcccttctctccaggtcataatcctttggaacgtcgactacgcagaggtcagtcttcctttttccatgtcctttccatgcttcgttcagacttatgttggaacgataggtacgacacagatatactgactcgattgtatacacaccgacatgatctcttctcttttcctcatacgctctctacgattcttcttgtctcacacccatctgtgtcataggagcacaatcggttctcgaacgatatcaaacaaatatctgaaaccgcgttcgagaaacacgggtggttggtagctgatagattcgcgcacggtcgaaacccagcttggccggtggatactggcttgaaagcgaaacaggtgaacaacgggtcgacggccacatcgacaccaatgacgacggcgacggtgactgttgaggtcgtaagattggattgatacaacgggagaaattgatggtggatttttctagggctaagagggtgtacacatatagtttattcttaatctcagttctttccgggaacttttatctttatcttttctttgctgattttcttatgatctcgatggataacaatgcagtgctgaagagaaccgtcggaagtcacagcatacatcgaagaggaagtagaatgcatatggcggaaggatatcctcaactagatctagccagaaaaagcccttgggtaaatagagacagaccagacggcagtgatggaaaggacggaatagcacaaaacaaaaggcagaagacgagaacggaaggaatcacaagagagaaaagacacgttccacttgttctcacatagacttcttctccagccagttgttgaacatctgagaagcctctttcggtttgtccgtggggaccatctgttccagttccagttccgaaccgaaacagagcatgaaatacaaggtaaaacaggggttggttagatgaacatacttcgggaataaaggttttgtagaactggagagctgaagagagagagtaacgtacgtggccggctccgttgattgtcatatctacgttccgaaaagaccaaacgacaatcagatctcaaaaacagctctattgttcattcttcgagggggggggaaaacatgcgaccaaagaaagaaagcttacaagtcaatccaccacgaccatcctcagaggaaagactcttgacttggccggcgacttgatcatcaatatgccaatccctggtctcttgcgcggcgtaggcttcttggccagaccattctaggttgttcgtccaaatggcatttccttgattttcgtttcccggagatcgaatggacgtgtggaaaagattgaaaggggaagaattaagttattctgtctctttttcttaatcaagatacgagtacaaagaaaaagagtaacgaaccaaggaagttacagatccaatcgagcttcccaacataaatcaagacgtcgatgtcatgctccagaagcgaagccactgacgaatcccaaatcagtaagagagaatcctgagatcagcatgtagtctatggttgttctgggctcatcctagatgatgaaatgaatttccgccagaaggtaaagaagaaactagctgaccgtagtaccaagtctttccagttatgtcaccagccgcgtggaaagcagaaccaacggctggactacagctctggaactttccaaggtcaggatttgctccaatcttttgtcggacccaaggttggtcgagatatttcgcgatctgtagtgttcatcagcccgtcggattgttagcatacgtggtagtaaggcaatctttgaatgcgcagaagagaaagaggtggatgatagagacaaactttttgagtctcagggtagcacaggaactcggagagctcatcgatggtacatgacttagaaatgtcataaggctgatcacggtgaaacgaagaaaggagagagagaaaatagaattgagctatcgatcagggaggtatcagaggatgacaacatactcacatttcgctcagcagagaagaacggacccgagaccacttccgcgctaggggtaccgaagaaaaagaagaacgagaatcagattctggactgcagaaaacgaagaaaggttgatcaaggacgttttgaaagaaaagatgactcaccagaatgacatcgcgttcccacatcccagtgggtcggctcgatcaagacattcgtccttgagcattttttcgcatctatacaaaccggtctcgtaagagaaaacaatcgatcaggcttctgtaaagaaaagtctcgaaaagagttgtttaaaactagaataagagaaagacatacctaggaatggcagccgccatagcctgacactggaagacgttaagaataggtccaacgccggagaggttggtgcaagagtgttgatagtatcctcgaaccatggagtatgtatcagttaatccgtttctggattcattcagataacaccgtgtcagcggacagccgtagtgattcaaaaggacagaagtaagacaataatcagaggctcacccgataagaatcgacttgagattgataggttttgagccaaccttgatgagtgccttgtttccgtcgtagatggcggcggcaaatacagggagatatctacctccgtaggactctccagagagatgcaacggtcgatcttgaaactctttgaaggtctcgataaagattgagatgaaggcctgaacgtcgatcgcggcttgctcggctcggccgacaatctggccgtgttccgcatatgagaatccgactgtgagccgaagcgtttgcgtcagcttttggtaagggtgctgatatacaagatgttacatgaaaaagctacaaacctccgatgggctcatccaagaagaagacgttagccttgttgttccaagaatgaggattaggcttggtcgttagatttccatggccttggtctacgacagagcaagggcccaactccatgaacattcccattgaagaactgcaaccggggcctccgttgatccacatcactaacggatccgtctcgggcttgtgcctagattcgaagaagtctattcataacacaatctggtaagcatgtgcgagaagagagagcaaagaagaagtaggatagagaaacccctataggcgatctcaagtattatctatcgctcggattcggccaagcccagtcggtcagatctaagattcaagggaacgttgaagacctacagaaaaagaggttcttctggttgccgacatcgaggtacccagtgaaggaagagacatctggatcacaccaaccggtggtttctttgattctgactgaatgagaagggaaatcccggtgttcaagtgtgacaaactcgtcggcctgtcctttgagatcggccagacgggcattggactgatggttgagcacacgatcgaaagtagagaacgagtggataggttgattggccgaagtagcgaaccgaagttgctcggccgagaccaaagtgagcagcggtagaagggacagaaggagtttcataggttgtcccagaaaaaagaggcgatggtggatgttagataggaaagagtgagagcgaagagagaaacaacaggccgaaacaggaagaaagaaggcggagggaggtttgtaatgtggaaccagagagtactcttctcggcgttgtccgttacggccacatgggaaaacatccaagcgcacctcgctacgctctcgaccgccgaccatcgatcatcatccatgggcatccttacccttatctcgctttctataattgcaatggttgctgtggctcgccggaaaacattggccaaatctgtacccaggaaagaagcgtttttaggcagcaacctcatgcatatcaccaaaaatcaagacatgtacgagaaggaggagaaagagagagagaaggaagaggggcaagaagaggatacatcggagaaggccagaacgagacctatccggctctgtatcactggatttgggtaggtcgactttcagtatatgcgatcgaataccgcctgaagctgaatgctctgcctttcaccatctgagcagctcgttcgacaactacccagggaaaaatccatcgagcatgaccgcccgacatctccacggacgagtactttctacgagcccttcacctatctcgtcgattagttccgacgaaccgcttcctaccactactctgccctcaccttctcctgtaccggaccggaagatcgagatcacatttgtcggaccggtggacgtgacgtacgagaaagtggcactcatggtgactgagcttcaccagaccgatgagtttgatgcttttgttagtcgttccggtctcctcacccgtaaactgtgtactttagttgatcgactcgttctcggtggagctgagacttcaaaaggtccatgttggggtcggccgttcgggtgagcttcgggtggaacaacggtcccgccgagttgggtatgacaaaccagggtatgacggtcggctttgtgagattgtggatcttgaaagcggtacaagagggatcaagacttggcccatggagggtcacaaagatgagattcggtcaaagatcgattgtgacaagttggttaaatggttgaggtctcagatggacgtcaaggtgggtatgaccgagttatctgggtatctcgttcttgaactgaaccatgcttgaaccctcagcacgtgctaccttcgacagatgccggtttgtatttgtgtgaatacatctatggggtgcgtctcttctttgtcgcttcagaaattcccggggatctcagatcttcttctcaagagaatatgatcttggtgttgcatctcacgtagatgtctcttgcccaatctatactccataccaagtctggtgatggcagatcgccagcgcctgtgttatttgtccatgtgcccactctcaaaacggatgccaactcggatgcattctacacagagtctgaagtgagtgagatcctcgagcgggtctgctggtgggtgggctcgactgtttgatgtgtgtacgtgattatgcctacgtcactttaggcttcccggctctgtccttatggatcatttgtatggaactttctggacgagagaattgtaagaacttctatatcggatgtatcttcttctacccagacgagccaggtgatgaataaaacaagaaaagaggaaaagctcggatacagctaaaacgaagaattcagcaaaggcggaataaagcttggggtagaatccaggcacaagccgaaaagagatttgaccgatgacgttgccatttgcatccctgaagttccgcctccttcacctcagcctgatgttcagtctgggcgggctaaatgctggctggtttggacggttacgacgcttatgctctaaaccctaaccaccgtcggatcagtgagatgcgcgggcagcggtcatagtgacgtaagtatgcgcgcatgcacagggaggcaggctttttgttccgaaggtctttattcgtgaaagggagtgatgatctcatcgaccctgtgcctggcccgtgcgttctttttttcttgttcctgcctttcccttccatctgagtttctggtatatatatcaacgccttttggatccccatctctttttgtctttttccttttccctcatcaaactctactacattctcattcaaactcaaaactcttccaactcaacccttcacccctttttaatcaaaccactttacaatcatggacgccgtcaagtctttcttgggatctagccacaaggttagcatatacccttcccatttgatatgtctgtctctcccatctccctgacagattccatctcacttgctgtcatcttttaggagggatccaccgaggtctgcagtgagatcgcccctgaggtcgtccaggagaccagtaagtgatatgtggtataccttctgagactagccgattcatcttgccaatta

SEQ ID NO: 848 - DNA, 427 bp, Xanthophyllomyces dendrorhous
gtatgttgtctcgcctctgttgtctggtaactgttttctgtactgatagacgcgccaacactcttgacaactatagctattggagctaccatccagacccaggagaaccttggtgtcaccgcttctgagcacgttcaccaccacgttcatggtatgtacttgttgtccaagaacaatgctgtaccaatagagtatcctgcttacatgtctgttttatgtatcatcagagcacatcacccctgtgatccagaaggacactcatgagcacaaggtcctacatcaggtcgagttgatccacgagaagatccacgaagctcctatcatcgttcgtcccttgtcaatatactaccactattaattgcttcctcttattaaatcatcttcatccaacgatacagcacgagacgaccactctccccaccatctc

SEQ ID NO: 849 - DNA, 6046 bp, Xanthophyllomyces dendrorhous
gtatgttgtctcgcctctgtgtataaatgtctcaatcttaattctaatcgactggttattttctggtgtctgatccgttcagagcacggagctaccatccagacccaggagaaccttggtgtcaccgcttccgagcacgttcaccaccacgttcacggtatgtttcccacccttttattccatcttccatgcctcgaacattgtactgatctctgtgacaactttttacagagcacatcacccctgtaattcagaaggatgttcaccagcacgaggtcatccacaacgttcagcttgttcacgagaaggtccacgaggcccctatcgttcacgagaccaccactctccccaccatctcccttgacgagttccgagccaagacccaggccggcgatgccgtccacaaccacggagacacccagcactcgcaccacttctactctggcctccccaaggttcaggacggtcactctgctgtcggaaccaccggtgcaccatccgctatccctggtacctccacccacactgacgttgctggtcaccagcacaactctgccatctctgagaaggccgccagcgctgtcgagaggcgatctgaccgagtataaacgtttgtttatggtagctaatgtgtaacggatctgtctttgttttgcccttctattctgcctctttgttccgacggaaccatcttcttataattcatctacacaatcttcatcctttaacctacctccaaccaccagtgttgtttccaccaacccgaccacctgtctgtacttctggcggctttgtattcttatgcatgaaatgtttattatcgttttcatcaccgtcgaggacttatcttggctgtctaaccctaacgatcaaaatatcacacgcgcgtgttgttatttccgaccaacatccggacagggagcattttggatcattttctcttacaaccatcgactcctttctctctctcgccatctgtattctcccaatcgatttattcatacagagtcctcgttctcccctgtttcttacaagaccaaaaagagcgcaaggggcccaaagacgttcttgcttcctatcaactccatgccctacacatctatcctcgaagccctcgcctctgtaaacctgctcaagccatcgtctccttcttctagtcctagacctgacatttggacaatctcctagggcgatgtctcttgatccaaaaaaaaaagagaacccctcaaacaaatttaagcccaacgtatctctccttcgatcatcgaaccctctttcgtaactctgatgtttcttcttctcttctcttgtcggaagaagatagaggtctcacagagagaacataccttggatgtttgtgcctgcaactacacctcattcttcaaagtccttggaaacccgagctctagtcttgactctctttgttgtcgactgattggggagggaaatctctccctcgagtctctgtccctgtttgggggagggattttgagaatgaggtgcaagccaactccttgggttctactcggaacggttctttttctttttcctctttttggtctctctctttgagataccttggagaagaaaaaggacggcgtctgggcgttttccgtcttggttgatggagcctgacaggcggtcgatcgagagatgggtttctccccctaaccctaaatgagtctcctttcccttacccactctcgttgccatcgtccaaactggactcgataggaggttgttcggttcccctcggtcgataccacacaaagaggcggatctctatagctcaagatcccctcatcttccataggatggaccgaacgagctctacccttcctaaacaacaaggtagccaatcctgcgtccccccttcctacctagcgtaccccttcacccgatgacatttcttcttgatgtcggcaacaccgggtcgttggcgagtcctgaatctgaaccgatgttcggaagaagagaggacgggttcttgggagataaagtggcatccgatccgggagattctgtgcaaggtcaagtgttcaagcagaagagggcaaccacggacgatggtcaggtttgataggtgttggatgggtcctttcctcttctttcctttttttataccaagagtagaaaagggatgagcgaggaaagagacgagcaggtaggcttgcgactatacagaggcggatcttttcggaaaaagaaaagaggatacctgttgattgggcaacaaagagggttcccttggttctctttcttgtgagtgtagccctggagaggagcgcgctgtcgtgttgttgtttgattatgagtttacatatggaggagccccttgttttctcaatgaacaagggagagatgcatgggtatcgtgaaggaaggacacggaaattcgtgtcctttctcctgctttcttcaacttcggtcaagaaagtagtgggttggaagggcgagcatcctgatctaggttcgtctatcgatgcattcctctgtttctcttctcgtgtctccgtcaagattagggaaccaggggttatgtatatcttgccccttgacctctgactaatttcatcacttttattaggtcagacttgttctcttcgtcatcccctgaactcgttcgatgatgccttcgagatgctcttcccacttcgctggaagatatctcgtttccttctcagaacgaatatcgaggcagagaaagggttcttcggtatggtcgctcgatggatgcttcttttcttaaggagaaacaaacaaggaaagaaagatgaagattagacgaagatattgaggattcatagccttcttctgtctttttgttttctctcgaagaactccgacccatccgatcttcctttctttcttgctcgacacggtctctcctcacacctacttagtacttcccgagtctttctgacccctcttctctcgccatgttcagtagagagtaaacgaaagaagcaaacccaaagacactctttagggcaggtcatccgtcagggatctcgcccgcctcactgtgattaacccctctgagctcctcgcctggcgactctgttcaccttggtcctcttcctggtcctcgccgttctcatcgatcttccctcggtacgctccgctcttctcttgtccgatcgacagaccgtcttcttcccgaagaaagccccccttttcagagcagacgtccttctccttctattctctcgctctctcataggagtaggggaaaagaacggtcggagacatgctagagtcaaggctcgattcctgatgggagcactctttcacctcgagtgggatgaatgcacgttcagttcgatcggaagagtcgacgcgtcctatcctgtctgggaagagcacagacttggggagttgaaaatgaaatgttggctgtgggacagaagagggcaacggtctctttctctcgaaaggaggaaagtggtggacattgagctacgttcggtgtggaagtcagaagtgtggtcatcatgtaaggttctagagaggagaggttctctatcttcttttccttgaaatccaaggacggctgagtgagcagggcggagacatagcaagatgctgtgttggtacgaagaggagcagaaacagagcaagaagagaggactcaaaaggtccttttcagcttggtggattcttcggaattcaaaaacaaaggggagggtgaaagagtcgagaagcgcgcgcatgtccgtgtgtctgttctctctttctctcgaaggagtctttgatctctcctttcttttcggaaagaggacgtggatagcgagatgaattctctatgagagaacgtcgaagaccttttccatgtccagaggagttcatatcgttctttcctccacttctttccctaggttagaggtggaggaggaaactatagttcttcttttttttctttctttcttctcactcaaacttatttttctcaccttctctgatgaacgggtattttgtcttcttaagtcgaccgtttatcagagaaggtcatccttctttaattcgcatctccttccaaactcaagctcgctcatcctaccgagacgattgctttccttctgagatggatgatggagacatgtatgtgatgaacgatagaacgggacttgatctaaaatgcaagcaacggacggaaaggaacgacaaagacctaaccacccttaatcatctctattcccgtcactgtatccttcccggactcttgaccactcgacttcaattgtccatcctcctcggcacagccacaatcataagtctcgtccaacgtctcgcaatcgaacgccggtttcaatagcctagcgttgaccatattgtgtaagctgcataaccagagactagctgatttcctcgatgacgtttggggtgggtattctttcagaagggcttggaagtgctgtttgtccaaaacgaagcgttcgagaaacccattcagctcagacgtaagagcaaactgacctcgaagaaggaggaacaagagaaagatggcaaaaagccaagaggaaaaggagaagctcacggtggcgcactctccacagggatataatctagaaaacaaataaaagtaggaacgcagagccgagcgttcatctgctgtaggtttctactcagacatcggtcattcaaacgacaacaacgacaacaacaacaaccattacgcccgtgaccagccccggcatccgtttcagcgtgcaaaagagttaatgagttgttaataccacatgcactgtgatgctcggagaaaaagagtaggtgtgaggattctgcatcaagcagaaggggacaagataagattcgcacaggacttgcctctggaaaccgaagtgtcatcagatgaaggagcttccagcttgcccgacctagttcggctctaccattcaaacaaaccagacgaaacgtccccaaggaagaaccagccatgtgagacgttcaattcaacaacggttaagaagagccatcgaaaacgcaagccagcagggtcaacgacgagaggtcaggcgggtccacaaaacgacagaacaaaatgagaaagaaacagagaaaactccacactttgcagtttcattcccaagatgacccatcaccacacctcccttgatgatcgcattatctagtctatctccagatccaacccccgcagactcttttccggatacctttgatcccgaaaggacccatcgatgagattcaagatcaacacttccagaagcgaatgagtcggttgtcaggtcgtcatacacatcgggagagggcggtgatggcacaagaaagtagcatgcaggaatctgaggttcgatagtgttccaacagatgagaaggaagccggggcgatggtccgaccagttgggttcacgaaggtcggggaagaccgagagcaaggttgaagtcgagagcgaacatcaaacagacaattcgttagaagcagatcgacgctcgaaaaaaggtaacacagaatgagagcgttgacggccacgaacgactagaaggattaagcagacgagaaatgttcgaagaaactttgaatgaagaagcaacgaaggcgaaaagttgctcgaactcatcgtgatggttacagtccaaaacaaacaagtcgattgtgtatttctcatccgcggctttctatctctcacaatgggactgggcgattgaacagatactcatgaaaacataaagagctatctagtcaaaacagatgacaacatctagcgatacatagtttaagcagaatataacaaggtaagggagatataatattataaaagcctcagagaattcagaaaggtagcattttttttgggtcgagatcaacgagtcaaattaaactcgatcagatcgctgctcgacagcgttggcggccttctcgccgacagaggtcttgtgctggtggccctcaatgtcagtgtgggacttgtgggcgtggatggcagaagcatcggtgggaacaccggcagctccgtgtccgctctcgaccttgggaaggccagagtagaagtggtgcgagtgctgggtgtctccgtggttgtggacg

SEQ ID NO: 850 - DNA, 5826 bp, Xanthophyllomyces dendrorhous
acagaggcgagacaacatacctcgagtgttctggatggcaccgtgctgctgggcaagaagcgcctccttctcagcagacagcttctccacccgctcccgggtcacctcgggcgcgacctgggtgatgtgctgctcggccaggtgctccgtcgccgcgatcggctgcactcggtgctggtggtggtggatgtgtcgttctcggtcgacggcggtggcggactcgacgtggacgtgcttgttgactgaaaagagagcagagtatattaattggcaagatgaatcggctagtctcagaaggtataccacatatcacttactggtctcctggacgacctcgggtccgatctcactgcaaacctcggtggaggtctcctgtagagggtcatggcaaacagaagcatcttgttagaatgcacgcacaagaccagttggagcgggtattttggatgttgaaaaaagaaagaaagaaaaagatggcgggacgaaccttgttggagctgctcaaaaagttcttgacgtgatccattctgaaagcggtttgatgttctttttggggaaaggttgagagtatgcgcgtgagcttgagtgataggtttaaagatgtgtagatctgatgaaagagagaggaagagaagagaagacgtagaggatgattgggaatcgatctgtctttatacgatctgttgcactctggatgctgcttccttctgctttacaacctctgtcaattctcattcagtctgtgttctccatcaattccgttcgatgacgacgggccgttgtgcactgacgtcagcacgtttctacgttcataggccgatctccggctctgcacgagagaagattggcaagcgcagtcgcctctgatcagggcactgagtctttagactttcgatcggcgatactcatcgtgccctttcagcctctggttcagacggccaggcgaggggcttactgtttatcttgttctagatgaatctctatatttattttcatatctgtgatctgtgatcgaagcggattggatctcatgcattgggtcatgttggtgtatctgaatgacaaataatcaaatatgactgagatgaccaacgattctgacgttcttaggtgttaggctcgggagctgggctgacaacggaagggttaaaacagaaggaactacatgtggttcttaggtttcagagaagaaagctcaaactcctggggctgggaaacaggatagatgtaatcatttggaccaaaggaaacaaggaaggtcaaaagcagaagtaatggatagtccaggctttgtatttcgattcacaaagtggccgagaacgtccgtcttatatatggttctcagaccacatgaacgttgtagtacaatgcgctggaagtatggtgcgctgatggtatgagagcagcagtggaagcgggaggcttataggaaccggctcacggaccaagtgtagctcggattacatctccgacatcaggaaccgtatgagggacacatgggtgtttcatggtagagctgtgcttgccacagcataacccctcgatggcgtcgttggatctctgcacgtgcgtgtgtcttctggctggtctcaacgtctgtcgcatcaatcgttgaccttatctttcaaatcatacaaactcactcacactcacatccacatccgcatacgacatacactcatatacatttatctgttggatgacaagtcatattccaagtcagttcaacccgtttggattagatgcctttcttcctcttcgttcaagaggctgctgtgtctcccgctattgatgatcctctcgatcctatcgtctgacatcatttatttctttcttttcttttcttttcttttcttttctttcctttcctttttttctttctttcttttcttttccttttcgtctctctctctttttcttgaattgttgaatcacaaagttcgagatctcttgaagacagtcttcgaggtaagctccttatcagccggcgcgtctttctcatagcaatctttcacgtcttgactaacggatacaaacggtctcatcccctccacccatcatgatttagtccatcctcgaagtctttgtgctgtgcgttcccttctgctcaattgaatttcacctattaaatagatcgtggctctcatcgcagcctaccacaatacttgtcaatccagtcctgatactaatcttcccccattgcttatttaaatacttttctaaagatgtgcggcaggtctcttcttggctagagccaagatcaccgacaaagccacccagagggtacagcattctcacgcctttttctagacaacgactacatatcataactgacacctcccgtcccttttcacactttgttcttgatcagaaactcaacaagctcaacatatccctttttacaccgtgtctactcttttccaaggtcagtcttgacttatctgtccatcttgccaagccgaattcaagtgatagatatagtgaaagcttatcatctgttgccttcactcctaaaacatatacacttgttaccatacgatccttccacgcacaggtcgctttctcactctctcctgaaaagatcaaagagctgtggatcgttcctgtcggctttgtggtcgtcactggaacctcaatggccgtcgcgtggtgtctcggaactttgctcaggttgaagaagagtcaaaagtcagtacatctccttccgatcgtgaagtttgttcaatccaagtgttcttaccggcttacaagcctttttctcttctctacagatcttttgctatggtacattctctgatcttgtgtggcagatcttcgttttcttggcctcccatactgatgatccaactctttctttgattcctgatgcttctccaaaactctgtctaggctggatgtacgtactctttatgatcgacctgacaacgagccaatacagagttagctcatcgttcctcgtactcacacttcatacttcactctttacggtagccatgttcatgaactccaactctcttcccattgctttgatgcaaagtttggttgtcgaagtacccgggttgaaggttcgtctgaatactgtaccatgttcatatcactagacatatgtcctaacactacctctctcgatcgggtctcaagtggggaaaggacgacgacgatgaggctatgcttggccgagccctgacctacctcgtcctttactctactctcggcatgatggttcgtcatatgcggctctgattgggcagttcctctcttatgaatgagatagtactgatatgacattccatctaaacagcttcgatggtcctacggagtgcacctcttaacccaggcggacgaccctgttgaaacgtcatcctctgcgctcgaaaccggctcgtcccctgtccaatcggatgacgcgaatgcgcactcccggacgcccactctcgtgactactagtccttcatcctcgcccagtaggcagttccgaactatcggtgatgtggaagatccctggaaagatgtagtaacagcctctgggtcgaacgggcacggccctagaggccttgaggtggagaatggtcatggtcggcctctggtcaagggaagaaagatgagctttcactcgttcccgaactctccagccgagagtatcaaaggtggactgagcgagatcgaggatgaggttgatggcgaaacggaagaggacagattgctggatggccagagggaatcatcaaaggcaaagtggagtagaaagttcaagaaattcctcaaaggagtgaacgagttgttcgtccattctcattcaaatctcctctcccgtcgggctgaacgctcagttttcatccataacactgatctttcccatcttgcgttattttccactacctcttttgttcacgatcatgatgatcagcatgactgtaccgttagtatttgatttactttatgaccgatcttcagatataattcttttccccgatgttgctggtctaatgatcaatccgatcttttttcccacttttaccgaccaaacatacagtatgtattccgttttgatctcaattctaatcgcaatgattcctccggttcaggccacgctggctcagctaagacctatccgggaagccatcaagtcatccggccaatgctcgatcccgttgactttgattgttcttggagctgtacgtgcgatctctccctctgagattgcttctgcaagcctgcttttgactgacgagattcatatcatcctcccttcgctgttttacttctctgctgcgttgtttctggcacgtcgtgatacgatcaactctcatttagtacttttggcaagaaccaggtgaaggccagcctccagtcaccatcaccaagccctctccctctgagacatccacgactgagccatatgcgtctagttcgacctctacctctacctctactgcggttgtatctaagcagaaacggactggtggttggttccgaaagtcaagaaagaatgttggatcgattgctttggcggatgacaacgaagacgagaccatagtggaagatcaaagacctggagagacgagaactgtcattgtcgctatagtttcaaggtgaatctccttttcattttgcttactactgttcctgtaggggtcatagacataggtcgctgattaccaattgacgaggggctatcacaggatgataatcactcctctgattttacttccggtcatcgcactcctggcgatctacgactttttccctatcagtttgttccattctctcagatttttgctttgtcgtcccgatttacgaggacttgagctgaccacactatttctaatactcgtcccctccacagctgaggacccggtgttcatcttgacggccgtcctgatcgtctcgtccccacctgcaatcactttggcgcagatcactcaaaaggcgaagggggatgctttcgagaggctcattagtaagacgatctgggtatcgtacggagtgttcaccccgccgttaacgttggcatacgttgtgcttggtgcgtgttcgattttctttttaccgtcgtctggattatccccttcgcaaaagtcaatcgctcatggtaccttgatcttcacatacgcgcgcttgatcgtttgactctggttctaccattcagggctctacctttctcgattgtaaacaaaaggaccggcatcttgacgtcgcttggtttggctataaaacaagccatacacttcctttccactctatatctgatttttttcttcgatcaagctactatcgcgttagttaagaatttatcgtatcccgttgtctttctcctcttctatcattgatttcatctttctttctgttccatctcatctttttccattccactctgctccactatttgttcgatgttcatgcctgcaatattcactatccatgttacatgtctccatgcatatctatcgatagatacacgacgtttctccataaattttctttttctttctacatcaatctttctccttcctcgtccgttttgttctgcttcatttcattcgctcgcttgataaagaagtcaaagaggttctggtaatgataaaaatgtcccattttgtccagtctaaaactaggcctctgatcagatctagatctaccgaagagacagatagttgactactacgatcggtctgaggtttataactatcgaggatcgagtaccatcatgggcaggacgatcgcttgttcaccttccgcctggggaggaaacccgatgtcaccaacgtgtttgaatcctagggtcccggaggaggtcaatggaaagaagaaagaaaaaaaaaagaa

SEQ ID NO: 851 - DNA, 21475 bp, Xanthophyllomyces dendrorhous
agaaagaaaaaaaaaagaagagaagaagccgagtgagtgatcaggataggacaagacatgacatgaacttgcttggtagttgacgagggaagcgagcgagcgttacctagtctttcatataccggcttgccctttgaggcaacaagacacgacgtattgaatgagccgagttgtgtcagatcagctcgtgaggtctgagctagatgagaaggagatagagagaaaaggagagcgaaggatcgcctactcacagcttccgaactttcaagatagacctgaagaccatctgctctcgctcgggagactccatactcgaacaaagccttcgacacaccctggccttggaattcaggatcaacccagagcaagtgctatatggatatagatagtttccgagtaggcaagaaaaaaaagaaaaaggtgatagtaaaacaatctttatcaatggaccttgacatgttgtgagaatcgcatcgtcgaggcgagcagcaaggtgtcagagaagggaagatgacgaagacatagacgcactagataccaatgcggcttgcccttatagtactcctttcgtctgtcataaagggtctgtttgaacatcttggcgaactcgacgttcacccacttgtccgcctccctttctgcatccgtcttcattgaatcgagtgctttctcgtttgactctttcaacttgatctcctcaggtagccactctccgtcggttgatgtacggtcgacaggcgacgaccagaacgcaaagccgatgggcacggacgggtttgacgcgagggctgcctggaactcgtactgaaacggaaagagaaactgtgaagatcgctgatgactgatcgccctttgcgctgcttgaacaaagacgtgagatcagcatgtgtttgtcgtccgttcgttgatccgtgtatcgaacgaaaaggccggtgttgccataaaccagctatcaaaccgccaagatgagaactgattggacggacttatcttgaactcatacggaggcgggctctctcctgggacattctttttgaacctagaacctagtacggaatctttaaatgcctgctctttggagtgttgcagagagtagaaatcagactcttgagtcacgggtgagatcacaagctgcggtcgttgatccaaagggaggacggaggaaagattgggagccattccgttttctgatcgtcttgctcttccttcgtggatggattgcttcttcctctctctcctccttccgggttgcttgcttatatagtacttttagaacgaaggaatggttaaggacacgcgtgaatgactcggccatctcgttgtcggcgttgcagccggttgatcacgtgccagataagattacgatcggacttgaatcttgcacgtcgatcagtcggtagcgcaaaaacgatgatagagaacgatgtggttcaagtcttagcaaggacgactttccgaaaagcaggatctaacttgggaatcttcatgattatcataatgctctccaacctcctcgctgatattctatccaatctcgcttatccatcctgtccaagatatattcgaccttgatttcagacacaaagtaccatctctcctcactcgatttgagccttcgcataatcgtctgagtatcaactccgaaagggggtttaatccctgcaggcaaaatcttttttgaccgagctctgatcgaagcgttctcagtgttgatcaatcgaaggagtaccggaccgagcgtggtcaaatgaagtgggaggtagataggtcctgagaaatcagacaacccgtcactgtcgcgagcagggtcggtagacacaatttctccttcacgaacgagttcagctagaacatgttccatcagattgagtactttcccagctacccatgtcggggttttcagtttggacgtgtagctctcttctttccgtttcctcctctctctctcccttctcctagtggtttcttgttctctcccatcctctgcttttgtcgtcatcgccaccacgtctccttcgtcatgttcccaaccagttagtccctccttcgtctgcttggattcgagttcgaccagtgagaaccaagcctcatgcttgatcctcttccgtcttgattcattccccatagccgccttctcttcttccctctccctcagaatgtcctccctccttctcttttcccattctttagcagttttcttgacaatcttttgagcgtagagtagcagatgaggtacccttgttaatgaccgagctgagaaaggagggcctgctggtgattcggaagataaatcggattgaatttgatgaaagtaagtggatgtggacaacgaggtggaagcaaaagaaacagaattcgagaacaagtcggacgaaatatatgcgtcgatggatgattcgtttcctatcgagatcaaactctgttctgaaagattgaaatgactcctctcctttcctttccttgaaaccagattcgtctgatctagaggtcgaggataaccccacccggagacagacccggagttcaatgtccgaagttcactgaaccactccctgacaggcccattgtcaagatctcgctcggtctgttggtcccacgcgattgaaatcagagtggccatgtgttctttaatccatagcttgaactcgtcgagtgttgtctgatcggatggaatcctggatgggtctcgttgccgactacgaggttcgtcgctcttggatggagtgtacgtctagatcgtttgtgaacaccgtcagaaatttcacaagttatgacgatattgggtgtaggtcaggacaaggagaaacataaaatactcacagttccacgtcggagaggactagaggcgttgcttagtgcacagacggatgaggattccgatatatctgaaaattcaaccgagctcgatctgtctgaccttccacttcctggcgattcacacgcgctcgttctttttgaattagccttgtttgacttcggagttgatatggacgtagcagctgaggcgcgtttaggtagaaagggagaggatagatatgttgattgagtaaagtttgggaatacctcccggcggaggttcacgaccagaatggcgtgaagtgattcctcattcagatccgttcgaactagtggagaatgagggagcatagctttttgagtcaggctcagatgaagaaagagatatatatcaaacgaaataacagaacatacagaggtcggtctgagtgaagaactgtaggttgtccatccactttttaaccttgaccctaactctggttacgtcccctatcgatatctttggaacatgaaccagattcacgccgggagccgaagagtcaactttagttttgggtaagagcggtttcggtggaacgtatgatttgaacacatttttggaatcactctcgccgtttctcgcaggggaagagagggaggtagaggcggaagatgtcgatgtccgtgatagacgtgttgttctcgctattggtggttgaggacaatcctgcgctttccgagctaaggtagcaaagttgtgcacatatctgatatctatattttgagaggatccatcgtccacttcgatagggatggcacatcgcgatagttcaacaccactagccagctttcagaaggtataatcagaggtagaagacgaacaggtgtatatagtgctgttttccttgatgtctattgagacaatcatcccgacgagctccacatatttgcacggaaacgtgtttaataagaatatgtcgactgatggtttaatccaagacagaacgttaaggttgcgaacagcctgtttgtcaaccaaacacgtagattccttgatctgaacgcgagagaagcacggacgtacgagcaacttgtttgagagcttttgcgtcgtcaactgagcatcttgccaccgattcatccctaagtaaccactgatcgatcgtgtaagggtcgtccaccacttcaatcacacctgatccaagtccatcaggagggatgtgtactaggttggtcgtgattggtttgtagaatgaggtcatagagggagggtagtacatcctcgacggcggaaaggctgaaggaggtcgtttaacgcgagtgatattgtgtttggtagaaggggcgagaatggacattatgcattcattagaaagcaatgtaaaggcctttgatcaagttgtgtgtgtgtgtgtgtgtatatgagagagaagaaggaaggatcgaatagagacgaaagaacgaaaagaaatcgaagacgttggtcgaatgcgagtgttgctcaaggcgatgaccggaagtcacgacggtgcgctcaaaagaactagcatacattccttctctatactcttcatccaccttgacgtcctctatatcctaatccacatgcaaccagacacgcacgagtgcacactacttgagcgcactcagttctacccaaactgatatcttgttgttgaccaggtccgacatcatcctggtctgtttggctagtaacctggcttgactgcgcaaatcgattgatgattccattccagcaaacatctcgtttcacaaggctcgagaccttgacacacactcagcatacacccacccagatacctacaactgtacatcttcgaggatcctccttgaagagatagctgatcgatatacaactgttatagacgatcatttagttcggactccataggacgtcatgtccgtcatcgtctttagggcacacgatggctttcaaaccacattacctcaagcccattttgaatcgtccgtcctttctgaatatccaatcttcttgaattccatccgttccttctgaccgatcttgttcttgacgctttcaatcataagaatatacgagctctgtcaagccgctggagatgcgcttgaagttcacccagactctgtcatcctgttcttcgccaacggcgatcagataagagaagagaatgttctgaccgtcggtagggaggacacaagtgaagttagccaccgttctctttcaaccgtccttctctatcctactcctgcttctcttctttgatttgaaccggtctttctggacaaacgtcagctaaactggatcgtacttgcttttccaaagattcatctgttctcccgtgaaatcctacaacaggatccgagcataacgatccccacacttcaccttcacctacctctgccaccctcgacgcctcccgccaccttatttcagacgtacctcatcccgatccatgattctcttctagctcaatcgttcgccctcaaccttgccacgtccaacctggcgcaccatctcgactcgttggagagggcgtaccggtcatttgcgcctgtcgcccgtcgggaacttgataggcaggcagacttgttagccggatatgaaggaagtctctggctagcgggaaagatcaaagtaggcgctagagttgttgaagctgctgccaagaacagctctaggggcggagagagatatctcagagattacgtgagcgagaagaagatgggtattgtcagggacgggtgcgtaaggctgaacggtgcgtgtattaaatacatatactctctctttcatttgccctcgtaatcactacataaaattcgtggtcggagactgatggaacaatggtcatgaatggttgtatctaacgatcaacagctgagctctcctcacgattcgaccaagtcgatgctgagattgagggtctattggccgactcggcagagctacggtcaatagttgatggtctcaggtatgtctattgttgttcatccagaattctgtgtgattccaacatttgctgaacacttcctttcattccttctgacacgcagcttagctgaagctgaagaatgtataggcgtggcggacagagttgtaaagcgagtaaagaagatcgaacaggacgaagaatgcgccgacagtcagtgatgattgatacttgaatatcttgacgacggtagcttcataacatgctgagctttgacattgaccataatatcgtcttttaacagatagcgactctcgaggtccgtgcgatttagttgatgcgcaccaatagctttcatgaattgaactaatcagaattccccttcctaactgtcgatctcatactacatttagagcttgaagatttggatcttttaattcgacaaaagatcgagcttcatcttgagataaaggtagatgttcccatcatcttttctgagtttggcctttcccttaagaatttttaatctctaaatggcaactatgttttcctttccagaattcatttaccgcccagatggtccactcgctcctccggatatcgagtctccaatcgacgatcgccatgctgcccgacagactaacagctttggaaaatgatttgcgcaatcgacaaggattcgctcatttaggaagattagaagctatgccaggcgcgtatggtcgattactgatcgaatgtgtccgaagaagagagtttggtatgtttttggctttcactcttttctaaattttgtctcgatttgaacgttctgggcttcgccattgatttttgggttgtatgcatcggttccaatccgttcgtccaatgaacacgctgaatgggctgggtatgtaaatagcgaagtttttcttatccacctcccaattactcgcagagcttatggccaaactcgtttcttccgaacggaaacgaagagaacgatatagggaggaagttcatgggatgctaccttgggatccgaaaggactcgatgtagccccacctgctttggagttgacaactgctggaggagaatcggatgacgcgtttctgggaatcgagagatcggatgtggatggttcgttatgtctacttgtcctgatacgctgtgctgtcattctacaacacaagagatctaagccttttgttctttcctccccccccctcccttctccacagagtttctgacttaccttcgttcgctcgaaactgaccccgaatacatggatctcagattcagagcaaagacagactcaacaactaatgaagaaccatgtccgctggcttctacaatatccgaactggagaagcatcaggcaaagattgatgacgtcgttctggagtttgagaagcttgccgaaacttcttgtgggtctgttctttgattgatgatacggagaaatctcgccagagattctatattgactggaattcatccctattccttttctcaacacaagtacgacaccggcaaaaaacatcgaaatcaaagggtatggtcgactcgactatccatcaagaactcgttctcagaatgcaatcccttgaggcagaagttaccaccaaacaatcagcaattgacgagctacaagcaaactactcgatcgctcaaactgagctgacgattcttcaagacaaagccgactacgagacgaatcaaattgatgtgctgtcgaacgcactggccgctctccaagccgaccacaaaggcttacaggaaaagtttacagagcttcggctagaaggcgaaaggcgtacgtcagattcaaatagggagagaggaatccatctcagagaactcgctcaggctaggatgaaaatacaggatatggaagaaaccttgtcgggagcgagagaacagttgaagaagcagactcaggacatcgagaccatcagaacggagaaggaaaaggaggtgaaggaaaaggtcggagaggcagagagggtactgagggaccatgtcactgaggctgacgggtcagttcaaccctcatcatcttcttcccgtttctttgttttgtctatactcgtttctaacgtctgctttgctcatcctttcccttcgtctgtaacagtgatcgagccattcttgaacaccaagtgtctcaacttcaagctcagttggatgaactcaagcaaacctccgaaacatccctccgatcggtcaaagatagatttactcgagacgtcgatactatccgagccgagcttaaatttgagaaagttcagtcgaagactttcgagagaaaagcgcaacagctatcttccgaagtacagacactacaggcctcatccttagagaaagaacaagagctgaggttgactgtcgaagaagctctcaaagtggcgactgctttgaaaggagcggatgagaggttggtggatgtgctgaggtcttcatcgatgggcgcttctctagctttaccacctttggtaccgatagtatcgcctttgacgaatattgaggcatcgaaggtggaaaaaactgtaacaggaaaggagaaggaaggacaatatcaagaatcgttggggaggttgaaggcatacgatgttgaagcgtttgaggacttgatgctgaagacgatgaagctcgtcaagaagtggcagttaaaatgctcagagtaagttctctacctggctttctttcttcaggcttgttgaattgagtctctctctgtttccgtgatattctactttttttaatttacttcagacaccgagacagggcaaaggacaagattgcgattggaaacttcaccatcaatgatcttgcacttttcctccctactagaaacttcagtgccgccatcagaccatgggcagctttcaatggtacgtcttacgtgatagccaatcgacaaacggttcttctcttgactgtttttgttggttccgatattccttctcagtcaactttccacattactttttgagtacaacatctgcccttgcagagtttcttttaactgtgagttctgtcgtatttgtctaactacactttgagttgaagcaaagtcggtattggacagctacgctgacatcctgtgttatgcagagagagtattatctggctcgtatcactcagatatctgaacaaacggtggatagtcaggtatgtattctctcaaagtgtctttctgttcgaccgctgtctgtcacgttgcatcatgtctgacggatcgtttggactgttctcggatggaattctagagcgcaacatctccaacaagtgtggggtaagtggttatgccttcataaggtgaatcatctaatcagtttgaactcaagtctgtttgtccatattttttttccgttatcatcaacagactacctataggaactacatacttgtgagtcgatgctacgatgaattggtctcctatcaaacatgaatctcaactaacagttcaacacctttgtagtgtccttgaaacgagcgagttctctcccactcccatccggacgcgttcgagacggataacgtcccactctagcacaaccgccacaccatccgaaggaaaatctagacgaacgatctccccagccgtttctccaacattacatcgactaactagtcgtccactccgagatcccatggcgggtgagactgcagtacctgaagattactttggtcaaggggtttcatcgaccatggcatctttggactccagtctattaccccagacatttaaacgagactcatcccctgaagcttcctcctcctcacctaatacatccggaatctctatcccttctctttccagagttccttcggctgggatagccggagatagcacagatactgatgttagcacacgaaccaccaccgccaccgtcatcacgggtatgcctgtagctaatccaaagaccaactcatccatacctattcccattcctgcatctcgttctccacattttcatcctccaaaagggagagcgccttcggtctcttcttcttcgtcttctaaaagaggtagtttcaaatcgatggcgggtcgtccaccatccgtttcttcgaaagcactcgctactataggcaccaccacgatcggtcatcctacaaccggtcagcccgatgaatcctcgtttgcggccgcaacgttatcgaaaccaccttcgtctacggacttggcttctcgattgagaggggaagatatcagtggtggccagtcgttggcaggtacgtcacccggtaggatgagcttgttgagttctgctgtggccgggcttgggttgagcaagagatcgccgagagcgtcgttcagtgtgggaggggaagctcggcccaccaggttggccagagagttagggatggatgagggtgatagtcaggagtagtgaacggtccgattgacgtgctcgatgatggtggaagcttggatttctttaatttaatatatatttttcccttctctgtgaaacattgatgacattgacgacgataaagggacagagcgatggttttcttttcgactgtttgacaaaagaagaagataaaaaaattaaataaaaaaaagacaaggtgcagtttaatctttggaaggagcatgtacataagggttacgtcgatacagaggaggatcatgtatgatacatatattgggaggaaaggggaggaaaggggagtaaacgtgagatggcccaaagctcaagtccgtcttgacctctgtttcttttgcaaaaagtcttcaaagaactctttgatatctcgctcgctgatcacactttcctccccgatcccgcttccatcggccagagcgagagcccgtcgctcggccgtccttgtccggaagaaggtgatcaggtcggctgataactcgttgaaagcagtgatagcgtccaaggtttttccacgaggaagtgcttggaggaggtttgagagcagaatatcttgggcttctgccgagtcggctgatttatacgaagcagcaacaacaacgagttgagaggaagatggtaatcaaaaaacaaatttaaacggagtaaggttagtcggatcaactgttggatagagaggagtagatgaaaataaagatgaagaatcaaacacggaccggaaggtatggcagaagatgagccctctgtctcatcttcttgacttgaaggtggccaggattgttcttctttcaagaggaacggaagttgtttgaattgatgtttatgctgttcgctccgttcatcgggggtcgatatcagtgtgttgactcgatggatggaggctgatcaagtgcagcgaggataccaagagaaggaagcgagggtacgcacgatatcacaaacacaccaccgatccctgaacccatcctgtacaaacatatccgctctcccatctttccactcactatcgtgtactgtctctacctttccggtcttctctctagagagatagactgcttcccgcctagtgatgagcgctccgagcgcagaagaccgggaagtcgtgggatacgtgcatgttgtcttccgcttctttgacggtgataaagcggagggagagggggataacggacgtttgccgagaccggtcgaattgatcaccttggctggctcgtctgacggtttcgtctctttggcctccgccgttccgtccttttcaggagcgctgttcttttccccgccgtctccttctccttctccctcctccccctcgtcttcttcgccatcatcaaactccaacagaccctcgaccgtccatccggatccctcttcggatcggaccaggcagggaaagccatctctgccgaggtagtccctgagcaccggtctggcgaggacacatctctcgcatatcaggtgatcgtatgcgtcttctgaaaggattggttcttggtcttgatctgtctctgggcctgcgcctgtggagagatcggatgaggaagtaggagaggtggaggcaaggaggttcaagtgggattcatggtaccagtcctggaagaatcatgaaacatgaaccctccgagtcagtatcagtctcctgatctctcacatcgtttctcatcgtcaaggaggaaaagaagaaaccggcgcacctcacaaactaaacattgaaccatcgtctctacctccctctctggatcatacactgtgtcacaccaacagaatctcccagaaaagttgtgattgtatcggtttctcttgttcactggaaatttctgtttctgccggctctctccttgcgcgtagacttgagtaggtggtgttgacgaagacgaagcttgaggctggtcctgggtggaagatgatgacaaggcgggggtgatcaaagaacacgaatggtgaggaaacctttcggtcggacagtcgcatctgaacgatctcttttcgaatagttccacaaggtcatggtcttttattattgtttaggtttcatttagtttccaagttccgtcgtggttgtttccgtgtttccaaaatctgtggtcagctctcaaagatcaacaggagtaggaagaaaggacgagagacgagaacggtaggaagagacgggcagacgagcagacgaaccggaatgacaactgattgaacacccaaaacaaacgcctcctccgtccaagccttctttgacaatacaagttcgacatgaataaaccctttgccttggaccttcccgttcctgttctcgttcagatacatctccttccgtactaccggcagtgtccttttcccggccaaagacggtgttgaaagaacaaaccccgatgtcgcctttgaggacttcggccgcctcgtcattcagctctgcctgtctttggagcaggctcgagagagaatacgtctggctcggatctagtgtctgaaacaacgttggttgaaggatcggagcaggttgcgagggtgtcatgatgataccagggtaggagatgagatgaaggatggggaatggggaatgggaaggcgagacgcgattctcgtctggaacgttagagacgcgtctttgcttaacgtgtatgttcgttcatcataactttcactcgtcatctgtcgacagccagcaaatctattgtcggctgtttcagcaactagacgaaaagagatggacaagaggaagaaaaagaaaaagaaaaagacgacgttcgatacgttgatgaagacaaagacggaaagagcaaggaaaagggtgcaaagctaaaaagacttccttgctttttcttgtctggttgctatgaattccaactttctttatatcttccctcccttcttctcctgcgccgtcgggtcaaggtatttacaagactggtacaaagaactttgtatttttatgttccttcctctctctcctattcctgcagatccgtctagaacctcacctccggtctcgttcgctttcaaagggaaaagagatgtaaaagagggtgagagaaatgaagaaaagaggagtgaggagccaagatcagagaacaaacgcgaaggaattcgtttgggaagagatggaagagaaaagaaaaaaaaaagggaagaagaaaagaatgggttgatatttgaaaggtagagaaagatgaaagaaggagataatccttcatttttagaaaccccttcctctgctccttccgcctcgtccgcctcgcatacccctcccaccacgcatccctcgaccaccccgagcgccagctccgtcctccttctttgtctttcctgctcccttgggtttaggagcgtcgtccacgaggagagtatctaagggaagcgagtccggtagaaggtagtatcgaatcgtgtttcctgcggatcaagaggagtgaggtgagagaagaggagacgcggatggatgaacgtcggtcagcaagagcaaaggaacacatgaaacagggatggggaaaagaagaaagacaaacctcggatagagagagagtcgagtgattgaggggacgcggcgtttcggattgttagcttaacggtcttcaagtgagtgttcatctggggatccacagctgagagacgacgtccggttccaacacaaacacagaaggagcatgaggtcagcacgggtagtcgagacgaaattcgtgggaagcagacaagacagctggttcccggcactaaatcagtgaccgttgattttgtcggatagctcaaaggtcacacacaacccaagacgcatccctagatcatcacactgtgcatcaatccttcaggaatcccatcttgttggtgatccttccatgatatgatgtgcagtacgccacaagctgtccgttctgtgttgtcctcgtcccggtcttgcggttgggagaaagtattgagaaactactgacctacgatcgtgccgtggatgaccgagccgtttttgagctctatcgtgacggtctcattgttgagcttcatgaggaatctgttgtcggtggagagaaggaggaggaggataggaaggcaaagaaagacgacgtgaagacaaaggagagtcgaaggagatcatggtaggcaggatggatcgcgagtttagagcaattgggaagtaagagacgatcggacgatgaagggagaagcgttatgtttgcggataggatgccaacacgacgcgtttcaacgggaaaggaagaggttcgacccgggaggtggggggagggggtttgtttttccacgtaagcacggtgagcgatgtataacacatcatcacgattcagacgaaagagatcgattacgagtaggacgagcagacgcagacgagagatggcgtgagggataggagaatgaggtggcatggacacacataagtatatacacacgcagacaaaagagcaagatgacgagccacatggtcagcgaacgttctggccaagcgatgtgtgagagagaaagagagagaagatatagaaagatgggtcgaggcaacctgaacggaaacgtcttgggttgtttccttcatttttttctctcctcagccatccgaacagacggtcagacccagccgagggagagatgaagggaagacgacggagaacacgggcaggacatggacagctacagatgaactacactgacctaacaagcttcatactgggcgagagagaacaagacgacgagggacagagggaagagagtgtgtgtgagtgtgtggtgaggttgggatgagagacgagtcgatgggcgttgaagagaaagagaaggatggaaaaaaaaagcggcgtgggagaaagtattaggacatttgattacgatggtttgtagtgtaagctcgaggagtattaggatattttgtagttctttctgggcgtccactacaaacatctgtagtcttcctttgtagtcttccgccttgtgccttagtttcctttccttctctccctctctgcctctctcatacacaacagatagaacagcactcgatgttcgaagatcgacctttactttctccttcagtagtcggcatgggttgttgggctgctggcctgcttgctttcttgccgacatactgtcttaccaacacgctggatcgctaacatgcctgctaacatgcttgctggtccgctcggtgcgcatacactcactcacactgaccaagcttggtggacactggcggttgtgctcgaccggccgtcacatgttttctctgttcctgcgtttttcatcgatgtgcctgttccgagggggatcgacctcgccctgaatgatcgccctggatggttgccctgagtgtccgtgctgtgttcctgtcctggaatcgttcctgggtgtccatctgttccttgacctcttccttctttcacctctcattccttcattctctcgtctgtccatcgatcgatcgctcgctcgcttcgtctcttctttcatcactccatcaccatgtctgatcgctcgtccacacccacccagccagaagtttgtccatgttctccttgtgtctcgcccgcctccaatcaagagatactcacccactctccatctagtccctcgaggtacacaccacaaccctcgatccggtcgttcaggaaaagagttactacctctccccgtctctgtttccccttgtttgtgactcactgtctgatccagccctttcaactcccttgccaatcaaccgagaacaccagtcgagaaacacaagcatgtcataacctcgaccgaggtcgacaaggagacccataaagtacgtcgatcacctcgcggccgtgatcgcatcttaaccaaggtgtatactctgttcttgcgctaacaccgagcaccgggccaatcgaacgaagcatcaccatcgttcgtgaattctctctctctctccatcgcgctaggtaagcaccgagaaggtgatcaatcccacgcgctcatctccccgcgcgctcctcatccgtacagaacacaggatccaacctgtgcaggaaacagtccatctccctgaacaacacgtcctcaacgtccagccttccatccagaaagaagaaatcaaccccttgtccaaaagcaaggcaaagcagctcgagaagcagcatcaccagatcccaccttcccgacgtacgtcactctcttctcttgctcgtcggccgtccttgttgaaagagtctaacccgacccacccgcctggtccgagacttcaagggaccgccgaggtagttcggacggaacagactctcataccagtagagtacgaacatgtacaccaccatatcaaaggtttgccccttcatcctcctcgtgtccttaccttcgctattgatcattcaaaatcggcgggatcatctacagagcatatcacccccgttctgttcaaacagacccaccggcatcgggtcatccacaacgttaccccactcaggcagacagtgtgggaggaaccaatcgtttaccggactgccgtcctgccaacccgtacgttcgattccttcttccttccttggctctgttctcgttcgcgtgtgagcggacgcgggtctcaaactatccgggaacttgtaccacctcgtgcgcatacaccatcatagtctcactcctagagtttgaggcgatgatcggccagcaggttcctggtcaagatcaagctagagagcaggcggccggatggaaggcagtcagttctttactatctcagtcatctctccagagtctcttcttttttctttttctctaaatacgggtcaagatttttggcaaaaaaaaaatgcatcagaaatcctcagtggatgaactataccgaaccgagaagggtaacgcagccaagtcatgaatgccaaacaccaacatcaacgaagactgcagtcgatctagaaagcgacgtccagacgagtggacgatcgaatgttgtactatgtttaacgtctccgctcattcaatatgcaattctttctatacacaacatgtgagcctgtgaacctgatcaacgatctcttcatcttgagcacatgagagcgatcaaagacaaagctgaagatgttcaaccaactatttgccgggcaaatctcgagatgtatctcttagacgtagttagggttaacgaccagaatgagattctcgtccatcatctctccacttggctcatcacctccatcatctctggccatctttgccgagcatccaaaccatccatcgtgcaacgagtctccttaggagctctcttatcgatggcaaaccttctagaggacgcagcggctgagtcagttcctgttcactgttctccttggctgggaaaccactaacgacgatcgtctctcatctctcttcctcagctggcagacactggaagatacgttctacaggaacgttcatctgtatgatctttcatggacagtcagacatctggatcgattctatgtatctgtcgataaaaacggaggccctatcggtttgtctgttctctttcttctccttccgtcaacgtggcatatatagagggtccaaggcggaacgaaagcttgacgacgtttcggattcgatgctgatgatggtcctactttagctatgttgagaaatccaacaatccctacaccttatacctcgtcctcttcatcttcgacctctcaaatccagacgtatacttcctcctccatccctctctcaaccgtccccatgtcgactctgaccacgtcctctgcgtcgtcgtcatcgtcctcattcacccagccaatcttgttcgaatatataccaggcacttcgtacttgcttcttctggctgaagactcaacatatcggatctatcctcctggatcctcctcctccctctcatccgcctcggcttcctcaaatccgtcgccgtccggctcgtacgagacgttccagatcggcggccaggtcgggatagaagggatcagagaggcaaagatgtatgacggcggattcgtcgtacggacgctgaaagggtccttctgggatgtcaaactgggaagaagggagagtggctcggtagggcctgtagcagtcggaggggctaaaaagctggcggatgtcaagttagctggagagtcagccggggaggacgtagctacagcaggcgaggttgggtgttgggctgttttggaaccaggagggacggagagtaggcagataggcgtgcttgtcagcgttgacaagaccttggtcagtctcgacgaagaggattgtgtagatcaggtaagggtccacccggagttccgttccctcctctctctctctatctgctgtcactcttgcgcgcgcatacgcgtagtcaactgaccaaagtttccctctcattccaccatccaagcgcctctccgctggtccattcttatcgctccatccatcgccatcaggtcgactgctcgcccttctcttacctcctcctcccacttctcctcattctggaccttcgatctgggttgtctcgtccgactttcagacatcccatgctacaatcccttatagttctctcttaggtgcttctcccgaccaagccgcagaggaaatcgagagatgggagtctagcgggggaggcaggaaaccgagtggcgtgggatggtgtggtgaggacgcggtcggttgcgcttgggacgagggaggagaagacgggggaggaagggtcgtgctctgtggaccagggggtgggagtttgaagttagtactctccatgtctttttctcttcttcactctcgcttgagccagcttcttagatttcccactcacctgccattcttacgcaatataacgatatgaacaaacacataagatatgtatactctggtccggttcatcttgtgacagagatcgacggtcttcgtgtcatctctcctgaatctagtgatttcattcagaaagtccctcgtaagttcttcctatatccttctgatgtcctttctatgtccttatcctctggttctgatcgctactaccgaacaattccgcttcgatcttgactctcaatactgttgctttctacccaccccatagccccaatcttgcatcttcttcttcctggctcgtctcacccaacgtcacttctcctagaagcctacaccgcccatctcgctcgatctcttcgctcatcctcccttctccaactgctccgtccagatctctcagcagctatattaggtattctagatgctgccgttcatctttgggcaccgggcatgcagaaggtctgtctcaaggcagcagtttgggctagagcttacctcgacggcgaagagggtgagggagatctaggagtggccgaaagagggagagagctacgggtgatcaactgtctaagagagtgggacgttggcgtcggcgtcagctgggagcagtacgtgtcgtgtcgtctttacactcttgtttctttttcttcctttcatccttttcgtcctttgacaagaaaaagtctaatccctctatccttctccctgttctgggaaacctgttctgaacgaaccaaaagatacatccgactaccaccgacgacaattctccagctattgaccacccggaacatgcatcttcttgcccttcgcctcgcctcattcctatctcttgatccagatccaattcttgaacactgggcgtgcgcaaagatcacgagtgcgccaggaagggatgacgaagagctctgcagagagatcgtgagcaagttgaagggcggagtcagcaggatgtcgaacggggcgggcgcaagcgaatccggtcaaggaggggtagaagaggaaggcggggtcagaggaaggtttgcaggtgtagcaaagatggcgtggggagccggaaggaaggggctggctactctggtttgtcctctcttcctctctttgtttctttccttccctttctcttctcccttgtgtagacaagatcttgtcctcaattattgggtgtctggttcagttgttgaaccatgagcccagagcggcgaatcaagtcccgcttctgttgagcatgcgagaggatagattggcgtttgataaagcgatcgatagtggagatacagatcttggtacgttctgctttttcgaattggtaaacaccgtcatagaagctaaggtcatatcaatatgctctctccttccggaatcaagtctatcatgtcctcctccatcttaaatcccgcttggtgctcggcgactttttccgaatcgtagacgacagaccatcagccgctgcgcttcttgagttatatgcaaaagagcaggacagagagatgttgaaagatttctattatcaggatgataggaggctggagagtgcaaggttgaggttagaagagggttatcagtcttcggtaaatttctttgacttcttcctttctcttcttcttctcctcctcttcctattttcttcttagatctgggaaggctagattcactgatagcttagtggttgatggtgaaatcaaataggacgcaaccgaacggttggctgcgttcaaagcggcttcaaagtttttctccgaggatagagatctttcattcgaatcgaaggtatgtctccctataccgctgaactcgccaacttccctagctgatgtcatcttatctatcgacattggacttgatccccaagacgatggacgatgcctatcagcttcttgccgctcaacggcagattgagaaggaacaagagaacaagatttcactcgcaggcctctctgtcaacgggacgatcagtgcgttgatcgctggtggttacgggaaacgagcggagagagtccgggtggatttcaaagtacctgataaacggttcgtccatctctttctctctcgctgtttccctcctatctccctttgtctttcatgtttcatgtgttaaataatgaggactgtttgtgctgcatgtaatccctttcaaaataacaatgatactaataataaataatatctatcacaataggtactggtacatcaagcttcaagcgctcgtatccgttcaagactggccttcgctagagagtttcgcgaaatccaaaaagtcacccatcgggtacgagccttttgtgaatttgctttgtgcaaaggggtttccgagagaaggtgctcggtatgtcggccgctgcgagacaaaagttcgagtcgtaagtttcctttcttgctttatgacgcaatggaaggcatatctgatctcgtatttacgttctcacccggaaaaaacccacatcaaaaccccaccacccattaaaaaaaaacaacaacaacaacaacgacgacgtaacgattcaaggatttgtatgtgaaatgtggagattactctgctgccgcacaggagtgtaaagaacgtggtgacaaggcccgcctagagttcgtcctctgttgaatactctcaccttcttgataaggaaacctgctgacctataaattctctctattcgaactcctttttt

SEQ ID NO: 852 - DNA, 66396 bp, Xanthophyllomyces dendrorhous
ttgaccgatcagacaactaagcaaagctgcgccttcgactctggtcaaacgggagatcgaagctaccttagctagcatgagtcgatagcgtatatccttcgaattctatatgaattcctgatcggttggacttgtaacaagggagcatgaagggaactttgagtagcatgatgacgaacacagtcattgttgagactttgcaaaagagaatgaacgtaaagattagacgcggattcgttctctttcccgagagattttatcagtatgaacatgttaacccgtttgaattctattcctcagaggcaaacacagttagcacatgtatgtgcgtttcacagatcgtgcgtcatgtgaaggaacaacgaagaaaaaaagacacatgagagagtggcattggaaacgtcagccaagcgatcagaaggatgatgcttgagtctagatcggattgatcagagagtcgagggagaaaaaaagaaacatatacaatattagatcacaacatacaaaaacacacatatacactcaacctagatgctcatctgttcacacaggggtcatcggcggattgtcagagtctcgctcggtcgcctccttcaaaagcctttgaagcatctgaatctggttctagttgtcgcatgcacaagacagagagaagaggacaaagacagaattattcagtcacaaggaattcatccccgggaggagggtctctcttgaaggttcacgcacgaaaagacaaacctggtaatctgccgttttcttcttccaggccgctctttctctcgcgtgctcgatcttcaaccggcgaacctcagcccaaccatcgtcccttctccaaccggggtcgtcgtcatcatcgtcactggcctggtcttgttcgaccagagaacccatcgaacacatgattctcaactttggcgaacccggcaatctgggcgtgtcttcctctgacagggacggttggttccacccggtatcatccccatcctgtctgttgtcgacccgaaggatctccctcttgacgggagagctgacgaatgagaacgacgatctggcgaacgaaccggtggatgaactcggggtgagacctctgccctcagtctcaccttcggcggctgattgtccaccttcggcgtcttctctatctgtctctcctcttgcgttcccaccaaagagcttccgaaggcttccaccgacagatgctgttcgattcggccggtcgtcccgtaggttttctcttgagctcatctggttgagcgcgttcttccgcttaagagcttcatccaaggggatcaacttgaaccctccttggagagtacctatcgggcatccgttcggtccgaggttggcttccaagcctgttcgaatgctggcgctgccgcctggactggagagggcgctataggacgtgtaggcggaaggaccggcgatcgaaccaccaggcgagtacagcccgttcggtcgacggttgggcgatgatgggctgggcgggccagaagtggagaacacaggggatggacggggtaggttgtgtgcaacttgggtatatgtcaatggcgagctcggcgagagtgggctacgaagggtcgatgtgaacgccacaggagatctttttatttgttcgacacagagacataagattgtcaacgaccgttctatcgctgggctttgacccaaatgaaagacagggccgagaaggaaagactcacaacaacagggtttgtttggtgttcgacgtctcgtcaacgttctgatcggtcctggtctcctctacaacgttctcaaccgcaatttctcctcggacctctccctcggtaggccgattatcactcactcttgaacctggcgtggatgttgagtcaaaatcaaagcctaggccgtccgtgttggattcttccccctttttccctcggatccgtcctccaaaccctttccagagcccacctatgcctcctttcaatctcgtcttatccttatcctttcttcctgagatcaacgtttcgagaggagtttcaggagaagacacaccttggagaaaagaaggagacggatgggtgactccatcgggtgtgatcactcggagagactggggcgttgttctaatgctcacattggccagttcagtagaaggcgacgagggatcagattctgatgaagaaggagaccgcgaaggtttcattctactgaagatcagggacgaccctaaagggctgagaggcgcgagagatgggctgagagaagttttgtccgtttcccaaggtggactctcgtcaaactttcgaagctgaggtccaaacactgttgaaagcggcacgtccgaatctctccttgtcaccatcacgtcctcatctatcccttcttcttcttcttcttctccttcttgaccttggccatgagatggacgagagaatgtcggtttctgagagtgagcatacccggggttctcaacatttgatccgtcaaagtatgagtctctgagagtggcacccttctcgttttcacagatgctaggggtgtgaaccttgacagatccgattgtgaatcttttttgatgatcgtcttcctcgtcggcgtgagcttcttgctttcgctgccttatgcgaacggtcgcctcctcctcataatcctttaatttctcagcctcatagtcgtcattatcgctgtagttgtcgggtttaggagaggcagcaaacatatccaacggagcaaacccggagagcgtgtcgaatgcaggggactgatagtccgagccaatattcgagctggacgatgaggacgggagagtcgaaaatttattagcgagactatgtagaggggaatagatcgagtctggatctatcgtcttgggtggaaggcatggtgagcagtcggtttggttgtccataggaacagaagtagcagcagcaacggccgttaggtgcgatcaacggtcggttggttgatgggttgattgatgggtaatatatatcgagacgcgtctgggtgatcgatgaacaattaaacgcgtccgttcgggcttggccgtcgggggaagcgagcgaaagtgggactgatacattagataagaaacctcaagaatcagtccgggacgtagcatgttgtccgtcgaaatcgtgtgctgcttcttttcgtccttgtcaatttgtgttcttttctgcctgatatgagcgaggaacagaaggaagaaaagattaaggtcgtgcgaggtaccctcagacgatgtgtttataatccccttcttccaatgtcaatcacagaggacagtcaagagaacatccacatcctctatcattcactcgaccttgttgctcctttaccgagcatatattcatcttctgacaccgaaacagcccacctccagttattgaaactgtgtctgatgttgtgttagatgtttaaaatgttaaacgagggaagaaatggactaggtggtatacaaggctgtatcgggacgattgctgccaaagactcgccatcgacatcctaagatagacatcgaagacagttgtttacaaacccgaagacaaagaagagagaaagtcaacaaggaactctcgttctgtatagaaagtttgtgttgttatcattcggcccatcctctaatgctttctcgggagcgcgcaagctgggaggaaagtttcggctcctaaaatgagttccgcaagaagatcacacacgcaaaagatataagaagatacaagataaagtacctgctccgaactaggcgctcttctcaaccttcttcgggccacgttcagcgaattgccctgataactcaacagatatcgtccgaacaatccgcagaaggtcgatcaggttctgttgttgttatcgtcgtcgtcgtcgacgatatagagttcacgttcagccttgggccctctctgacctgacctgccatactagatagcttactcacgattgaatatctggtccagacattgggtcccttacccgtaaatgcttgatgcttatcctgcatccattcagacaagccctatagacagcactgaccggattcttcagctcagtttctttcgataacactgcgtgcatcaatgaaaagctgatatcgatgaaaagctgatattaatgaaagctatcatcttctgatcttccttcaatttctatcttttctgcttctctactatatttgtatatttattcgtttaccatcttgtcttcttctcctctacattcgatcaagatggcgacgaacataatgtactcattaccaaagtctcctacgttaccctccgttgaagctcgtctatctctgagcaagcgcaacgattcctccatgatggaagctcagagtgctgatggtctcacagacatccctgatcggaggaagaaaggccggttcatcattgtcttcatgagtattttgatgtgtttgttcctgttcgctcgtgagtagctaccatctcttcctctccttgtcatcgctgtcttctacacggttgtacgtatgctaagatcaggatgcgttcatggtacgcttttccgattctattagtggatcagttgattgtcaccaccgctacgttagtcaatgaacttctacagaccactctttctcctcatatgcatacgaataacctggactgttctctatgaaacatgattctagccccaatgtcatctctgcatttgattcactcaaacaggtatcttggctgtttaacgggttctatctcactatggctggatctactctcatgtttggtcagatgttggcagtgtttccttcaaaagttatccttctctccgccgtgtttgttttagagatcggtagtctggtttgtggcatcgcacccaacatggccgtcctgatcgttggtttgtcttgcgctctcatcttttgcttcgatacctatgcgcatcatctactgtgtggctgatcggagcgatataaacccttactaaggtcgtgccataactgggctgggaggggccggaatctactcggctgcttatcaaatcaccgtggagataacgacccttgccgaacgtcctagtgagtgcacccgtgactcttctcatctattttgttctcatgctagactgattcgacgacaattaattcaaaaattcctgcgctacggttcgtcgtcttttccctaagtgtatctggcattgttcggtgcttgtttcggtctcgcatccgtcatgggcccaatggtgggcggtgttttaacagatcatgtttcttggagatgggtaggtcttacgtcgtgttcatattcaccaaatgatgcatgcgttctgattatggtttatgtgtctggatcattcaagtgcttctatatcaatctacccatcggagttgtggcttccggcttgatttttgtgttgcttgaacgatcaagcgctttaggaggtagagatgattcaagatccgtttggagaaagatcgtccaacttgactgggtcggaacgagcatatgcgttggacacacagcttcgatatctgttcgtatatggcccttctcttgttcgttatctcttgatctctaaccttctgtacctgctctttggggattaaccgcagcttgcgtttcaatatggaggaatcgaatatgtatggacaaacccacgggtcatcgtcctactcgctttcatccctctgacatgcgtgttgttatgcgtttggacaatctacatcagaccggatagagccatgttcgacattcaattcttgaaacgaagggccatcatgcatgtccaatgcgaacttctcttctcatgttgtgtggagaaacatgtttgaccgactgtgtacttgtctcgtcgtgttctcaccggccttttcaggggagcgtctttgatagcattctttggttgggcaacattcatgactgtggtctgcttcttggtcattatgttagtcatctttttctttttacggatgtttctctgctctgctgaaactgacagtacctctttaaaatctcattttcaattttcagctatcagaccgtctatggggactctgccacaagatctggagttgatctgctttctatggttggtgttcttatcacgctacttttgattgtcggacggtacgttctaaattttcaagtacgcatctttgtattctaattttctgtattgtgtactaatccaaattgactagttcgttcgttgttcatcgctgcccatcatcctacggttgttcaggatcgttgctaaaacgggtcactacaagtacatcgtctgcgctgggcctattccagtgatgatcggatggttagtcatcatgaaatgaacatttgcacaagatagcgacccctaatcactcattcgaggttgccttgttcatcaatctttacgctcgcagtggcctactctactgggctatggacagcggagtgagcttgcgcatcataataggataccaggttctaatcggagctggtgagtgaattctcaaactggctttgctgctgaccttaactagagaagctttgatcaactctttggaaggacttttgttacttgtatcatcgaagggacggctgcatacattcagaataccattatcgcaggccaggtatgtgtcacatatcttccatctgcgcttatcattccagttctgccctctttctgcaagtgctgaactatcatttatatgtctttcaggtcgagttccgagatgaacctggtcttatctctcgagcggtcggcctcatcactttctttggatttattggccgaatcatcggcgtgtctgtctctacctgtgagttcttctttgagcatcgcagtccgtccctccaactcgaaattctttaccttgagacaacaagctcatgctcggatctttgatatctctctctgttcgtcctggcgcagctatctttatcaatctgatcccgaacaaagttgaagagtttgccccggagttgcctgcttcgcttattcctatcgtccgggagggcttcgcaggcatcaggacagtcattccgaaagagtaccaagccggaatcatcattgcgtacgtatcatttcctctttggctcttttgtaaattgtttgctgaacttcattgtttttattcattattcaccatgtgaaatatctcttctatcagctatcggaagtctattgccccagtcttcttctttgctggcgccgcttctgtcctctgcttctgctctacttggttactcaagaacagctcgctgaatgctcccgcacaagaagtaatcgattcgaatcacgacgacacacatctcgagttgaatcatgtctcataccgcatttcttccctttacatctcaaacaataattctgagaataacgctgagacatcttctacgaagcagaaacgataagccgttgtgcatagtgttgccttttgtattggtcattcaatgtcttatagttttaatttattgggatggttagaatactatttatgctacatctgcttatgtatctgtgtgttattatccaactcttttgttctttctcttttctttatgtctatttcaacttttgtgagatcataattgtttgtatatctcgccgctcgcttggaaatatgtagttctgatttgtcgcgcgtcgtgtcattacaaaagcatgcataccacgcattcttattttatcaaaaaaattacaaaacagaattgcagtgccaaagatatgtatagcatgaacaacatgggcagtgccaaagatgaagagtcgttactgacgtgaaggcagtgttaaagaggcagaggttgatgacaacgcctttgcaggttataagagcgtcatcattttccaaaggattgagtgccatcacacagattaatctcttcctctttcttatctctgttcatcctcgacaatttcatctcaactcttacaagaaaaaattatgtctgtcgataatctacctctgaataaaggagagtctcacacgggctctgagcccattcaggtgtgtctatctgggtcggctgtcgtctgttagatcatgctctaggttgattatccaactttccatcgctttcaacaactcttagcgaccagtgccctcggatccttcatcatcagatcacccaccagcttatgaaactagaagttctctcgctacaccagccgtgcctacgtcttccgaggttgagcctgctttgtcctcttctttcattcctcccgctctcgtcgcagcacctcatgtgtcgcacgtcatgttcctctccaccaacggttcggtcaaaaaagaaataaatatcgacttgcgatcgcccgttcctcagctagttctaaacaaacagccaactactcatgaactcaacatcgggccggccggagagaaggtccatgtctatatgaatagtcagaacggaagtgtcaaggggacatttgccatttggggacacgggccagatgatcagaatgacgccaaagtggacaggattcgaacggtcctgagaagcactaatggagcagtctcgtctagctacgtaggttctgttcttcgattgtatcttctgacacgttattgatctgatagttgatcgtgaggctctcttgtgtcgctgatcccaatactagtatgctcgtaagccaacgaccacccgagtcactacccacgcttcgtccgaaaatggttctatcacattatatcttcctcccgcttattgtggaccgattctctcttttgcaaagaacggttctctcaaactctctgctcgagccaaagcgacttattctcctatgggttatcacccgaccggatccggatcatccgagcgctcgtgggagtttggcttcattggcgatagaaccgagtggaacggcgaactcgagaacgatgctgggaacgtcagcgacgagaatatgaaaaaaccgagcagatgggatgaaagctgggcgagcagtcagaacggcaatatctacatcagattgggtgaggaacttgctgatgatccggagccaggcttgggatctaaactctttggatcgatatctaaggcgatctggggggcttagaaggtccgtcagcatttcctcgggttctttcttggtcgactttcatttttctcctcgtcttctctccttcctatcttattcataatccaaatcgggccaggatgatgtcggtctggtgccagcgtagtggacctaattacagatgagatttgaaactctgaattcttatcatcgacatatattttcttacacagaatggatatcttacacgcttctattctctcctttttcccttacgacctatctaacgctttttctatgctgccttactctgttgattttcatgacttgttccctctctcggtctgttatacaagagaatgatcgaaagcgtagcccagacacgctggggtttgcgcatcaactcgttcctgatggttcctttgttgaccaaacaaggagtcgtttcaatcgaccgatggctgactgtttattgcttttccagagactacatcatccccagcatgttcactaaactctcctctttttcctttccttctttcttctccctctctctctctttctccttgtctgacgcaactggatctttgccaccacccagctgctagatttgtgtcacctttctcctctcgcttctcttccttgctgtgctactcttcgctttcagttttacctcagtgagtctctttccactggaacctagctgaatcggttcatttattgatataaccatttgtttgcattcgtgtcaaaacgtacagtaggtagtcctcggccacttccgtcacattcctgcgctacctcgtcgtcatcacgttcttaaatcgatgagtagatcacctcactatcaacttcgttctcagctttctccggcctacgatcagaacggcgtagcttctctagtcgccattcctcatgttcgcagtcttccttggatttctcctgagagtcaaactgactccaaactgagttatctcgtacacaaggaggcggatcattcatcgactcgagagtccactcaagacgatcgatctccttccaaccgacctgtaaaagaaattatctcaaaccggtccgagaaatcattcaggaatgggctgaatcagggcaaaatggacacagccaaaggaaccacttgggatagtccgacactaccttaccttgggacctctgcaccgtcttcgcctgctttgagcactgcatcctcgagccaccctgactcgccggaaggaactgttctgcagactcatctaagtagattaggccccaaactacgaatgggcaaacggcctccttgggaatccccttctttgggtgaagaaaccgagggagaatcctctcctgtttctcgtcctcttgagatctcgtcagacgaatatggttatacttcaaggcccattttatcttctgttgattcatttaatgaaactcacggaggcaaggatcaacatcttgcgactgggtctctcagaggttcgaacagcggaacccaaactctcaagacacttggaggaaggttgttgaggaaagtcagatcccatgccgagttgggtgggggagataatcaacgtcgaggaactcaagttagcagtggaagaggcactccatgtttcgaggaatcgacagactctttgttaggagccgagagcgatgggtggaagagtgacactacgctagagtcccacagtccgattacgccggtcgataggttgtgagtacatctgtttactcatgctcatctgttttaacgacctttaaatgggtgatcaaggcataaccaaccgccttgtgttcatgctttttcttgatccttgtttttagaccagtcacgtacgaagacaagaccccatcgcaccagtcagcctctcagttcgtttcgacacctcctgacccgatgtatgcaggcgctcatcgaactcaacctgatgggcagtacaatgctggccaaaatatacacgagtaagtcggtctctccaatgtggtttcgctcgactttctgctgacctcttgatccatgtggctgttccgctttgttggcttggtgctgaaagtgctgtatggcctatcaccccgaacaccatccatcgaccaactgtgctctctcaccctcaagtacccatcaaggcgagctctcctgatgttccagtctttacccagcctttcagaaatattggctctggactgggtctcatctctcttcaagaggctcaggcaagagaggagtcgaacaaggcggcggctgcctctcgtcttcaaccaggttcctcgatcagctcccagaagccgacgccatcacccccttccgacaaagatcgacctctttctcatatatcggagttatccagtatatcagcctattcaaacttcaccaacacttcgctgaattccaaagggaatagaagacttggcactgcggtgcctcctattccacccctctggatgaacaccttgtcagagataaccagtccggcctccaagacggctgtgcagtcgcaacagtcgcaacagtcgcaacagtcgcaacagtcgcaacatcagtaccagcaacaacaacagcagcagcagagtcaatcgtccagaatggctgggttcaagaggcagaaaagtggcttgttgaggatgtttgagaaagtctcctctccagccctaggtagtaacagctcagggcgtggagcctttaataacaatggagctactccttcttcgcctggagatatcatgtacggggacaaaaatgttaaaaggttagacgaggcagcaatcaatcaagaatcacccataattgaagcccaaccagaaagaccggcctccggaacacttcacagcccttcaccggtagccggtactttccccatgtctcctcttcctcccctcccctcatcaacttatcgaccgttctccaatgcctccctagacggatccgttccacggccagcaatgcccgatgatgttctcattcctgacgaaaagacttacggtacttcaactcctcctctctcttcctccaccattcaagctccttttcccttgacttcgtctacggtcatgcaaccagagactccaatcacccgatcttcgttgtcggtaacgagcatgactcctcctaatctcgaacttcgaccaatttctatggacttcataagtggccttccagcaacctatctcacagatcctgctgatttttgcaccacaaatactacgtccatctcgggcttcttgcctgaattgaagacatcgtctggaaaactagacgtcgcattcgggcttgagttgacaaacacaagcttgtcgattggagatgtagaggatatggtgaagaaaacacaggctggactaaatgataacacctcctcgaccgaaggagagagaggattggtaatgaaaatcaagatgttggaaaaccgattggtgaatgaacaaaagcaatggaagttacaggcgtctgagttcgaggttcgtcgttggttctcgctcctctactctctcgcctcggcactaacttcattgcgaatatataaatctttgtagaaccaaatcagtgagcttcaatcatccctcgctgcccacccaactcattgtgcaacctgcaaaggatccattgagagtagctctgtcggacccgcgcccgggcttgagcgcggacccgaacccgaaccaacgtttagaaaacagatctctaacatggacgaaggatggagagtcgtttcggggggtccaattggaggaggaggttcagtactcaacagaggaagaatgattaagcctgcaagataacttttccccccctctattcgttgactcgtctgttttaatttcacttctgtcagtttcacttctgcaccttatttgttcgcctctacaactagatggcttcgttctttgtttgcgggtttgagttggctcctgactcgagattgtactctatcgttccgtttgtcccgtattcggtatgtgtttcggcgattgatcacttttcatacaaaattaatatcgcattcgttgagaaccgactgttgttcacgccagtatctaatgagcttgtgaaataagactgagtgggataggtttcctttagattgattcatgtcctttcgtccgaaactgattgacaggggttgaacatacaaatcttgatctacgacaacagtgacaggacaaagtgaccaactagtgtacaaggaagaggaagaggaaaaagaagagaaaagaaaagagaaatagtacaagatagaaaacaagtgacgattgaagtttgtttgatagaatgataggagaagcgaaacagacaagtgcaaaaacaaacatcacaggatagattgggaataaggaacgcaaagtagagaatttcagccagatgaaatgaggaagatctatgaaaatctataacaaatttaaagcacatatcggaagtcagggttctcatgctcagtctttccctgcataccaagatctgcagccttctgagggtcggccgggccaaagactctgtctcgcttcttgttggaatagtacatgtaaactccgagcaggatatgagccacggtttttccaccgtaagaggccagcatggcgtaggcagcacttcggtagaccggcttctcatgggtgtacacgaagaggggtccgacagcattacccacagagtaggcaatgaaaaccatagtggacgtgacagatcgcttggtgtatcctccaacgttggaagagatcatgaccaagccgagagtgaatccaatcgactggcagttgataagccaaaatccaataagtcggggccaggtttgagagaaaggcaagaaagccatcaaggcggatccaagcacgcagatgatatttccgacagtgaccatgattattcggcaagaatcccatctggaagcgacgtaaccggcgatgaggagagagatgatttgaagagatcgcccagcacaatcgagaagagcggcgttgacttgactgaagcccatggcagtgatgatgggaccagagaagttggtcaggatgccattctgcaccaatatgaaaagtcaccaacgttagttgaacatcacattgaaaaaaaaaactgcaaagtagataatgaggaataagatagacttacagggacagatgatccgaacataccgatgaccaaacaccatgtcttgacatcgatcagagcagccaaggcttgtttggtgtcgaacttggtggatttgataccgacagagttggtggcaactcgggaaacagccaagatcctgtcgtccttggagagccatcgagcgttagatgggccatcagcgaggaaaaagtagatgacgaaaccccaagagacagtgatcacgccgaggatgacgaaaatgagctgccatcgcttcacaggtccgctatcagacaaccctgagattccagcggccatgagcgctccgatcatacctccccaaccaatagcggagtaccaaatagtctgtcgcaaaggctgttcctttcgggtgtaccctagagattgaataataaagtgctagtcagaatagagattcgatatggacaagaaccagaggaacacagatgagacatacagaatccagtcatcaaagaaagtccgggagttgtggcggattcaagagcacccaagaagaatcggttggcgaggacagcagaataggacctgttcgcgatcatagtcaagacagcaccaccccaaagcacacacgaaataccgagaactcttccagcaggaaaccgaccaataaagtaggtgaatggtgcttgagcgcacatgtatctaagcgataggaaacacaaaaggacaaacgtaagaacaagaatcgacttaggtgcgaaatcatctgaagtaggattcacttacccgatatagaagatcgatgcggcaattgagtattggttacccgtcaaacccatcgccttttccatgccgaagaccctatgagtgagcggaagcgaggctgagtatgagcataacgcgagacaggtgagacgacaggaattcaagaagacgataactcacttagcatagttaagagcggtcttgtccagatattgaatggtttctattcaaaccacgagacacgtagaggagagttagaataaacagttgcaatgctgtatgaaaggtaaaaaggaaacgaacgagtaaccaagaagaagggaagaatgaaccagtcgactttccgcaagatcctcttattctgttcaggagtctatagaaccagcgccaaagcaaaaaaaaatcggcataagcgaccaaataccggagaggagaagaaggtgacacgtacaatggcatccatgtctttggactgaagataggcgttgtttccgacattaccatcttcatcgccctcctcgactggatgaaggtgttcgttgtggtgaacctcggccttgccgtctttttcgtagaaactaccttcgatggaactttggctggtgggttctcttcgcagcgtgggaacaacgttcgacatgatggatttagatcaaaagtagagtaatgtgcagagtggatggaagtcctgattcaggaacaagtgatagacaagaaggcctcctgaaggaatgaggaaacgggaagttttgaggacgggaggttgggtgtcttatatatccttcaactctctcgatcagggaatgggttcaccacatccatctgtaccggcctcaacaagaccttgtgctctgtgtttgagcaccgtcaactccatcagcctctttcagctccgattatttgtgaagagacgcgcggtctatgctcattccagaacaaagaattcgaaagagaagaccggtgttcacggatggtgtggcgttgacccgaaaagagccgatcgtcagcaaagaagcgtgtcaggatcagtatataccatcaccacattattctcgcaggcagaaagaagaatgctttgagaccagagatgtataacctgatattgccgaaaagaacaggtgcggtaacaaatgtgttcagtggtcagcggggtcagtaccattgtgccaagactgaagtgtcagtaattcaaggggttagttgcaagaggtagaaggcaaaacgacacagacaggaggaaaagagaagacaagtgagagtagtgatagaaaagggtcaaacgatcggctcttcggcttttgctaatccctctcgtaacatcctaccggcggtttcaaagtctcatcaagatcgtcgcttctatcggtaaaaagaggcaaagaggacagagtgtaagaaagtgcaaagccggctgattgaatgcaaaccaacaacagcaaggtgttgaggttgattttgcgtcggtgtgtatgtgatccaccgatcctgctgccagtggcgcgactcagtccgaatgtttgagatcttggcggcttggcacgtcgcagttatctccgaccgtcttcttcagaaagattccaattgtacaccaatgtttcctctctccagccacgttatagccattccgatttctttgtgtcgcatcaaaaaccatctttttacaccggtcaaggcaaggtctatcttcgttgaaagccaaacatcatcctacgggtttcgggccgtggtccggaaaacacgagtcatgatttgatgcgctcaacacagataatgtggaccaggcgtgacctcaacttgcgcggaacttgatctgtacatggtaggaaccgacaaacgaacagcatataatcttttgaaagagaattatcagcgagacattcgataggaaacagtgctgattatgggatgtattcatctcaacatatcagctcaatttctctgcttgatagttgaactatgaacaaacaaacaaaaaagtaaagagaaacgggcaaaagaaaatgcatagaagcccttacctgtgttctggcaacatgtaaattgacaaacaagtttaggccaccaccttctttcgacctagaaaaatccgtcaccaagaaaggatgagacctcaagttcggaagatgatacaacttgcaagatgaagacctcttcaagagacttacaaactgggcaacttgcatcttccttcaaccaactcctcgcgcacggctcgcaccccacatgttcgcaaatgaccaaccctacgatccattcaccagctttcagagtccctaaacagccaaatgaacaccgaccgacccgtctcgctcctacagctggacaggatagcttgaccttcgtctttcctttcgacgttgtccgtcgagagagttcgactacttgaccatgaggcagtgcatcgacctgagccgtagtgaggccctttggatgagccggcccgaggaaagaggtcaaagcggttgcggcctatgaggaaaagtgtaagagattgtgtgagaatgacaaatgtggtgtgaacgcgatcagacctacaagactggaactcacttcgtattgttgacttccatctaggctcataacgagtaaatctatgatcataacacatgatccatagtcaccggaagaagagtgaaggaacaataaatcatcggcagccaattagtacgtgacatatatcaccaggttccgctagaaaaaaacattcatttacctagatctgtgtactcaaactcaacaggagcctgagtttgcaacggctcttgctccagctccggcaatgattgtctcctctcgtctcctcggatctcttccgcaggatcatccacgtgtccatcctcttccctctgatcttcgtttctctgctcttctgattctgcaggtataacttccggtatttgtcggtgtggtagctccgctgcatctcccaagttcgaagcgattgatctgcttgcaaggcttcttggtcctctcggccttactcttacctctgctctctctggactggataaacttccgatctcacgaccacctctactacctcccctgaggtcactcacttccatcggttcttgaattcgagcatttaattcctcactcacatccggatttctttcattctgcacacaaagatctgacctccaagacggtctgcgggagggatcgagtgagacctccgacgaggtggacgacaagcttgacagacccgaaagcgccctttcttgcagtgtcggtctcaatagaggaagagacaggccatctgcagacccacttcgaacgggtgcgctgggaggccgaggtcgaggcggaaggggaggtggtggaggagaggttgtgcgtgtaatctgatcatgagcacgcgatgaaggaggtggaacagatggagatatatgtctttgaattattgatggtcttgcagggggaggcggaggcggcggtctacgatatgtagacgcgagaggagctgaagttggaagagaggttgaagaggggttggccagcctggccaaggaagtcgaggagctagcgatagctggagacgtgtacaaagacgtccaacggggtatctgaggtggaggagccggcggaggaggtcgtcgttgaggtctgggttgtagaggaggtggtaccggaagtggaaacctctccatcagctgatgtgatgagctttgatcatcaccaaaatgtgacatttcaataccaccagacgtcgaagaggaaggtgaagaaagagaggataacgaagaggaacgtagctctggagtcgctcgccctcctcgttctcctacccgtggcgatcggtcctgttcgtgagaccttgttggcgggatagagggcgatggagatctggaggaatcttgagaagaagcacctagattgtccgaagaagacgactgacagtctagctggtcaagatcaaaatcagatgatgaagccagagatggtgacgacgaagaaggggtagatgaactatcatgtaaatctctttcggtcagtgggacaatgggtggaggcaccgaactgatagtttctgaaacagatccaatttgattgggataatgatgataagaagatgaaagattgactgatgatacattggctggagtggttctcgggtccaaaaatccggttgatggttgtataaagttatcgttaataagtaggtttgtggtatctacaggttccacagtggaagaaaggagtatgttcggaataatctcatccgcctggttttgcgccatgacaaacagcgcgtcttcacgcagagggctgagatcgtcttccggtggtactgatccagaacactcttgagcccctagctcactgtgtaggatatgcaagtaaggagctagggtggatggtagggcagtctcgatctcagaggtatcggtgaccgcagcaactgaatttggcaaaaactctgcggtatgaagatgattgacagttgaatgcgaggacgtaaatgaccggtggatagactctgctctatcagcgacaccaaattcggttgatccagacacaacagcttccgatgtcgacccgccatcctctctacttgcttccgtgtcgtgtctgggtccaccttctaaagattcagtagtactgctgcctattattatcagacgctcctcaattgaaaggccttcgtcggctagacggtcccaaagtgttcgatttccgatggcatccagacattgaggagaaggtggcgtagagggtctctccacagtagtctgttcattattcgagacaatcctgagttgagatacagcaatcggtgaagagaacggtaccagagactgctgcatatcctgggcttgggcacggctgagctcaaacgagggaggtggactactaggaatgtttgtcgtaatagatacagcagtaccagataatgaagattggttgtcgaccggagcatttgctatagagtgacttatcactcggataggtgaagcagggaatgctcctggaaagcttggagtagggggttctgcaagaacagaacctcgagggggtgtagacagtgtgtcaacggtcaagctgttctgagactgaggaggtgtttgaggtaagattggaggcggtggaacgtcgaatatggcggtgaaatcaggtgcaggaggatcgctggccggaaacggtccaattggaactcgacgcgaagctgtattgggagatatggtatcgagatagcttggaggaggaagcgcgggggtcagatcggagtcatcacgttgatcatttacaggattcagatctagagaggttgaagatgtgtcgaaccaaaggccaatagatttataagaatatgtcaaatgtcggaagcctatatgatcatcgagaagaaagactgaccttcctgtacgtttcgccgcctcatacttgctcctctactgaagtcaaccggtcctgcttgcaatggtgttccaactgacattctcctagtcctcagtccgatcatcactgcggggtccacacgtctctcagtttggctagtcgtgccagaagactgccgagcagatgctacttcatcattccttactcgactcgcaactggtctcgtccctgttcccgccgatccaggtctactggtagcaggtgcgtttccaacggccatcccagtttgtgtaccagacgaagatccaacagaatcctcacgagattgtagccttgtaggtggtctgggacgcttctttcgtcttggctgtgttccaccgttgccaacactactgccgttccttgtggagaatgagggtgatggagtgtttctcgggttagaactgaatccagctcctccagttgcagtttcgctcggcgagttatctggtgatctctgattcgatctcgaggcccggactctagtcatgttgggaggagggcgtaaggtggtctggccatggtaaagatggtcattggaagtatatggagaagggtgggatgaatccgcccgaaggccacgagagtttcttggaggaggccgagctggaagatctgcgttagagagaagagatctaatatagtcgttagcagacatgagacctctgccacatatgagatagcaatcgatgaagtgtgttggtatgatccgagtaaaattgagagatgatgggagaaaggaacgaacatggaagtcaactaattatgacttcatctgttacttcacaaagatactgcgtgtgcatcgtgactacattcctggccgaccgagtacaactttcacttgatcagaagcatcatgttcgaggatgataaaacgtacaactatttaggtagatatgacaaagtaaggcatacaagtacagatgatgattaagataccaggcaaagacacggatacaggcccaaaagcagatattgacaagcaggagagaagaaatgaacgacgaagagttcttgaaacatgtttgattcagaatcaataacttgttttgtccaccaatcgccatctctttaacgggcctcgccaagaccagccgggatcgtcatccgagtctgaagccgagtctgcgtctcttcgaacctgatcagctgtacgagtttctcgatgactctctctatgacttcctctacgacgtcgcgaaagggtatctggctgttggatgctcgttggtcgaaatggttgacctggcccaggctgagagtcagggacgttcggctccatcggtatcgtcaatctggattgagatgctgatcgactagatactctcgacggggcttggatgatctcttcatccacctagtcgccctcccctcgtccctcttcgggctcacttgcgctgccaggatctgtgctccatggatcgtttgatctatcgcccatcagtcttcctcgccttgcctcccttctagcttgcttgattcgtccttttccatccctggcttcttcaactccgaactgaccgagtccccagcctcgacgctcgtttgctacggcgcccggatttccttgaatcactcgttgtttggcagcctcggtatgagctcgactaagccgggagatagaataattgatgagcgtcgccgggaatgctaatattgatgagatcgatgtcgggagttgtagcgaggtaggcgatgcggtagacgagttcgaagaggacgaatttaatcctgtagtgacagtcgaaggtgcttgcctgttagaggctagccaagatcgagacgactgagtgagatggacaggaactgtagctgaagcgttcggagtcgtcacagggtgaggtaaagtgatatctcgctcgcgttcgtggtcaggtatggttctcatgaaaccgtcgtcctctgtatcaccagagtagattggatctaattcgcctcttctttctcttctcgtgctagaactaggctcgccttcttctccagcatcccgcactcgatgcctatccatcttatcaagctcaatcgctcggtcatcttgatgacttgtctcgcctcgtgagaatgtacgccgggtgtgccgtcggctaaacgcacctccgaaggctgacgaacttgatgtagacccttgctcggggggttctgtgaccgacatggtcgaaagtcgccgatgaagaggtcgagagatcgatatagaagctgccgccactgctgctgccgccttctcttttcgtctctgcctttgctctgccttccgagtttttcgatgttctttctcaagcatgtcctgttcaacacaacgccggaaggttagccaagttcctgaatccaagacaacacatgatagattggctgctcacctcaacttcaccaatacccatcccggagccgacccaccaccaccaacctaggggtacgtttatgagtcagcatcgatctctagatcaataaaaccagtttcggccaacggagaagagaggaaggcaaattcggaacgcacctagccacatctgccaaagaatgatagaaagtatcaggtgctgaagccagctcaacttgtcgatcttgatttctataaaattgaccgccgttccactgacggccaatattagcgctcctgctccaaatgctgccgttccaccgtcggttcgccaagcgcgttttcggttgatgacaaacccccaaataaacagcgctgaggtgaataaaagggtcaacgttgaattacagatgttccggatgatgaggccgtatcgtacaacctggcttgagggtgaaagggcagtaaatgtcatggctgatgaggcaagggccataggcccgagcaagccaaagatcaatcgagcttctagcgctgaaggatagagcaaggtaaggaactgaatatgggtaatctaacaatagatagaattgaggaatagggagagaaaagcaacttagaaagcggttatcttgaaaggtcccaatgatagatagagaagggcttacttgaacaataccagatgagagagcctcgacggtgtaccacgaaataagcttggaagcactccaggaccggaccggcacctccacatatataaagtcgttcatatatctgatttatgtacgacaggcatggccaagccaatcagtattgtggtcctcatgtaacaaaataagcagaatccggatcaaatgcatagaatccgatacttacggccagatagaactctcctgttcgcctaccctcagtgtcaccgccaaagttgcagtcacggccgctaaggtcacgataacgcccgagaactgaagcaggaagttaagtctagcgagcggataatgatgttggacagtgaagagcaggtgaattgtgagaacaacgaggagagtgaaaatgattccgttgagtgcgagctgggtggcatatgaataggcagaagcactgtaatcaacgaaacatcagaagaaaagagcagaaggtatcggcgtcaggctaaggggagaagagaagataatgacgagtatggaacacctcacggtttatatatcaagtaagggtcctagagagggattgatagcagtcaaaaccgtccatagtcaggttcccattgcttaccttttcctgatgttccatatcctcgaggatgaaggagataatcagcgaagtgtggaatactcacctcgaccatctgctgatgaatcagagacgcgttgctggtcatccggtgctacttccccactcggatgggattgttctcgttgtactggggtttctaataagtgtagtagatgacaaagaaggacatcaacggtcgaatcactttccggatggatgattatatgcgatgatggtcaggatgaggaaagaactcgtcgatcgaatttcggaataaacctttcgttctatctcgacgacatccttcatcatgccggctacccacaaacgaaaggcagcagctctagcagcatctcctcagcctggcgtatcgtcagacagacctatcaagaaaccaaagacatctcctcctcatgtcattctgtctccttcactttctcgacccaacttactttcttctgaacctgcgtcatcatccgtccaaacatcaaattctaccactgccatgattactacgaaaccagttgtatacaccacacctccggtcaagattcccagacctccgccaaaatctatcatcaagaaactgattccgccaaaaccgcctcaccggcaaggagctgctttaccggttggctcggccgtccatggccctacagccaagatcgaaggtagaaacgtcgtgctagtctcacgaaagaacagcatagcgggatatctcagaagatgcaagaagctaatcgttgaagaagggtaagtcctgatgtctcgttgcagactttgtcatgtcttgcgatgagaggagctgaagtagagtgccaccagactattcctagtcctctcgctaacgccataaactgtatacttttctctccattctaacccaataccaacgacacacccacagaaactctagcatctctattcacgccctaacaacatctattcctctggcgttcaccttgctgcactctttgctctccatattgccttttccgcggactcaactatcatatacgatccatacgacctctgttcccgtcacggacgagatcactccggaagacgaagaagaggatatcataattcgggaaagaatgtgctccggtgtggagataacactccttgtgggcaagcgggaggctacagagggtaaggcgagagaaggaaccgagaaggcagagagaaagaaaaggttgaagaaaagaggaaagggaaggggcagaacgaaagcaaaggctgccgctcgcgggccggaagggcagaacgaggatgatgcggataccgaagctttgaacgaagcagaggttgacgacgagatggatgctatgaatggttgaagtatgtggtaatgtgatcggtctgtctctgatgttgtagctcactcgtctacatcaacacgttcgctaacacgtatacactctgtacatggtgctgataaacttcgtaaactgacgacggctaagtctagtatgatgttaattgaaccatcgttcccgttattgctcttagaccttcattgaacatgccgttattggcgttatcgtcttagaacttaccgctttagaacttaccgcctttcagaagaagacaacccgttgttgagaatgactgagtacataagaggacgacgggtaagagctattcagtccattctagtgttctttcgttcttttatgcatattctttcacaaaatgaaaacatccgaaccgttggctgtccttcttgtagctcatcatgtacgtcgtttctttccccttgatggattcataagtgtcgtcgttgatctatgactgaggggttcttatatccaaagctctgcgtcgttttccccctcgcctcttcatcctcttttgtacagacgatcaactctcttctcagtctgaattcccaacaccttactttatccaccgccaccataatcaagtctctttttcttctggatgaactttccaagctgtatcctcagctcagagtcatcgaaccgaacgcaggcgagaggatgttgattgcctcttggtggatcgtaggcgactctgatcagaaacgtttgttagaagagagtatgttggtgacaagtgtgttccaagaagtcaagggtggagtgcgagaggcaggagaagaactgagtgagttgatcggccagagtgggagctattgtccaaaggtttgtcatcggatcattttccttatagatttcagtgttgctcaggccttctaaacttttcaaaacaaagagcaccgtccttcgggtagctccttcccgcaatcagtctgtaacttcaagcggacacgctataataccacctctttctccctgtcggtcgatcaagaagacttctcctcccaacttttgccgtcctctaccgaaaatagccaactctaatgaaagacgacaacagaatcccgctgtcaatctcatcgctgaggaggagctgttccatgcgctttaacagcaaagacagacgcctccccgaaacgtagcatataaatggcttattttggtacagcgtttccgggaaataagagggtgattattacgataagtgtaatataattgcatgtatcgatagatgcatttcgtccatattgaactgataactaagcatgaaaggatacgcccaaggtgacaagatatgatagagtacaaccggtagaaatagaatagacaacgaatgttgatgatgatgatgatgatgatgataatgactatgagagaaaagaagggacggtgtctaactaatttatagatcaatcgctagctttatgcgatgttatcttaggaatgaatccagagcgggtcaatcttgtcctcatcgacttcgattcccacgctaattccaatacctaaagatctcccctcttcaatctcgtcgtcttcatagaactcttcttcttcatattcagttccctcgtcctctccgccctctgtatcgagcccgtcgtgtgcggcagccgatgaaacctgtggtggaggagagggaaggactatattggcttccttcaacagtcgatcaaattctccggtttgttggagtgcccggacagcaaaatagtctccgatgggatgaccacctatgacgagcattggaagatccggaacgttgccgattcgggccaagaggggctgaaggtattccacatcggctaaatcaaagcgaagaaaaaggtataggagcaaaataggacgaaagaaagaggaaaacgaatttgatgagacagacaatcaggaggagaaaggaagagattaaccaaagggacgcacgacgatcagacacatcaagatatacattagacgtgtcaatcaatagactgtctaacaagaacatcaatgtctttgcccctctgtatagacatgaaagaattgcaggcatttgagctattttgtcttcaagtcgcgcataagaaagagatatgagacacatattttgagacgaaccctctcctggaatcacctaacccgagaaccatcacggcgcctccacttaagtcgccctcactcgtccagaattcgttgacagcttgttcaaccaattgtctaccttccttcggactgagtcggaggagattgaagtccagaacaagatttggatcaagaggttcgagtgggttgaggggcggtaagactgatgcatcagaagtgatcagatactgcataacacggtccatgatcgttccagacgaaacaagatgtaagcttaagatgttgtcggacagaggaggcaggagaacgatgaaagcagaaggaggaaaagaaacggataacccgtagacactcacacgcatcaatgcgcccaactcttctcttgggttcttccaaacccactggccatttccttctgttccaccaaacgactttgtattgtaatcatctgtatccaacctggccttctccttccgtctggatcgggtgacgcctttcgcgtctttgagaagaatatcggctgtcctatcgtttctccatttgggaacacgatagctatacgcgtcttggatgtcatctgatttgaaccacgtcgaggaaaacaacgtagtttgaggaaacagtgagagaacaaagctagatgctgagctatatatcacgtcgtgcgaatgtgaagaatagatagtccacgcatcagttgaacaagtacaggtttgaagacaaaggaaaaggacgcgtacaagacaaagcatacgagaaagacgacggccaggaggtctttcaagacatccggtagacgagatgaacgaaggatttgtcggactataggaacatttctccaaacagatcgccgatgagtagataaaagttgtaacggatgtggatccggatgctgctcgagatgacaagattagtgaaaggaagggttagtatgctttctggccaactttaaaccatgaatgtatttcgagtaggaaagattcgacttgccgattttctccgtcctccaccctctgcatcagattcggtcgactcaattccaagcccgtgtgtacctgttgcatctgcccattttctggtcgcgttgagctctctgaaacgcttctcgacagtacccgaccagtcgctcgagttgtgtaccttatgaccccagagcccacctccttccatcgcgtgttcaataggaggcgaactggggaacgacgtgttgttgacatccaagttgggcgttagactcggagcggtcgcatgtcgatgtctggccgagttggcagtcgcgacatctagcggaaaaggcgacggtgaacgactgctagtgaacgagttggaccgggcgtgtgtagattttttaggtgtagactatcgagaagatcagatcaagagttgaaatcagagatcagtttaagaaaaacgatgatggctggagtgaaaacctgcaaaggaatcgtcgaagacgagacctccagatagaacccaagggaaaacatgcatacgagtcgatgattctctctaggaggtgagaggtcggacatattgctttctcagaaaagacgcgaactagcgctgtccaagacgaacgaagccaatgttcaggtgtgtgtttagacttccgacaagccagtccaaaccaatcgatagtggtgtctaaccttcccggatgtttgtgttgtgattgtttgtgcgaagaaaactaaagaattgaaagcaaatagagaggacaagctatggaaggttaatctccttgtttttcccgaatgcgcttgttcaattcaccgtacattaaagaccaaaatactaactagctaagactgattgtggcgtatctgcacagccagggcatgtcggccagcacgggttcttcggcacaggtgacgttgtcggggatcgattcagcggcttgaagctgacaggctaggctttgttccgcaacaaagatagggatgtatcacaaaatggctttacgagaacaagagtgtgtgatacagagaacttgtcggctgtgctgaaagactaggtgaacacctggacacaccacattctcagagcagaacaagcaaccatggacggtgtggacggtgtggacggtgtggtctggaggacggacttggacggcagcccggaagatcggacggaagttacgtccgtgtacggcgagcgtaaccatttcccttttttttcctacgagttgctttctggcctacctcctccttctacacctgttctttcctccatcctcattcatcattcactcgtcaagtcagccctttggttagcgcttgcttgattagaaacctatttttaaaaaagaaacctttcctttctaccggtttcttcttcccaaaaagcggccgttcgatcgcgttctactcttttccttctctctctcttttcttttctctctttgcttttccacagaggacagtttcctctcgatcgaaactcttcgcttcaaaccacatcatggcagacgctcaacagcccaaagtcgcttcaggttagtccttttcacattctacctcttgctcgagcatcggctccacgcgatgtttcacaaatgtgaaaagtttgggtcgttcggacaacgactgtaatggctgaaaacagtagtcgtctgatcagagtcagagatcaagatcaagtttgatcaacatctcataaagaacaaaatccatttaaaacatgacttacatgactgatcaaacctcttgcttctcttttctcttcgtcttcccttccctttcatcgatcttaattctctcatccactaatctactttgatttcttttatgcttccactctggtgtcttttcctcttttttcttcttctttttctttctccttagacgatgaggtggtcaacactcagaacgtaggagccagcgatcaggataacgtcaaggagtcttcttctgctgagactaccgaggctaaagccagcgctgaggaggaagaccaggctaacgtctgtatgtgggctctgaacttaccagtcaaatcattcggtgttcatttcgctcactttgcataatctcttcaactctgattttttcccgtcatcttcaacagtggtcttcaacgttacgatcaacctccctgatcccgctttcaaatcagttcatcttcctatatctacgcctgaaggtcacaaggctcctcctagcaagacagttgtcgtccagacggccgccctcgagatcctccatgagctccgacttcaggttcaggactcggctgcaggctactggcttggcccgttctcctttaggaagcccgtacctgagggcatgaagaagggagatgttgtcaacactaccaaggatggcaacgtcatcaaggtcggagaaaagctgagcgattacagcgaactatccgagatctttcaggatgagatcgagaatcacactcccaaggttctggatctggtcatcggtatgttctttaggcagttcaagaacatcctttcgcgccagcttcaaaaatctgattgatcgatcctgaatgatgtcgcatggtcttcagagccgtttaccgagaatgatgctagaacccaggtcttgaagctgaaggagtatttggcccagggtagtgacgcacaggatccctcgaactacatcatctcgcctgcgccaagttgctacgagatggttcgagaccacatggttgcttcccgagaacctggttagtcaattcagtcgtcttcgtatgcgctctctggcttgctgacgcatatatccattctcgaaaacaatcaacagctgagagcgctgactccaagcaccagacggccaatggttcttccaagaaggccaccgccaagaagggcgtcaagccggctcctgtctccacgaccgctaagaacgctcttccccccttcaagctcatccctgatgagttcccccctttcaccgattttgacaactgggtcgagaccccgctctcgacgtttgttccccgaccggcggagagcgttgttcccaaagtttgcctaaagtcgtacggagtgtccgtttggaaccccccgcctccgcagtaccggtcaaagggtcacttgctgtacttgacggtgaccacccttgagggagagaccgttcagttgacatcttcagtccgaggatggttcatcaacaagtccacctctgtgtcgttcgatccattccctcgacctgcgcccaaggacttgaagtcccactctctctttgagcttcttcacggactttcgccgttgttctcaaaagcattctacgagctctcgggcgctgtcgagaccaccaacaagccagctcctcgagagttggtggctactattcctgtcggacaggcagttccttctcatcattggttggttgatcccaagccggctgtgatggccgacccactccgacaacagttggctttcttgaacaccgggtccatctcagctgatcacatggacggagcaagagactggaacgaagacatccagatggccagagagatgcctaggacaacgatgagagaccgagttcttcgagaaaagcatatggctagaattcagtcagagttcaccgctgcctgtgttcgcggagcaatgactgtggcccgaggagaagtcgtttccttgaaccctcacgagcccgtttcgaaccaaatgtggcttcaccgaaacatcttttacaccaagggtgtcgatagcatcgagtccttcaaccaccttggtaagcatgaggcggcccacatcgcttgtggcaaggattgcaacggaatcaaggccctcaatcagatcgatgccgagggagccgctctcctcggccacacagtggttgactgggctggagaccgatgggtttgccagtccttcctccctggaatctttaagcgacgagaagatctcgaagcgtccgaaatcgaggccaaggccatcgaggacgttgcttcctctgccgagacggaggaaaaggttgctggagaggagaccgagaaggacgaatcgatcgccaagcctcatttgatcgtttacggagcggatgttgactttggaccaaacgtcgtccggtggaacgctgccgcccacaagttgatgggcaagtacgccaacgctttccggttggccgagcacgaggtcatcgctgggaaccaggatgagaaggtcaaactcttcgccggaagtgaggtcaaggtcttgaacggaacggacggccgatcatacgtcttggacgtctaccggttgttccctgtcgatgtcgaattcttggagaaggatgtcgacggagcggtgtacacggtcggaaacctctatagccggatcggaaccgaagaggaccgaaaggaggaggcagagcagaaggaaaccgtccaagcggagaccaaggagactgaaaagattgacgaggagctcgtcaagccggaaaagtacccccaccgaatggttaccctccgacaagagctgctcgatgtatactgggagggtgagttcaggaagtgggctacccagcgagctgcctctagaaaggaagccgaagctagcaagatcgctgctcccgccgagggtgaaactaaggctgatggtgaagtcaaggttgagggggaggagaaagagtctgagcccaagcctaaggctcctgaagaggagcttctcgttgaggctaacggagacatccacgtcgccagggctaatggagacaccgagcagatcgttaaaggaggaccgtccgatatcttctccctacgattcaaccctgacgctttcgttgatgttaagcccactgcgtcgtccaagaaggacgattcggagttcgacccgacaacctttgtgccatctccttatactgacgagtctgatcctgctatcaaggctgttcgagatgcttcgatctaccttcgatccattgtcatccctacgttcgtgttcgaggtgaccactggtcgagagtcttgccacgatggtctcagcctgaccgctgttcttcacaagaagggtatcaacatgaggtcagtcaattcttgagtgctttcactcgctctctcctcttcttgcaacacggctggcttacaaaggacttctctgttattttctctacttgttcttaaaaacattgtagataccttggtgtgatttctgcgaacgttgacaagattattgccggcaagcctgctcccaacgctgtcgtcttgctcgaatgtctccaggagactattcaccacgagatgatcttccgagcgtccaagcatatccttcgagatctcctgaaggatcagctcatcgacgactggtctgctatcgtctctcacttcctcaactgtcttctgggctctgcctttgaggccaaccccagccctgctcctactccttcgccgttcgattctgacgcctcaaccaaatggaccgagcttactccgaagacgctacgagctcagatcgagaaggaggtcggccgacgattccgatttgctcttcgagaaaactacctggttgacggactcaagaagcgacagctcttgagagagcttgcgacccgatttgctttccagcttgctgctcgagagtacgagttcgaggctgtggctgctgaggatacggctggctcttctttggagagcaaggtgactaagaagtcaagggctctccgatctgatcgaactgttacgttcaacccagaggatgtattggcgttgatccctcttgtgaagcacaccgagaccggaagcgcctgcgcccgagagacgctcgataccggaaagctgttgatcagccggggagacgcccgagccggtcttgagcttatgcaggaggctattggactgtacgagaacatccattccgttgtccaccctgatgtcgcccgagcgtacaactcgtacgctgtgctcgtccatcagctctaccgaaacgctctttctgagcgagcggccgatgctgaaggcccattcgaatacgctgccgagctcgagtttgcagttcagtaccaacgacaagctgtcatcattgccgagcgggtctgcggtttggatcattacgaaaccctttcattctaccagaacttggcaatgctcgagacttgcacagaggacgttgatatgaccctcaaattgttcagacacgtcatcaagctttgggacgttacattcggaccgaaccaccctgattcaatccacgctttggtacgtattcttctgcaattctctcctgtatgctggaggaaacgtgtgctgatcaatctgttttatgtgtattttttcttccgacaccagacgagcgttggaaactgtctgtcgatggtcagccagtgggagacggcttctaaagtgttcaagattattttcgataacactcaggagatcttcggaccgacggcgattcaggtcgctcatgccagtcatgctctctgccagacgatgttctgctctggtgatcttaacggggcatctaggacatcccggttgtgtgcggatatctttatcgagcatctcggagaggaggatccctacacgaaggaggcaatctcactcgctgatgcgttcgagagacacaagtcccagatggatacgaccgtgacggctgcttcggaacgggctgctgcgatcgcccctcagggtcaacagcagcagcagaagaagctctccgccgctgcgaagaagaaactgatcaagcagggcggtggattggccgaggtggctcctaccgagccggcatctgctgttgcggaaggtggcaaattgggtgcggatgtggaagctgctacatcagagacggctgaagctgttgccaatctgatcggtgcccgaggtcatctcgaggtgagtttttcactatgtatagtctactgagtcggataacctgttcgttttgtagaaccgatctgaccttcatctttcccttcatctcaggtcgaggatttggtcaaattcatctctggagacaagcccaaatcaaaaaagaaggttaccaagaagcgcaattagactggtacataagttagaagagaagatgacagagaaagagtgtgcgagggtgtagagaagaaagaaaaaaaaacaggtgaagcggtccaaaggctgtagcgatcgctttcttggcgatgtatttatgttttcgttcacagaagaaccttccttatgagacacacggtcgcatatacgaacatgaaggcacatgcaaaatggatgttggttgctcaggattgacattgaaaagcactgaagtaaacagaagaaaacaatgctgcttctgactatcgaatgtttttgttttattgtttcaactattttctgtaaatgttcattagaggaagagttcagaaacaaattagggccaatgatgatgatcttgagggcagacgaggcagtgatgcaagagtgagtgggtgcatgtggtataagatatggatcaattaataagggaattgtattcaaaggtcaccaaaaaaatgtgtgaatgggaggcgtcggagatcagagaaggacgagaagaatgaaggtaatatcccgaaatagagaattcaaaaaataaaaaaggataaaaaaataaaaaagaagagggaagtgcaaaaaaaagcttagaaagaaggagaagagaagaagaggaaagagaatctgatccaagaggaatttatcttctagccttgccgacaggtctaccgatttgggtatcagaatatcctcccaggtcatcatcttcatcacttcccgccggatccggatggtcagctagccaggctttcgcggcttggatcttgttccatctgtgcattgagaatcccggctttgctttggctctctccagttcttccagatccgtcttgcttaacctttcattcgttgtcgtcggtggcagcccattctttcgcgctctttctatcccttcatattcctcatcttcttcatcatcttcttcgtcgtcgtcataggaaggttgggggcggtttacgtatgatcgatgaccagccacagatgaactttcagagcgcaagccgtcctgatctgttgagcatccagacgccggtttggatcctctcgaccaggtggatgaattgactgtactcggtatgttggaatccgtcgtagtggcagaagtcgtattggaagaagaagcgtatcgatctgatggatcaccatcttcttctgatagatgaaccttctttgctgcgcgtggaagggtcgccgatgttcgtctgtggtgggtagactgttcttcggacatcgctgaggccggtcgggtaggatgtgagacccctgggacgacggacgaagaagaggaaggacctgaggtgacggcgactgattttcgcggaggaattggaagattgtgctcgattgcgttctggatatcttgtattctgaataaaacaaaaggttgtcagaatgagccgggctcgagtcatgaggagaagggccaagattgtgataggagctctggaagaaaagcacatcatacctgttgcgaacattcttgttgccaggaacatatatagaggctcgagtatatgcgcccaatgcgtagcttaattgttcactgatccaacggagcgggtcatctcgatatacacatcagcgcgtttattttgaagagaaagacaaaggtcagaattttatggccagacttactagtcatcttctgcgtaagcggcatcatgatatcttctagcctcgttgagaagttcattggcagccgccctgtccttctccgcttgcctgatcgatcgtcaagtatatcatcaagaatcagcctaccaaagaaaatagtttctctttttttggggggcggggagggaggaaagaaggattcttgaaagaaatgaaatatagacgatacgaacatatctttctcaagattaagaatccgtgcttcataagcggctgggttgaatgagtgggctttggcttgagcggccaacgcctctgcaacagcagcttgaactaaggctttcacctatatcaagcaaaaagttagcgggcattcgtccgttttgaaacagtgcataaactcctccaaccctttcggtcatactatcgaaccgaccaagggaacattgatcagaaaactcaccctgtcgctctcggctagactggattgttcctcaatcatcgaactattgcttcctagactggtctttcctctgagttttccaccagaaacagttcttgctttcccagccggcgcaaaatggctcggtcctccaatatttgacgtcgttgatgccgttgtattattaaatattgagcgttgtccggtggcgattgacattcgaggaatactcttcataggtctgatcggtaatggaagaacagtggaggatgaagatgatggatttgaggcatcggctccagatccggttcggaggggaacgaaagtggacgtcttggttatcgccgcgaaatgagctggaggtggagggggtttgttatctttttggagattgaatggatcagggtaagtgggatgacttgcaattgtatacagagaggaaaaggaagtctacctctctcgttgatcacaactcgactttcgacttgtttcgatcgttgcgcgaaactgtattgtacaaacacaataattcaaacatgagcaaaaggaggggagagggttgtatacagagaatacaaacagatttgaatggaaaaagatgatacaaatctgactttaaggtattgatagtgtcttgtctaaaggcggatcctggggcgagtgcacagattaggagacctatcgagtttcctcccagtgtgtctacgatgacagttgtttccataagtaaagcagcattctcaacacgatcagatattgactaggagaagacatattaaaacaaagaggctcgtggtacgaaccttgtagaattcgagtaagtttggagtttcggtagggaacacgagttccagggcctcccgtatttaaggcgtcgatcacgtttccgagcgttgtcagagactaaggtatattggttgatggacaatgtgaatcagcgcgcaaacatggaagggggggggacttgcagaacgatttgtcgctttacctgattgatctttgcgctctcaatcattcgctctttatcatttccggtcagctgttagaacgagataagaaaaagggaaacatacttggatgagtgcaggtctctccctctgcgagatgactttttcgatataaggactcactttattgttttctgatcctgccaagtcaactagattgatctttcccgtgatgactatttgtatcaagtttaaacgaagagcatgttaacattgaagtgccaaattcatgatgttctctgtgaggcccttaaacttactcttgtcgccctccaagattctcaccacgagcgttaggacggcatgcgatcttgagctttctgcgttaagctttgtcgaggcagtcactcgtcttgatgccgctcttgaataaagcgcgttaaagtcagctggggaggagacagggacttgagacaggccggctacgacgttttgtccttggtcgtccgttcggatatcgagtttcttccgttggtcacgctttgaaggttttcaaatgcaagtagactgtcaacgccttttcgaaaagatcgatttgatgagagatgataggacgtacagtgacccaaggttcaaacaggtcataacattcctcctctattttcaaaacaagcgtggttgcaggttgtctcagctgatttagagaatacgtcaggatagaaaagagaaagaaacaaggagaacgaactgtaaatctctagatactccacacagacctccattgcgcccctgaggttttccttatcactcttttcaaaaatggccttgacaactctgaggatgatacccatgtcttttgttgaggtgggatcaccttgcatggtgtgagtcttgccggaaccggtaacaccataggagaagatcgtacatgacaccccgctgtaaatcttctccaaaagtggaaagacatcttggttgaaaacttcgagttgtgtagatcctggaccatgtacggatgtaaagctgagcagagccaagaaaatggacgaatcaccaagtgtggggtcaattctcgttctttcaggtaccgttcgactcgagcagcataacaatctgagtcgtgcttgtacgttggactgaccgagggaagggagggattgatagatgggagaaactcacttgtagacatgcctgcctgtcttgtggttgatagccacgacgccatcgccgacttctatttcttcttcttgggaagagatcaagtttctcgcctgactctcgtgaggaaggtatggtctgatccgacaagagaccaggatgggttgtgtatgctgttgtttgaatgaggacgacatgtcgagagaagaagatgtatgtgtcggtaagtggaaccagacgtgattgtcgagggacaaacccttctcagtgatctaccctttatgaaaaggcgcgtatgtaatgaagagcgagaatgtagaatggcgatttaaagtatcttgatagccgttagtaggagtagaggccaaagtaaagaaggagataacaggatgaagaaaaaaaaaggcaagaggagaaaacaggagaaaatcaaacgcgtccagatccgttgttacgcgagagggtgacgcgtcaatgttacgcatctgtaaccctgcatgtattcatattccaatacatacattcgactgcctacacaaagcttacgttaggtaataccatcccgctttttcttccatgtattcacttgcattgacgcttatgagacagcatgaacgagaccagtttgaggatatggaatacatggagcgggatgatcctcgtcctatcgggccacatggattcagtcgtccatgaagatagcatctttctgcctggaagaaactgatactatcattcgtttaaaactcacatcaacctcaactccctgatctctagctctcaatgtccattcttcaatacatcatggttccaaaacgtagaaaatacctcttggtcgtatcattcgttcttggatggttgaccctaatgcatagatccattaatacggtgtcttcagatggactgttgcgaccggtatcggagaccggcccctcaaccgggggatctccacaaccacgtcgtaacctcgaccttcagtttaacatcgacgatggtacgggtgtctcatcagacaagcttcctcttgtgttctgcgctctgaagggatacagtacgctgataactgatgaattttctgaatgactctctcggctcgcccggtcttcacctcttgattgctcatagatcctctatcagtaaagccatatcgaccgctggttccgaatctaaccggacgacatccaatcgtcaacggcatgcttgctgtagatctgagtctgcccgcttcccagcatccgatatatcagctcatagactccgccaagaaagaatgggactctaagctgaagaggcaaagtaagaccctcggagaggcagtcagagaatacagggtacgttttgttccagtgattaaccctcagtagatgtttagatgcatatattttttactcaatcgactttcgaaatcttttagcgccgatatgggagacctccacctaagggatttgataagtggtgggactatgtccagtaagtcgttcttcctttctgctacggctatgtgaacatgttttactcattgtatcaaaccttgcgcttctcttcagagagcacgatgtgatccttccagacgagtacaacctcataatgcatgatctaaaaccatattttgcatactctccccgaggccttagacttctcgtcaaggagatgaccagttggaaagatatgtacactttgtccgttcgaaatggaaaagtgcacactaaatcgtacgcgtttaccattaataagatgatcttatggttaaccctagccctgattgatcactgcccgtttgtctgtttattattcttatcttatctaaagtaataatatcgactttgaaatctctggcgcaggagaccggattaacggtcaggtatctcacattcaggacgtcgctcagtggatccctgatttcgatgccgtgctcaatatccatgagtgagttttgatagctagcctttctctcctttgtctcatacctcatctgagatcgaatttggctctcctccgttcgtaaattcttgttgtcgcagtacaccgttgagctttgtaagtgatgcccacaaggcgtacatgcaagacttggtagatgatagagaatgtacgtatctccttccgccctcgaagatagaacaaactcgtgcctaactcatgtttcccttcgttccgatcagatttggatctgaatgaagaagccgatagggcattcacaacgtggggtgcggcctgtccggggtcgtcacctcttcacaaatatcggccgaggttgcacgccgatcttgagagtctggaccataaccttacattgctcaacgcgcctttcacgccttccactctgtttaccgatccgatgacaaagtcgttcatctcctcacatgttcacacgatgaatctgtgcctccacccggataccatccggatccatgcatcgacgagcggaacgagacccattccacaatcaaggctctacccaatctttagcttgagccgaacagggttacacagcgatgtgttggtcatcccgaccgagcagtggaaagaaaagcttgacgttgaagtcgtcaggtggaaggacaagaagcttgatcatttgctctgggtgagtcaaatcgaaaacaaaaactgaagagtgaagaacaaattcttcgcctttttcttgggcttcttactaacctttgacattgacttgtctcttgaatattcaaatagcgaggtcgaaatacgggtgcaatctactcgaaatcgacaccgtggcgatcgtttcagcgatctcgactggttgctttggcttcatcggatatcaaggaagaggtcgcggtcctatcgccgccttcaggacgttcgagatcgaccaaagaggatgggaatccgacgttagaggacctagtgaagatgctaccggagggtgagttgaacgaccggttgatggacattggtctggcctatcaacctgtgcaatgctccgtcgagggtaggtctttcaacctctttccctttgtctttggagagacatgaagatcaatgctgatgagggtcaagaacatcttcctttctctttcaaagacggaacatgtcaagaaatagccgacgagctcatgttccgacctgtactaacgaacgaggaggaaaacttctctcggttggctctctctctttctctccttttctgctttggcaagaagcttagactgatccagagtcgcaatatgcacgtacggaactacaggtacattctggacgtcgatgggaacgcttggtctgctcgattcaaacggttgctttccactgaatcactcatccttaagtcgacgatctaccccgaattctggaacgatcggatccagccctggttacactgtatgtggaggatgaatcatgaaacgtgaaatgacgaatcctccgaactgactagtttattcttatgatgcatatctagacgttcctgttaaagttgattattctgatctgtatgacatcatgacattcgtacgttcccttctttgcccttttttttcaccttcccttgattggccaggaaattttatgtatatacttcttttttcgccgtggatctgtggctcgtctcatctcggcttagttccgaggaaacgatgattaccccggggaagacttattggctcaagagatcgctcagaacgggagacgttggtcgaccgataattggcgaagggaagacatggtgagtggaaggatgtcatttgctccggactaattccttttcatcatcgacagaaagggtaaacaaaggttacccttgctcactcctgagatctccttcttctttcctcttctttctttcatcctctctcgctcgcttgggatcgaacgttcccagaccgcatatatgttccggctttggttagagtgggctcggctaacatctctgaatcgggcatcaatggattttgtttacgacgaagagtgattccggttttcgattccctatccttgttccgaactcttgtctccttttctcttagtttcatctatcttgcctgttctttgcttttttgcctttttctttttctttcttttagcaattcaacaaatctacctaatctctgctgtgtatttatcgctagactccaggcatcttgttctcgttgacttcaagggtctcgatgatatcatgttcttggctcgatgtttcgaagggaaggagaagaaagaaaacatttgactcgaagaaccctccggagcaacgatactctatgtatttgataggttagactgactcggtcgatctctccgggtcctcatccatcgctgaatttctcgttcttagtatctcatttacaatgatatttgttacataatatgaatatcactttctcctgatgagctgtttttctttttcctgattttgcccctgactaatggaaaaagagtccgtctattgtatatgttgtgtgtacttgtgtacaacaggaggcgcataatttcactattttatgttttctgcattctcccatcaagttctttttttattctttccttaagtctatttatagcagctatgggacccagaggaactaagagaacatcaatcacaaagaataacgataggccagcagtagccgagctgattggcgataagttatagcgctccaacgaccccctccccctttttattaagggaagaacgcagcataatctagcaatgatcccaaaagatccttttagtcctggtattctgtcgtttatttcggagaattaggctaagagttcaatattagaggaaacagtacgtattttttattttttatttttattattattcagatatgattaatgacgatggatcgtctgggacggacaaacatatggtacaccttgggggcaagcaccttgacagggtagaacgctggtcgaaagaagatccgagcgacgggacaaacagaagttgggagtgatcgacggcatatttccaaatatcagcagaaagatctcggatgcctgtcatccgacacggccagattggctatctctgtggtgcttgtgcctaatcgatcggacctttttcgctcagtcgtgcgtccaatcggtctttgtttatccaccgaacaatcgctctattgtctgcatcttgcagtcgctaatcgcctgcgcactgacatcaggagttcccgaagtgaatgatcgacgtaatcaggcacatcagaaaatgtatgcaaagaccggagtgccgatttttgccgagttttatgaattgtcccggtgaattcaatcaattccggcgaatacctaaattgactaattttcctcttcctctctcctctgacgtgtctcttctcctttcaacagcctcgccttctttattattcttttcatggtccattcaccatttttttcttcctttcttttttccttgtagagctcacccggggggttcaagaagagaaggaaaagaaaactgattcattccaattcaaaagaaatcttctcttttctcttcgagagaatggtggatacaattccgtgaacagatattaatactagttctttcgattgagttttctctcccttcctcttcttcttccatccccatcgtttgtcgtttgcccttctcctttgtgcttccttctcttcctctctttctttgtgctttccaactgctttcttgttgctttcctattgcttcccttcgtctccatcacactgtcattgtcactctcatcctcatcctcaccctcactctgcttatagcaaatcactatcattctcgcttcatcatcactatccattccttgtatcgctcgcttcaacagcacgtccaacgtttgcttcaagggaaaccccattcttttccgcccgccatctctaacattcgctcccctcatttcgtcagactgcttcactttcttctcttcaaatgtcgttctgtcagtcctatccaacgccctatacgttctctccttcggccgcatccttcgggtcttctaccgagtcctcttcgccaggtggctcatctcagaaagtcttcacctctgtatcccaccctccgttgacgaaaggaagcaggatcaacatggcctgcacctactgtcgaaaaaggttcgttaacaatctgtgtattcacttgcccttccgatcgggacagagcaatagattccctgtgatttgggggcggatatgcgcatgaatacatcaagtcggacatgcacgtattgaatttcgtacatcacgctgactgaatacatccatctgtgtatccatacttcgcacccttttgtatccttttctttttctttattcatcaccaaacagaaaaatcaaatgctccggcgaggcaacctgcactaattgtatgcgcactaagcgttgttgtggtaagaccttgttgcccttctcttcgtcacatttcaaactgacgctagcttctccttttctttgcatcgaccgccagtgttcgaggagatatcggatgaacaaaaccgaatgaacaaagcacgcaaggctagaaataaagcactccgagaggccggtctcaagccaggcagtctcgctgcgtctgcaaagatgccggctgacgctctcggagagtccgccgttcccgatgttccccttgtagacaaccataacaggcgactctctgcgcctcgacttcaaggctggactcctcctctggtacgtgtctctgtcttgtatccatcgcatctcacctcttaactcacgtgttttctctctctctgcagaatggatcgactatctctcactcgtcctacccttctgtcttgttgcccatgccagcttctcaacattcccttcaactgttgacttcgccagatccgtggagtgcgttcgctccgagaccccaatccccctcattctcctgtagtccgtcatctgttcagtcatctccttcgaccgaatctcccccgcctactcccggcctatatgaagtcgatcctttcctcgccgctcagaagcaacaccagcggttcctctcgaccgctcagttctctaaagcttctacctttgccttcgctggcttgctagctactccggccacttcgtactcccacctgtacgcccacgaagccgacagtcagacttcttcgcccgtttacccggcacaacaaaggcctctttatcccggctcagcctcttcgccctcgtttcccttcaatactgttgccgggccgctagagaggcgagcgacctaccctcttcaacagcgccctgatcaggtgactatgccagcctgcaagactttctcggaatcaaagaacactgggctaggaatcaaattcccggaaggatatgctcctcattacccagaacttgaacatacggagtggtcaaccagttggtgcatttaagattcatttgctcttctatcgggttgtcagccttttccttcttctgcttttcatgtatctctgtttgtttcatcttttctatcttctcactctgtccatcccatgcaatatcttttgtcctatttatttttctaaatcatagagaaagaacagttccttcttcttgtgctttttcattctgttcagtctatatactcttgctactcacatcctctccgtgtggttcaatctatagacttggcatcttcatatttatatttgtcttccatctcttgttcttccctctttgctttcttctgcatgttttttttttcttctcttccttttatccttgatacttttcagcctctcgaacactgttcttttaccatctctcccgtatacgcgttctatctgcttgtctcttttaaaagcgaccttgtccatagtttatctttttcaaaagatccccttcggtctgcgttccttttgtcttatatcaccttgtccattccctttacctttcgtttctttgattttcgttatcttctttgatttttttgatcgtatttccctcgcctttctatactatccagacatcacgtcgcccatcttgatctagatagaagacatctatcttctcgtttcatcctaatctatccagtttggctcgttccagtaaactcgaaaagattttccgaacaggaagagaggcagaaagtaaacagatgcaccaatgtattcaattctggcacctccgacgtgcacataacgtaatgtcgcgtagatatacatatatcaaagctgactcaatccatgctctatatattctgaatcatctattcagttaagagagagagacaaatcagcgaattaattcatcgtccaaatgtatagataggcatgaaagcaagacatcgtttatattcgagtgagaatgaacgaacgaacgggaaagatgaaaaggagatttctttccatctgtcttttccttatcggccccggggaaaaaaacgctgatccagctaaccgagaagggaccaattggatcagtcaaaattgaagaaacatgtccgtacttaccctaaaggcaatgaacaagaaaaaacattgatcagacaaatgaatccaccatgcatccgacaagaaagagaaaaaaaaaagacgacgggacctatacaataagcagatgacatgtttctggttagtcccctgtcctacgtgaaacaaccaaaagcgtgcagctagcaaaagaaaaaggatccgggagccacatgcaatccgaattggcatcaagtcagaaaggattcaagtgtcagaatgtgttcctttctctccctttgatctctttggtctcattcttccttggtcctctcagtcttctttttcttcttgatcgtgttagacgaatgcaattcgatcagcaaatcggatgatcgaacacagaatacatcagaaggaaagatttcatagtaggctcggagcttgatggacaagatcatactataaacgtcaaccatcgagtaaacaaaaatagagcaaggaaagaaaagaaggggagagggacggttacagacaaagaagaagcaagggtgaagaattgtttcgaaaaaagcggaaggaaaaggaatcgattgtagaaacagtgaaaccatggagatcgaaagaagtcccaacttatgtgctcccagtcgtcgatgatccaaaaaccgctcgagtttagctagatgcgttgacctgttcaaaaagttcggatattcccatcaagctcagtaagtacacccggatcgaagataagagaaaagaagaagaaaacaaaccttgtctctgagcgagctcacgaactggtggtagctgggtgtcttgtccgatcgatcctctatcaatgcactcagtgcccaggctcgaagtgccggctcaccatcctctttgacaacatacaggtggggtcggtaaggcgaccgacgcatctcccttgtcgtgttaataatggcgttgacacgttgagagaactggttctccagaagagggagtgtcgtctgcggtgaatagcatacgaaccagatcttcagtccaacggcacatgcatgcacatcgtagaaagggaaagtatacgtacctttcctcctcggagttcctgataagtcggtgcgtcaaacacatcctggaccagctggggcacagcatcccgaccaatgtataagaaaatgttctggccgtcctcgatgaggaacagaccgtgccgttcgagtcgctcgctcgtcaagttcaaagtttcgggcaagatcactccgttctcacccaccgtcccagcctagatcacaaaggtaggcaggcaatccaatgaaaaaggaagatgacgagaaaaacttgactgtcaacatcttacttgatcgatgattaaaaaacactgtagaatcgagcgaactgacctcatcagacatggtgtgaagtgcgtagaatttcggatgcagatacggaatgagcaactgcgtaggcatagtagagagcagagcctgggcgtaacttcgcatatccggaggaatctgattgctctctcggataccgacctaattcatataaccagataacgtcaattatgttcaacgaaagcagtacacgctctgactggaccttttcaaacgagacggtagagagcagcatagacatacgttcttaagaagtccaagaaggatcagaggcaggaaccgaagatttgccggaagcatgagcgatgtactcgctgtacttcctccagcctgagtggccgccttgaaggcaacaagaaagtcgaagagctgtttgttgatgtaatcccttgcatcttgcagagaagacacgaccgtcttctccactgctttgttggcgagaagagtagcaatggccgcttggtcggccgaagcaaagatattggagacgttgtcggtggtgggaaggcaaagggtgatgactcgaattcgacgttcgcctatgaaatgtaatggaaaaatcttgtcagcccaccatgatacgtgtcagttctacgtggccccaaggacgacgtgacgcaccgtagcaggtggtgtgtagaacagcggtttgcatgcagacagtaggagtggatacgttgtcctccaattcgacctcgatagcataagactgatcgacaggaacagcaggaagggaaagaagatcggtcgaccggacaaagaagttcccgtggaaagccttcattcgaagacctgaaccgtatttgagagtacaacacagaattcgggtcaactcaattcagacaggttctgcagcagcattttacactgagttgaaaggaaacgcacctcgagaggctcgaacccgaatcacggcctccaagcagatctgactagcgaggacctcgccaagctcatatgaaaacttaatcgcatcctccgacttggcagcgttgaatgccgggtagaagtaagtctgaccaccggtatacttaggaaggcagcctgacgaaacgttcaaaaatctctcagcatgttatcagatccggagaggatgagtctagcaaatgaaatgaatcacgtactaagagaagcaatgtcggtatacgtcgcgctgaacaagaacatgtcgactgatacctgggctcgggaacaatcgatcgcaaacgtcttgtaccatgaccctgcagactggagcaaagtagactccttggacgttcccagaagctttggatcttctcggtgtttgagcgctccagggccaagagtaggaagggtagatgtcaaggtaacgatctttcctccgatggaagactgggaagttgttaccaagtcgacgaaccatgtaggattgttacttgcatcagtattgataacagacacacaaatgagaagaaatagaagacatacgatcagcttgtaagcagcctgcaaaccagctccaacggcattggcaggctccatagtgtccttgaaaatatcgtttagtccaccaagcacattctccagcgcctttctagactccttcacgttgacgagaagatcagaaggtttgggaaggaatacatcctcgagatccgacataacaagcatagcgggatcgctttctccggcctgtgaatgtgacagagtatgtatcgttagacttcttgtctgatcacgcaagaaggcaaatttccgactcctcaagagccgtcaagagtcaacaaaaaggacgaacaggcagactgaaaaagtgcagagagctatcgacagcgatgattccagcgcgggttcgtccgtcctcgttagggagtcgatctagcgattcaaggattgttcgggcagccgtggcgaccattcctatggaagccatcgcagaaaagagaaggcgagttgccattccgttccttctgagtgagtaacactgatacaaggcatataggctgcaaaaagaattgacgcgcaccagatttaacagcgttggcagaaacgtcgattaagaagacgtaacaaggaggttgaggcgctcggacctgtattcattcctgaaattcagtaattggatttggattgatagagttggccattaagtgaccatgaattcaaacttaccatgtactccgttggagccacgaagtcgaccacgctgtagttaagctccttcctcgcccatcgatcgacgttctcattcttcttctcgtcatagtcaaactgctgaggtacttcattagacaggttgcaaagcgggcacttccatcggtgtccaccctcgatataagtcacatatggatgaatataagctcggcatcgtcgacaccgggcaatcaccgtatccttcacgacgggaattcgaggctagatttatccgtaaacaaagaatatgtacgtgagtagcttgtcctagccagaaagacctgatagatcggccgcggatgagatggaagagaccttcaaaacagaggagaaaatgaactcacatcgtgttccttcaagcttcgatgcggggagatgacgagagcgaatggaagtttgctcttattgagcaagctgttagttgtagggaccgcgttcaaggtagatcgcatgtatgaatagtcagggattgcatcagggctaggagtcaaactggctcctggaggcaatcgaatagcagggggagcttcttcgatattagtcacatcgggcctgaggccaaccaaattgactgtttcaagagggtactatagatgatccagagaacacgataacacaatgtcagcactctcatgataaatcagaagtatttataccaacatagtctcctgtacccctgcagagagataggaggaagggaacaagcaagaaaagaaaagatgtagaagaggagagcgagaccgaccttcaattctgaagcaatccccatatttccaaactgatttgccagttgccctacacctggtcctgcacctccctgtgcccatcctgcacccgactgaccggctccctgttgaccatagccctgtccccctcctgctgctgccggatcatagtacgcctgccctgctgccgctccagtcgctgactcaaccccgaatccaggggtgtaaagctggtctcctcccgccgacccagaaacaggtcccagagacggatctcctccagtcggttgaatgtacgcctgggcctgctccgaagcatactgtcgtcgtttggtgtttgtgttctgcgcaggggcttgagggtatttctgttgctgaaagccgggttgaatgaccgcaggctcgaaagcgggaggatcccattgagattggccttggggacctaaggaaagaaaaggaagagaaaagaagacggaagatgcatcgacagaaaggtaagtatactggttagagagaagaccaatagaaagataaaagctgactgatgtaataaggtgtcccatcgtcggtcctgtagacatcacaccaagacagacatcagtttcttgttgaattactgatggaacccaagaggaaaaaaatccctagcagatgttgctgtgattaaggtttggacccgaacgaaagcagaacacaaggaagggcggaacagatacaatctagaagatttggagaacaacaggaagagaaagcgaagatacgaaagaaaacaaaaaagacctaggagaaaaaagggacgaaggcgacacgtatcatacaaacgaacgagacagagatgggaatatttaggacttgcctctcttcagaccatccagcaggaagtgcaacagcggacattttagctacagatcactgagctgtgagttcgagcggatatacgaggtgacaacaaaggaagaggaaagtattaaggagatagagagaaggaatggaaagagatccaaagatgggaaaggtctatgaagagaaagatcggaagagacagaggtgggtgttgtgttcacgcaccctgggttacgacatgcgtaaccacgtgactagtttggcatgtaaccctaaccattgaacggggatccttgtacgatacctacagacactcatgaattctgggaaaggagaggatcatttcggggcacagagatatgcactgtgggcacgtctgaacacatacacataacaatcccatctcaaatccgggcttgatcaagttctggacgttgtataggaagaaggcaagcaaaagttctttgagagaaccagtccaacccaatgaattaacttgacgaaccatcgacagcaggagactatcgtacagaggaacctcgaaaccagtaccctcaacgttgaatcgagatcgttgttttcctttttgtcactttctcttcgacatttttcagatgcggttttctgctacgcgtcatatgcatgtgtcggacagataggatataaggagttttcaggcataaacataaccatcccacagccacctaatacccaaaccatcattctagaatacccagccatccaatttcccaattctgcctatcaatctaaatcacacaacgaatccacatgagtttcaaaaggtcgttctgaaaggcgttgcggcgggtgtgctcaaaggacgaagggtggaagaggtagatggatagaaaagaagaccgaagagagtgcaggaagaagaaagccgaaggggaaaagagaagctcgacatttactacgatttgaaagaaaagcagaggaaagaagcaggttagtggattgatcagaccaagttgatggatgccggttatctttgaacgaacgatgttgagcttggtctttcgccaatgctataaaacgaaaaaagaagcggagacacgttcagcaaactgacgtgttcgtaacaggcatattcaaagagggtacgtactcgtctcttcttgttgtactgcaccttggtgtcagccttaagtcggaaccactggggaatgggtcggttctgtcggccggccttggcaagagcaaccttggttcggaaagtcttttgggaaggctaaatggacggacacagacaaaagaagaggaaaatgttaatatctctcagcgagtagagaaaatttagcaggcagagggagagggatatgtctttggctggcgttggtcgataagaatgaatctgtggattggcgtggtgtctgttgttgtcgaagcgagccgtagttcttcaagatgaatgctggacgcaaggggtcaaggttctgccgtcgttttcgtttcctacgcttctcgcctaaaaatgaacaaactatcaagttcattcaccgaacgttgtccaaacccgcctcctgctcctctcacaaactatctttttcttctcccaagaatctcactggacacgatttcatttctctgtaaaactccagaaccaaattctccatccagatcgaaccagatcggattgattctacgagcaaaactggaggtcgagttgttggaatcttcttgtcgaggagaaaaagttttttcttccttgtttcaggcgagaatcggcgtgtggaaaatggagcgggtggccgaaaagctgaagaatcgttccaagccgtcgtatgtcgtgccagccaaagacatatcgataggaaaggaagtggcactagacgatatctaggaatggcaaggaatgatataggacactattcccatgtttttctacgaaccattggtggagattcttgccgtgaggataagctacaaggagagaaatcttggagaggccaaaaaggagaaattcgaacgtctctctcgcgcctgcacccccattcttctctgagccaccccgaatttacccaatattacccaaattctcccgggtttgccacgcgaactgtgcactttttgacatcacgtgatatcttcggaaaaaaatcagccttctctctgacttttaatcctcctcgtctgactttttctcatctggcttcacagagcgacaatccaagatgcgatgaacagagagagagagacacacacagcgccgttcgtggggcagaaagaatatgctgaaagcagaaaatagaatttcatcaactctctattgtgtctgtgaaagtcgcaatctcatgaaacagcgataagatgtttggtatcgatccctcaaactactgccatgtatgggcgtgttgtctcgcggatttttgaccgtgatgtgattgcgctgtctttctaagtgtatgtgagtgaattgtagaaccaccactgatggcatatcctcagcatagtgtgtcgagtgcgctctgcttgccctgctctgtctggttgctcttagatttaatggaacaaggatgtcaacgcatcgcgcagcatactccatctagcccttcaccaggagaagaaccaggaggcaaggatgctgggccttgacgctgtcgctagtgaggctgatgttgagactgtcatgactgctgaggctggcagaaactaaacccatgacccataaggatcttggcgattcgtggtctgagggcacccaagtccaaaaggaccatgtatcgaccactatcggatgaggtcactctcaccgtacttaaagcatacttaggtatcatataatcattttcatatagaaaggagcgtggtatggccaggtacaaatgaagatctttacaaagagcgaaaccgagcaaaagaaagcgacaccgtgaaatctagaaccaaacacaagaaagaatacggcaggcacatctagtactttcgatcatgctcgatggattcgtcctggttggcgatcatagcggcatgttgctgccgactgtgacgcgtaagggaatgtacagaggcggatcagcaatgagcgtgtcaacggaatcactatgaaagaataattgaaacaacatacccttccattcgatcgatgctgctagggtcggcaaatgtgttgagctccttgaagtaggtgggaagagcgatggcgcaaaggaaacaagcgacagcctagagaagagagagagcaaggataaaggaagagaagtaagggtctatgtccaatttgcgccctactagtaaacctgcgcatcaaaaacttaccaaagcgacgtaaggccagaccaggtatgggtcgtcgaccactttggagcaagcaagagcgagagcggaagagatagcactggtgaacagagcacaagcaaagacaagcccctgtttatatttagaacgaagtccaaaattcgtcagtcttttctatctaagcttactttgccacgcatatagagagaagataataacacttaccttcattcgggcaggcgctcgggtgtaagccaactcataactagtgacatttacgaagagctctccgatagcaggcagggagtacaacgggatctgcgcccagaggttcacggtcgacaattcgtcacaagttgaggccaggttgccgcagggactggtggcatagactctccattgaaggatagccccctgttggtggcggtcaaatcagaaacaagcagccaggcgcaaaaagtggaatcagccatggtggcacaccggggagataaatgaaagatgtggtccatcagacagagtcggacatacgatgatcatgttgatagagccgagcatgaaaccgatagacattcgggtcatcggctgcaggacgatgtttcgcttagcgaggtaagggtaaatcccccagttcaagataggagtgaagataacctggaaacaagccaaaagaagacagtaagctaacatggcttaacacagaaggaggtgcgcaacatacaatagtgagagcgttgaagttcgagatcaagtcgttcggaactccgttgttcaccatcgaggcagacatatcattctcggaattaccgaacccgctaagaaggtggttccaggagtacaaccagatccaaagaagtttcagtgtctagattcttgagagtagacagagaaggaacaagaccaactaacccatcagcaaggttgaagatgggaattagaaggaagaccttgcaagcagcaacggtctgtctcagttcatccacaaatttgtcgtcccagagaactcgacttcgatcgatggttccttctcgctgctcgatttcagacggcttggcctgaacagagaacgtagcaaaaaatcaagtgattgagtcaaaaccatgcaaggaagagaaggggaaagaggggagcaggatatgaagatggaagcaagagagaaagaaacgaacgaaattccagaacgtgtcggagtttcccctgagtcgcgcaaggaatccccgagaccaaagaacttttacaactcgggaagcctcaacaagaacggatccttggggaggtgcatggctagaggttgaacaagagaaatcagccgagagattctatgtacatatagattcgggtaacaaggggtggcatgaggatacttactaaagccttttgctgtaagtttcagaccagagggaaagatacagtagataaagaccgattcatcagcaaaagggagtgggaagcgccgaagggcaacaagttggacgtactagacaatgacaaggacaacgggcaccatcctaagagagttaagagttgataaaataaatacatcagacaagatcgaacagagaggatacgggcagcttgagatatgtgacatacaaatagagaattccaggaataaggaaggccagccaaaagccaacatagtaggcggagtaggaagtcgccaaactaagtgtgatagaggaggaatccgagacggattaacaccagagttcacaaagttgttctttttcggatggtgaaagacagcacgtacgagaagaaagatccaatgttgatggcccagtagaagataagtagatatcgctgaatggtcgtctggggatcaagaatagcaagggatccatccttctgagtgatcacgacttgtttggtaacaggggactgatcgcagagcaaaggctatgggcgtcaaacaaatataaacagtgagaagagtcagtcttctgtagttctctttgacttgttgaggaaagaggttagaaatcgacaaagaacggaaatgacgtacgcccaagcagggcttaatgaaactgcaggtataaagtaaagtgtgattacaagggttagcaaaactattatcggagatacgcgacaaccgcgcgagaatattggtgactaacccagatgcgactgcaagagataaagaaatggatcaatcaggcgtctagttgaacactaagattagatctagggagagagcagctcacaagcaagaatcaagatagaaatgatgaacggagccatggcattgccagaagcgataacgctgggggcagcagggatgatgagcaaaaagtggctgacaacaccaatgaccgttccgacagcgatcgtcttgaatcgaccccacttggtatctgcgatgatggctccgaggataggaacagtgtacgcaaggaaggtgaaagtttgagtaagagcagtagctgtcacagatccttttctgtatggtccagcaaacacgagaggatatgagttgattgatccgagtgaagagtgcttttacatataaaacatgaggaactacgtacccaagtgctccagcagtttcatcagttcgagagggatcaaccgctcccgcaccattaccaccgattggcaaagctcctctcacgaagtttccgaaaacacccgtgcagcctaattagagagcgcggcggataggttacagagaatgaatcaaaccatgagtctctccacactagaggtacgaatcagaaggataaagagaagacagtgaactgaccgtagtatgctgcaaaggataccaaagcgaagttaaatggattttatgtgttgttatcagatacagggtgtcgcgtgagcagaagagagagaaaagaggcgggagagacgtacaagctcgctccgcaaactccaccatgcaaatcgcaaaagcggcccaaggaagcgcggcaggaactttcggaagtgtcctgagttcctcctcggtaggaatcctctccgtctcttctgcttccaaagcggcaacaacagagaccggatgtgctaccacatccttctcgctcttagaagccgagtaggaaggcaatccattctgggccacaggagcagactcgtagtcaaccacagtattctgaccggcgcctgcacacgagaacaaatatataggttgtactaaatacgtcgatacaactgtgggtgattctggtatggatgggctacttactcatcgcttgtatatgtaagtgatgttagtatgtgattatggatgatatgctatcaggttcactgctcgacggagatttgtatagtcctgacgatgacctatgccgatgtaaaagaagggaagagaaaagtatacatggcatcgatcttcttctatctattataatcgttcaccgcaaccgatcctctaacaaagatagctgaacaagagaaagaaaatcgggaagcccgctgggagcaaatgaaataaaggtctacaaatcaaaaggcaatagagccagatggcaacatatcagctgggatagaacgacagcgaccaagctactgagataaacgatcaacgctgagcgaatcgaccacatggggcagcagaacttcatttcatatcgagcttgatatgataacaagcggaggagtcggcaatataccagcctatacggccagagggcggaaaaaagaaagaattggggcactttccatacggagagagtcttgttgaaagcagacctctatcgtctttactggatacgacttcacgtgcggaaagaatataatctaaaaaaagaagagcaaatgagcccatgcgattactgggaatctgtgctgcgtaagcttctccggcgtttgaagacacgtcagattagagcgtcggctgtcggataggctctgccgcattgagtacttgggctgatcgtcagtgagatactctgaattcatgttatagccggtgatttcctctttaaaaaacacactagtccgttgcctccatcacaccatcgcttttaaaaagagagtcaaagaggctgaaattcttcaatttccaaactctcttgaacacagatgatcagggatctgttctggacgggcgagcaaatagccatacggtatttgatattccttcaccctacggctacgtcctcaaagatatatacgggaggacagatataaggtaggaaggaaagaaagaaagaaaaaagaaaagctccgagttcggtgggcctggacacactgtgcaacaagctcaatcagaccattcctcatccctgtccgttcggagaagacaagagaagaaaataccatcgacggcgttgcaaaggttcagtctgagccacagattaaaatagtatacacaaatcatccggagaaaatagaaggacgcaccctctagtagacttctcatcgttctcttcatcctccagtctgatcatacaaagggaaaacatcgaacaaatcagcctctaaattcaaggacgaacagagttaaagcttcgagagcgctcacttcgcacgtgcaaacatggcgtccatcgaggctttagctagagagacaaccaaaaatgcgtaagagtgagttctgactgtcttcgtagggcccaaaatccaccctcgatagatctcgggtcgacaacaaacctttctcggcggtcgtaggttccctcttgccaaactagtcaatgaaaaagcaagagacacaacgttaaaccaggctaagaaataggggtaacatgcacaagtagaaaacctacctggggttttcctcggctcacagcttggacgaccggcgcttccgatgctgatcaagttcaaaggagatgctttcgttagtcaggatgggtatgataagatatcagggaggaaacgaaccaagtttcatcccctctggtctaaggtcaaccagcggaacagcatcgcccgccctgttcatccaagcagatagctcagatcctttcgtccagtctctagttggagggtaaacatcatcctggaacgcatccatgtttttcctagggatcttaaacgtgaactcttcaatcgttcgtggggtcaaccgatatcctttggcaacctcaaccttcctaacatcaagtgtcgatttaggaaggaaggagatagcattttgcataggaccggcaaatgtcggcaatcgagtcaaggctggcttcgggccatcgagcttgatgtcgaacgcagagatcctaacgagacgggaagaagagcgagaaaaattaatgataggtgagcctctatcacaagcaatgcataagagaaggaaaagacgaacgaggtttctccctttccccataaataaaggattgacgtatcggcgtctggatttcatcatatacgaacaattcaacatgaatacttcttgattgatagtgccatcttattggaccgcaagattcgatgatgagacgagagtgaaacgcaccaaactttgggaacaagacggaaggtgagacgtccaacatgaaagaagtcaccacctcgatctcgcttcccagctcgcccttcagggaatggaccaatatcttgcgttgagatccttgtgcaaatccaacgctcacaaacattctgtccgtcaaccaggctagttggaaccctcttgcgctgtcgtgcgcaggcccagtccatcctgattcggatgcagacagtctcctgggatcgaacacacggacctttcgatctttgcacgcgacagcgattaaagaaccttgatcattccatgcacctgtccagacctgatcaaaataccatcagccatcatattcacaaacacacatgacaaatgatactcactccactgccagaaacggtatgatccattagaatgtttcctgcagatgtaccaaacacatgcagacgacctgctccagaatcgtttgagaggacggccagcacattttttactaaaggattccagaccagctttgcgaccttgtcaatcgtcttgcctatcagatgccgaatgcagttcgacgaaaagaaggacagcgccatatggggccagaaaggagatagaacatcagttcagaagtctcattgagttgcttcgaatgaatcgttttctgatatcatgtagcacgtacagtctaaaacggtttctggttgagttacgatcgtacccagctcgacgcctccctgtggtacttcccaaatcttgattcccccatctactcctgctactgcaactctactctcattaccaatcggatctaccgcaaagtctacgatatcactcccattagcgaaatgaggaaaatcccctacaagcgggagccgtcctctcttttccattggttgaatggcgagtctgcctccggagccggcaatggggaagaacaaataggacgaggttacttggaggaggtaagaatctgcaggatgggcagttgagaggcaagacaggttgtcgaatgtaggaatgagatgcgaggatccttgcaagaagtttcgggaccagcgaggtgtagattgcgctgaaccactggctggtttaatgctggtcgaggagttggatggaagctggacaggtgaagcaacagtcagtttggtttggagctggataggggtagaagaaataggtggagacggagcggaactgacggtgggggcgatggtgtatatagcggcaggtgcagcagcaggatttttggatcccacagagggaggagtcgggatagagagctttgataaaggctctgccgaagtagggctactcgctctagattctcttggtttcggttctgatagcgtatcttctagcttggaagggatctgggctcgattcttaggctgggaagagtttgattcggcaccggtctgactggacataccgacaacagaggctgcggctgacctgattgtcgatactaaagcctcaacaggcttcaaggcctccgatacaattttttcactcgcaatagttgccttgctcaatacatccgaggtggtggggacagacgttggaatgaatgtctgggcaggtcgttcgtgtttgaccgctgggtccagagagattgggagaggaagagcatcttgtccagaaaaccaggcttcagatgattgggcggcatagtcaggtcgaactggggggaagatgtccgtatggaattcgatgtaatgctgtacgaggatgcatgtcagtgaacatggcttggctttgagcgcggaaggtcttggtcagaagcaatacttactcgtttaggaattttgatagcaactgggacgatctctttgttcctatcaacgatcatcaacctgaaaggattgaaccggcagttaggaatcgtatacgtatcaagttttgtcaaaagcggtcacctacctattaatctcaccatccatgacgttcagtcgacctgcgggtgcaagggccatggtgattaccgagctgggaatcccgaccgcacctaagaccaaaaccgacgtgccatagtcatatcaagctgttagtgagccagatatctcttctacgcgaaatgaaacagaagaaaactcaccccaagtgaaggagaagttctttgaaatttcagcatatcgaatggtgttctctgatcggccagctaggtagacagttcgtcgctcctgatcgactatcggcacgagtggcgcggtctcataatcgatcgtcgtttgaccaacaggagaagatatatctgaaggatcaaacaacaggatctgtcgctctcgagactagaaatcgcgacatgtagagttatgacatatgatcaacaggaggaaaggatgccacgcgatcttaccttagagaatcctgagatgagaaactgatcaccaaaggcgacgattgacgcctgcttaagaacgttgagataaggtgccgaaatctgtaataggaagaaacatgtgtacgagagcgttggcgtcatcacaaacagaaaatgaagcaatgaaaactcactttaggaggtcctccagctcgcggatcatacactcctacagtcccgtctttagctacaacgcctatgagcttaccatcccagctgaagcacacacccaaaattcccttaggagaggatgcttcgaattggattcggggctcagccttggttgaagagagatcaaatacggagatggtcgagttggttgagacaagcaggatagccggattggcagggtgaaagaggaccttgatgattgaggaagggagagagaacgactgaagaagagaaggctctccatttgggtcagggggaagtacccaaacattgacctgcgttcgtgcagtaatggtcagaaacacgcggtcaacgaatgagtaaggacgagaaagggagacgaacccctccctgacctccgacagcgactgtcccatctttcgcatcgagacagctgatctttcctcctagggcactccagctgagcagaggtcttggggcttgtccggccacaggctttcctaaatgtttctcccagtcggcaagaaagaggccaccgagagaagccgaggttgcgatgattccgagttgagtcggtctgatcagagtaggagaaatcccatcagaaggaagagggagatctggataaaaaactgatctatctggcacaatgggaagggcgttcttatacggagacactgcgaagcgcgagggtggcatggcaatggtaagatggagagtgagagagtcaatctgagcaggagataatccagatgtaaggagtcgacccgagtggtttacatcaaatctcgatcatacagtgttgattcaactggtctttcatctacccgcttctgctgtctatatacaatctcatcatctggctcctagccatgcgcgacagagtgatacagctgctttttcgccttgcccttcttcgtcgttcccttctctctcaagtttagattccactgtcttcgttcgaagcatctctcgtcttacctatcacaaggcagaattgagccagcgcaagtccaatagaagagaaagaagagaaaagtctggcaaggcaagcatctgagtatgtgttgagcttattctatagagatcaaagattgagaacgacagcaagactgttggccgactcgactactctgaggttcatgttgtatacctgacgccggatgtctacatgaacatcgctgagactcgctgcatgcagttcgattcaatatatcttctctgtctcttcgcctgtctttgtctctgtctttgtttctttgtctctttgtctgtggacggtagagtgttcaccaggtcgttcatcatgaccgacagccagtcgaaccggtcaaaggagatttcctgcaaacaagcagacatcaatcccaacagcttataagacacaacgaactcgagacgatcagagcgctcttctatatcagaacatctcttcatatcagaacacttctccataccagaacactcatcagttgctttgaggagtgccgctcctcttgtgttcgacatgaagcgcaagaggacggttcaggcctcgacaaagtcttcccttgcggctaacactaccgctactactaccgctactactaccgctactactaccgctactactaccgctactactaccgctactactaccgctactactaccgctactactaccgctactactactactactactactgccacatgctcagcctgcggtcaggttgggcactcaaggcgatccaaccacctctgcccattttacatccctcgtcagagagtggaaatccgcgccaagtcagcggtccctatggtgtcagggacagtaaagataggctttggttccttactcgcctttgggccactggctggcccgatcgagtcggccgttgcccggctaggaaagataacattcgacgcgtctcgccttctcaatatccacatgtcgaaggtctgcgcggatggaggggagataccgaatctccctaatacaatgcggctctattttcaagctgttggttttaacacgcgtggaggaaatctgcaccaaggggcgccgacactgaacgaagggatcaaccacatccgggacgcctctttccctgctgagcaccagttcacagactcaaagtgagtgatctctttggcaatgacaatggtaatggtgattcagctggccgtaaacggggactgactgattggccattgctgtagaatcctgagcagcatgatcggcgccaaagccaggtcgtggaccatggcctgccagaaccatgtcgtcctgaacatgccgcgccgggcttctcggctcatctcttggtggctggagacaaacgttggagaagcgatccagagtcggatcagtatcagtcaggtaaggaagacgagtcacctgaggagatgtctgaataaaggctgcagcgatgactgacctatctgacctatccgatacatctgttcgttcttagcgcactgccctctcccatcaactctaggagcaactgtcccctcctg

SEQ ID NO: 853 - DNA, 475 bp, Xanthophyllomyces dendrorhous
tactgaccatcttcgaggaacatggcccccaagatgcggctgcaagacggaccactcgtcgccggggttatggcctccgcctgttctcgcttctgccgctctcgtcccaccggtcatcttatgtctttgtagacaccatggctctctacgaactttggtgccagctcaaatcggcaggtgaagatctgggatatatgcgtggggtaatatgggactccttccgggctgactctgacacttagtggaggccgtcgttccatatatccaaggtcgagaccgatcggcgacagttcgcccggtcgctcagtacggacggcatcggcgtgtctgccggaatgctgagacccatgtcgtcttcatctggcatcgacgcctacggatggagatgggagggcgaaggcaaggaccgtcaccaatcagagtatgtcccgtgggatgtgcggccagaggacgaagtcgtggggctggacccagg

SEQ ID NO: 854 - DNA, 1619 bp, Xanthophyllomyces dendrorhous
gtctccgcgctgctctcgtcatacactctcagtcctactcctggctcgcgaccttcttcgctgctcgaaggtggagacgtcttcgctggggcgcacacatcagccgcgaacaagcataccacaaggtggcgctccgtctgtcggcaggacgtccacgcaccttcttggccttcggcgacggcgccttctcatcgtcttctcgtgggcatgcacctggtcctatcaagatgatgtatgccaagctgagggcctctccgctacttcaggtccgcaaagtctgggagtttcggacatcgagggtgtgctcaaagtgccatggcgagttctctggaagacacaaagcgtgggcgatcaaggaatgtcggagcgtctgtcgagtaagtgctgtgtgtctgttacatatcttatgatagtgtctcgatgactgattattctctatgcttgttcacggtgttttctctctcagacttggtggaatagagatatcaatgcgtcacgcaacatgctgcacctagctctgcaccaggaaatgaacgaaggggcgagaatgctagggttcgacatcactgctactacgctggtcgctgaggctgaggctggcacagactaaacccatgacccatgggaaccttggtgatctgtgatctgagggcacccaagtccaaaagggccatgcatcgaccaccatcggttgcggttactttctagtagccaaagccatatattgtaaaaaatatagacatcggtcttccaagtgcggtaacttggttacttcctagggttagaattagagccgaaacatacttatgtaaaccaaacagaaaatcaattattcattcatctataaatctgtctcaaaagtcattatagtctgagattgttgaactatagtgaacttacaaatgtgatcaaccaaatccatcgaccatcatcacctcactctcttcctctctctttgactatagtaggttcgaacaatgcgcctccactttcctctcaactatcgagcaatcctttgccagtgctgatggtagatgggcgactaagattaaagtaaactgttgagatgaagtgtccggctaaagaccagagaagttgacccgttgtgccagactagacccgaatgtcgattccacctcaaatatagtccaacctcatcgagttcatcacaacctcgccttgatattctaacagacgattaagtctttcggcgtcttctggacgacagcctgttctcgcttcaacccaacttacatcggactctcgatttgagcttctgcttcccctgacccaaaacgctcggctggatgtctcgttatccctgaaacatatcatgactgactcgattcttgctgatcccagtctgcctcgttcatagactctatcactcatcgaatcaaatctctggcatactttacaattcaggctcaagacgttccgctgtggacttctgtcgtagagatcgccaccaaggagactcacgcagttgctcatccaacctacgtaggaagagtaaggaaaagacagccgtcaagtcagtagaaggaatgaagcgatctggacgtaatcttctctctgccgtttctccctagtccgtttctcttcttcctccctatact

SEQ ID NO: 855 - DNA, 2848 bp, Xanthophyllomyces dendrorhous
gtctccgcgctgctctcgtctcgcactctcagtcctactcttcgctcgcgacgttcttcgctgctcgaaggtggagacgtcttcgctggggcgcacacatcagccgcgaacaagcataccacaaggtgacgctccgtctgtcagcagaacgtccacgcaccttcctggccttcggcgacggcgccttctcgtcgacttctcgtgggcatgcttctggtcctttcaagatgatgtatgccaagctgagggtctctccgctgctccaggttcgcaaagtgcgggagtatcggacgtcgacggtatgctcatagtgccatggcgagttctcagggaggaacaaatcgtgggcgatcagggagtgtcggagcgtctgtcgagtaagtgctgtgtgtctgttacatatcttattatagcgtctcgatgactgatcgttctctatgcttgttcacggtgttctctctttcagacttggtggaataaagatgtcaatgcgtcacgcaacatgttgcacctagcccttcaccaggagaagaaccagggggcaaggatgccgggctttgacgctgtcgctagtgaggctgaggctggcagaaactaaacccatgacccacggaaactttgggagtctgtggtctgaggtcaccccggtccaaaaggaccatatatcgaccactatcggttgcggttgctttctagtagccaaagccatatattataaatagtataaccctaacataactttccatcaaccacgctcctgtttcaagtattaaggatttttctttttttcttcataatatatttttctagaaaatctgagtatctggaaggaaagtgtatggtatgtagtctggaggactatctatgcgaagtggatgcctcgttcattgaatgctgtcaacaatctggatgaatttaaatagaaatggatgatgagaaatctggtcaacaaggtcaaggtgatagataacgtacttcaagaggtcatcgatatccatcttagctgcacgttggtcagcgaatccagtctccaccaaaatctcctcgaccgtttgggaaaactcctggctaggagccatctattaagataagagaatctcggcgtaagtcacccaacgcccgtttctacctggtgacactcgtagatgaggacgaataagagaccaacctcttctttctgcgccaaccaggtcttccaattgctctctaacatctcacacacaccctttgctccaaaactagctctgacggtcttgttccttctcgagaacacgactctgccaagtccatcgaactcttcgaaccgaaccggtgggggaggattcttgggctccatcctgatcaccgaactctcgacgttcggcgccggtcggaagttgttctttccaactttcaatagatgagtcaccttggcgaaaagctgaacgttcgcgctcaaacgagaccacatcggcgaaccagggggagcgcaaagacggagggcaaactctcgttggaacatgagaacacacgtccgcggaagaggtcgagtggagagtagcttaaagactaaaggcgaagagatctgtttgcaagaaacattttcaagaaatcagtcttgcgcagaacgttcgagtagacaatgagctgaagaaagacagtcttacttggtagggagtgttggagatgcatacatcaaagtaaggaagttcggctttcacaaagtcgccaaccatgatctctaacttcctctgctcaggtcttcagatgcgccaaagagaagaagggcatgtatcgtcagtccactttctatattttcctgcgtgaaatcccctctctatcgttccccttcctgcctcgatctgcggatcaagcgagaacggcactcactttcccatgactcgcttcgtcaactcggccgccattcgagggtccatttctacagcaacgaccttcttacacttttctaatattcggaccgtcaagtttcccgttccgggtccaacctcaagaacgacgtcggtaggcttgaggaaagactgcgcagcaaaaccggaagacatgattgtcaggcgaaagacgtcaacaagaaagagagacagccgatatagagcatactttatcaacgatactgaagaaagagaattgtacatagacgaacagatcgattagcttgatgaacttctgacgcggttaaaatgctctgtaataggagcgttctctacctacctttgggcaacatcagggttctttggagataacgcagttttcacgagcaccagtcaaagaagtatgtatcagcctcaagcactggcaacagagtatcaaccagacagaagctttttggttccaactgactttaagaatgtgctgtccgaaccgctcagtgttgaatagcggattctttgagccatccccaccgctcgcctttggctctttagtcgtccgggcggctgccgagtggttctggttgaatttttgagaggtcgcacggggcatttcaatcgatgagcgttctgtgaccgggagcgggagaagacgaagcgacggacacaggaggggtgtgtgtatgtatgatggccgggtgtaagtggaggggatttgtttagtggtgaatattttatcagaattcacatcagccttgcgttagtctcgacactttatcaaacaaatcgcttcttcctatgttcttacagcaaagagcagagtcgggtcgtcgtattcgtcttcatcaccatcgataaacacatggaaagcctgcccaaacgtccgttgtctccacaggcgagcttggccagaacgaaacatcttaaagttgaaagtataacatcaaccgcgcctcgagatgtccccgtatccgcccccacct

SEQ ID NO: 856 - DNA, 46830 bp, Xanthophyllomyces dendrorhous
cacctcctccggctccccctccgtttcaacaaccatcgcctttgttcacctattcgatggcaggcccatccgatccctctggacacaggattttgctgttcgataattctgcagcagcctcgttcgcgcctcctccgatgaatgctaacttggatgaagggttcgagaggtgtgtttggagagacgagatcaagtctgttaaagagggagtcgacggattggttagagggctagaaaggcttgaaggtcgaacgggaggaaacaaagtactaggaaagggcaaagaaggttcgctcactattctgtgcctatatatctattctcacaagagagtcaaggctgacattcgaggacttcaggtttcgttacatggcggggagttttgaccaaactgatcaccgctccgtacgaggaccgaaactcatgggagtaagccttcttcttcattagatcccttggatccatacaacgtgttgttagctctcgagatttcttcccttggttgcgtatcaagacgcttatggttgctacttgacggccttgtttcaatatcgtgtccggcaaacgtattctaggctgaatgcgatgctcgcgccggatggaaatatctatgtcgagaaccacaagacaccagataaatcccccagcttgtgagatttagaccctttgttctctttctcttctcacaaagctacagataccaatgcatacataacaactttgacggatagatatggcgagaatcctcgccaaaaacgcatgacttattatgggtaagccaacattttcccatctgttccgcgcttcacactcttctctcatttctctccgtcattactctcgcccctacgctatgctaggtattcttttgagtcctactgtactattcctccggcttcctcctctcagtcgcacgtgcgcagaccagactcatcaaacaaagcaaagggatggggctcggacgtagacacgaactcagagtggtgcgtagttgtcaagacggctttggcaggtgttagattggtgcttggtggagaggtagattgtgtagagggtccgttcgttaagcctatccatcaggccaacaaggaaacgatgacaaatcggttgattcaatttcgttgcaggtacctacaatgggacactccggaacgcgatcgaactcaagacaaacagattgatccgctcggatcgcgacgaggttttctttgagaaaaaactgttagttctttcttcttccgctcagcttggctcgccttgattaagtctgtcctactttccgtccgtactctgccaacaaacacaagtcttaaacactgggcccaatcattccttctctcgattcccaccattatgattggcttccgaagcgaccggccacctaccatccagtctgttcaaacgttccgaacgatggatatccctcggctcgttagagacaaaccaggtggatggcaacccggagtttgtttgaactttggaaagcaagccttggagttcatccgaggtgttgtaagagatggagaaggagatggtcgagatacagggaagaccgtttggttcgttcttttcgtccacgagctgagaaagtttagtcctcagtgatctcgccgagtaactcacaagcagactctgtttcaaactgttcgtgtctcgctgaacacccaggcggattaaatttgctcctcttaaaggcctggaaatgcgcccgcttgacgcttctgagatacccgagctcgaatctggccgaccgccaattgataattggattcccgcccgatggggattcctaccaggttggatggcaccgaacgcttcacgtgtggacactaatcttgaagccgacgctcaagaggaccaccagccgccgagtccgtgatatgttctcatgtatatgtgcatatgtaaaacagactgaagggccttccttaacgccttggctttgaagagaggcaaaagaaaagaacatagagcatagcaaagcaagcaacatggcagaataacagtaatcatagccttgccttcttcggatgcgagaaagccgtcatcgccgtcgaatcaaagagataaatgggaccattaagccttgacagcagcctgtttgtttgatcatcggatcgttcattccaaatcagaaagataaaaagtggtcagctcaccttcgcttcctccgtaggggtagcgcctgtactcacatcaaaccttcgctgagcctcagcaaagttgcagacgttccagaaagcggctgtttttcaaagttacaaacgaaaacattttgaagagtgagtcaaagatcaaaccggggcaaacgaatagagaattacgtaccaaggtaatcaggcttgacattcttgtactggaggtagaaagcgtgctcccagatctaccaaaagaaattgattcattcgtttgagatcaaggcaagttcagaactcgactccaatcactagatagaattactaacgtcaagaccaatgatgggagtcaaagctacgaagtcgagagacagcgaacgaaatgtgtcagcaactggcttatggtgaccacacgagagaagtcacatactgataaggggatcctggttggcggtggtggcgatctcgaggtgcttggtagcggtgttgtatccctatattccaattcacagttgttaggtatcactatcgctaatgttcaaagtggaaaaaggtcaaacgcacgagccatccccatccctacaagtacatgtccgaaaaactattcgtcagtttacggaaggaaagctgagagtatgtcgaagcaaacgagatactgacagatccctggacaccgagagtagcagtgttgaacttcttcttgaactcctcgaaggatccaaagtccttgtcgatggcagtcttgagcgatccctcggtgagcttggcatcagcagagtcggcaggagccatgttcttccagaagagggagtctacagggtgagatatcccggggttgcatgcgtgttagtgacaagcaacacatatgataagccagaagagggagaatgatcgtacggttgatgtgtcctcctccgttgaacttgagagcgctctgaagagcgatctgggccttgatgtcattggtctgggagaaagcctggatagcggcgttgaggttggtctacgtagcgccgaacagaaggaagatctatgagcaagttgatccggccatgtagacggagatgacctttagattacgtacgacgtaagtctgatggtgcttggagtggtgaaggatcatgatttctgcatgttcatattgaggaacgagagacgattagctatcgtgtcgaaccggaacaacagtctgactaagaatctcacccttagagatgtaaggctccaaggcatcgtaagcgtaaggaagctgaaacggatgacaaagatgcatgggaaacgccgattgatgagcaaatcatatgcgaccacgaggggaaaaaaaggagggatgccgataaaaaaaccaggaagcaaaaacaaaaaacggtgagttcaactccaagattgagataagcacacacagctcaaactttaagcttacgtcgggaagagtgtaaggagccatgatgattgatagatggatatagtaaaaagccggggaagaaggttcaagggtgggttgtggtagtaaaggaaaaagatgagatggagttagctgaaggcgaaataccgtcagggcatggttacaggcacgtccaagccggtaacttccggattgggccgaacgtaaccagcatcggcgcgtcccacctttaatgacgagggcgtgtggttctgtggtgtggaccgtatcggcgtgttgctcggttggtacttggttccagggttcaagggttcaagggttcaagaggattctgggatcattccgttcgaagttcggtatacatcagattgctctcgttaagtatgtatctgccatcccaagaagagatagaacgcgtggtgaaggcatcgctgggtagagagaacgatccaatatcggtaggtacctgcttactcgtctctccttcatttcctggtctctttcttgtagacgaaggatgcacttgcccagacttgctcgctcttcactatcatactacagagctttcctccagagatcgtctctactataggcagttttttagaaaagttcccatacgatgataacttcgtcgtacgtattcctctcttctcttctctttctttctttcgtcttctcaaactgtaaacattcattccacctctcaacgagacattcagattgagagacaagaaggtagaggctacggagttctcacatgtgagtgatatatgctgtgggtttgatgtacatccatccaacatggcgaccaacaatgtgtctcgatctgcttttaggtatggaggatcgatgttggtgtgacgtcgaagcagtgagaaattctgcgttgcctgacggcggtgtgtcaatcggtttggggagcatggacagcttcatagttcgtcctttcatctgtcaacagaaagaagctcttgtcttgcttaatactgtcagctttgctctgcgctacctttcgtataggaacatatccaaaaccatcccacacactcgacagacagagaccagcggcagaaggataaggtccgtagcatacaagttctctctcttgatttcgtccattctggactgacatcccaatgcttgaacagatctctcaataccagccaaactattcgcaaagctccagcatgtttgctaccagacccaatctcaaacggcatgtgtcttccgaagcgggtccttcgacgttagtatctttctctgtcgtctacgtacatttcgagcatgtactgagtcaacagtttctcccctctattatcaaaccgaacggaaaatacaatatagaacactcaacagactcgaatcagaccagagcttttttactcctaacaagaaacggatcaaactcgaagactctcgaattgactcggccacacccatcctcgttgattcatcctcgcccatcctggtagattcatcctcgcccatcctcatagattcgtctaccgaaagttcgcccaggtcgtcatctccaatcctgattttttcgccagtcgatcagaaacctcaatttgagcatgttcagcaagaaagaaggagactgttaggggcagagctggactatctcaaggagatcatcgctcagtgagtagaatctccccttccttccgtcttctccgacagttacgtcgaccatctttttcctaatgcctttcagatttcttatccctaaactgtaccgcttgtcgttatcatcagaacatccatgtcagctcgctcagctattatgggtcgaataaaccatctccttgatagcatgcgaaataatcctgtcacaacacctcccgaacggacaaatgctctcaatacaaaccttcctgaagtccgtagacttttcgggtcaatcacggaacctcctccgggcttcgacacacaattttcactacgtccgtcggctacttattctcagccacacgcctctggatccagctcgtattatgatagattcgggattggaagatatgatgatagtagtgacgaagaaagaacgcagcgggactctcaggagaacagacttgcgagagacgtcaagtacgtcccaccccatccgcaccacatattaaataagctctaatcaactggtcttttccatcatgtacagcatgcgcgagttcttctcggacgcgcttagcgagttctcaagttcgatgacagtcaaagatagcctacacaagctaggactcgaaaatatgacggacaagatgccaggaatgaaagtgtgagtatcgatatgtatgcatgagaacgtagggtcgtttcacaggagaggagtatgcagaggactaacttcactaggtttcacattcaacaggtgtctcatgtgggtaatctctctttccgttgatatgcgatcaaatacgcccgagtgtatagaggtatcgatcctgatgcgcgttgcgctacaaacttcaattggattgaaatgtgatatccaggccccatcaaatcatcggagttgcttggatggtcgatcaggaggctaagcctagttatgccggagggattctagcgtaagtgtgctttttagtctatcaagaatgctcctcatctgaagctctgcttgacacactgctttctcgtttggctattttcttcatccccttaacagagactgttagttcttcttctcaatcccctggaccaatgtgtctatttgttaaagaactgacgcacagagtattcactttagcgatgggactgggaaagactattcagactgttgcgttgatgaccaaaaatatcagcgataatcccagaaagaaaggaaacctgatcattgcgtaagatctgagtttccttcctagtcaattttctaacgctctggcgcttactgagcttttttgttctctcacaacagcccattggctctattggatcagtggaagaccgaaattgagacccggacaaatgcttccttcagtgtgctcatctaccatggcacagcaaagaagatctcaaagaaaggtttgtacctcttcagaaacgaaacaattcttgaaataaagttatcctctgtctgggctgacatcatgttttccagaaataagaaagtacgatgttgtcttgactacatatgggactatcatcaccgagtttcctaagccaaagaaacgccgtgcacgcgttgcctttgacgggtctgatcccggcaacgttgatgatgaggaagagcagacagagcccgctccgaagaaatacggaccattagctaggatcgaatggttcagaatcatcctagacgaggcccagatgatcagaaataaggtacgtttcacatcagcgacacaggttgttcggtttctgggactgacgtctgcaaagatgctttcatttgatgaaatactgtagtcaaccagagcaagcacattaatagctgagctggagggtgattgtgcgttctttccttgccgttatgttgatcaagtgtgatgctctccgaggcgtatactacgcacgctgatggatacatatcctccgaactaatagacagatggtgtttgacgggaaccccagtttgttcagactgtcaaatctttctttttgtgtatcggtttgtgctgacgtgttctaaatccgtcgaatctcgttcagatcaccaatggcgtggatgacttgtacggtctgttccgcttccttcgaacgccaaagtatcacgagtggtccgaatttcgagaccgtatccatagtgtcgcaaaacgaagcccaaatcttgccgctaaaagagcccagataattctccgcgcgacctcgctcagacgaacaaaggacagtcagattgatggtaaagcacttttgacgctaccagaaaaagagattataatagacgaattagtcttttcacctatagagagagagatctatacagctgtggaaactcaggcaagggttcgattcaataagttcttgaaggcagggacggtcatgaaaaattatgtgagtgacgacatgctgagaagtacttgccttgcgatattcataattgtttcgcgtacccgtttgtcgtcggtttctaatcatgccggttgtttctatctggttgatgaatcctaaaagtcccatgtccttagtatgttccctgttctaatgactctttcatgcagcccaagaacttttttctaaagtttgtcaactttcttttcactacagctatgttgctacgactccgacagctgtgtaatcaccctcgtttagtcgttaaagccaaaggagatccattgggatttgatgacttggttcttgaagacggagatggctcaggaattcatacagaggcagtcgacgaggatgagtacaagcgggcagtggctgtggcaggacaagagtcagtacaggtcttatcgtaatctgtgtttggactgtacactgtaattaacaaaaatctggtatggcttgttgaattgttccataaatattgctagatgggttgacgaagctgttctgaaactcaagaatcggatgctcgagtcccaaaaaaaagagtcggagggagatggagagcttggtaacgactacgagtgtcctgtctgtaagtagatccttcggcttgacgcatactaggtcgtcactgtgatctgtctatctgtagtggtaaccttccaatttctttatcaacacaggtatggacatcctgactcaacctctcatcacaagatgttgcttgcaagcgagtcctctttgaaaacgtacaattacgatatcatgtctaagctgacctcatctcacgatttggttctgtcacttctgatcatcagctgtactgcacaggctgtattgagtctctccgcgtagctagtcctcaatacggcgaaaaccctgatgccaactgtgttgaaagaaaatgtcccacttgccgaggagtcttggaccgtgagttctctttgcttgttctgtattattgtgatacaccgagggcgccccactgaaaacaaggccatctatatcattttggtttgaacagaaaatagcctctttagagcttcagtgtatgtctgaatacatctcatatgttgtcgtggagtgacttctaagcttcattttctttgtttgttttccctcaaaccttcagctttgaacctcctacagatgactcgagcgatgtatccatcccagacatcaaagatgaagaagatgatttagatctacagatcggaagtgggagacggattaagcaggataccgaggatgatgacgcttctgtatgtccattggtgtatgattgtgcttctcttaattagctgcattgaggacgaaacctgacgacttcttagttgaaccagatcgacgataagaagagcttgttcaagccgtccatcaaagggaaagagagagcgcaatcgattcctcttcctccatccattgtagacgaagagtaagtttctttatttcttcatctcaatgggcatttagattgttcgatatatgtgctaagcatgtttgggcgtcttttgggagcagtgatgagaacatcgagcctagcatcaagatggagcatatgatgaatctgatcaaacagtggcaggaagcagattctgatgacaaagtacgtgcttcatattcttggcgtagatagcatactgtgtctgatcagttctttgtcgactgtctagatcatcatcttctctcaatatgtcaagtatatcgaactcctccaaattattctcagcagagccggacacaagttcttgctgtgagtctacctttgccttttaacgaagttgatttgatgttggttccaaagtcttgtctttttcaataaggtaccatggcgggatgaatatcaaagatcggtaattctttttctttacatcttgatccatggacaggccaaatttgagttactgatctcagcctattctcttctctacagcgacgccactgtcaaacaatttcaattagatgaagatgcgaagattcttattgtttctctcaaatgcggaggtgttggcttggttagtttgttctcatcgtgtcctagatcctggtgatcttttgatctgattaattttcgttcttcaactattgtagaatttaactcgcgccaaccgtgtcatcaactgcgatttagtacgtacattagattggtctaatttctcggacctgacttgtagaggctgaccaaataatgctatccaggcatggaataccgctaccgagtctcaggttagttttctcttcaatactgcccagaactggtcgcgactatatgagtgctgacgctctgatcaaaaaggcgcttgatcgagtccatcgaatcggtatgtttactctttatgcaatcatacataacccctctcttgtgattgactatatagaaattcttctgggtttttatcaggtcaatcgaaagatgtatctatcaggcgtctagttgtgaaagatacagtcgagcagagttcgtgaaattttattcgcaatttccatctccttcacttctggaaatgcatactttgtagacagccctaactctacttcttatatcctactctttgtcctacctctaaaactacctctatggaataggaattcttgacctccaggcacggaaacaacagatggcagatggcgccttaggcgaagggaccggtcagaagattggtcggatgacggttggtgatttggctgatctatttggggttcccgtcgatcggtgaagctttcaggtgtctttgggagtttgtctctttgcattttcttcttctcttcttttcagtgtagaagcgtccagtttcgctttaattcgtagtcgatgatttttaaatcccctggatcgaaatgttagacaaacgattcttcataccttcttgtatattttcttttgaccatggtttgtagaccagacaacgttagctgtcatctgtaactccctttccttccgcttttcttcacctcttcccatttcccatttcgctcctcaaatcttgatgatccagtagaatacccaacttctttgattctttgcatataataacattcgtcttatactctaaaaagataactcttgaaaaggtcctcaaccacgttctcatgctccatcatctgtcttcttctcaacctcttccttcttttatcgttcacctcttcctgggtctatgctctttctccttctttttacatcctatccaaaggagtcaacgtcaagagtcgcattccggatcccaagacgtccctggcgcagaggaagaggtagagtctggccttggcaacttcggggtctacaccggtcgaactctgaactcgaactggttaagaacacagtggtcaaaaataaataaatagaggaagacaggtcgtttagtgtcggtcaaggaaattcttgatcaattgaagacaaaagaagaaaaaaaggaagagggaaaacgaaccggaatcccaagcggcggagatggcatgcgccaacctgaagatataggtgacgatcgtgctaggctcactaagcttgtaggccaacttgacagtatcggggtaaagagagagcaggtagatgatatcgtgtgctttatcttcagtgaggagatcagtgttgattagggatagatcagagggaaggaccacattcgggttctttcgctcgagagaagcaagtcgaacgtgggcgtattggatatacactctacaaagcaaggatagttgtaagcgagttgatcgagtgaaagatagaacttgaccgaacgtagacgcttacccggtatcaccctcgaaagcagtcatctttttcaagttgaacgtgtaatccaaatgtctaagacaacgttcaataaatcgatcagttcatctgacaactccaattcacaattagggagtgaaggaaagaaaaaagagaaaagctcaccgcttggcagacatgtcctggatcttgacggcactcattcccaaaacgtccgcacacttgaccgggtctacgatctgctcgtacttcgcctggtttcgctgcatctgctccatcatggtgctagcggcctcttcaagaatatcgttcaagaacttgactgttccctttcgggtggacataccaaggactgagagacgagagagattcaatcagcttttatctttcgctcgacattatagaaagacggaacgcagaaacgtctatctccgagacgacgacatacccattccgaagttaatgtgctgcaacgttccgttctgggcccaactgtaacccatgagttccaacactttgaagaactgggcgaggtggagattttgctgggaggcgacgacgtagatcatcttgtcgaatttgtactcttcgtatcgttccttggctgcaccgatatctcgagtgatgtagattgtggttccgtctgcagtttcatggttccaggttttgatgaatcgtcaaaaagcacgagaaatgcgagagaaaggaacaagtgtataggaaggataaaagtgtgtaagaagaacagctagataaggcgagcaagagtaaatgaataaaaaccaacccttctttcggacgacagccgactccaacttgtactttgtcaaatcagcgatcaaagccttgtccttttcaaccacgattcccatttcttggagtctgtcgacggcgtgaaccatgttctcggtcttaacctgagactctccagagtatacgtcaaagtgaatgttcaatcggccgtaagtcgacttgtacttctcgatcgaatagtccctgaatcgagcccaaagagcgagcgcagtctcgtcacctaattcacaagcgaaggattgtaccacgtttagtgccttgctaacaaagtatatctaagctaagaagcaaagtacgaaccatcctccatagccttgaagaaagctcgggcctcatcctccgtggcttcgcttccctcgagcttctcggcttccatatccttgttgatttgaacgtatacctaagaagagcgtcccatcgttgagaagcatgtttcgaaaatgagccacgaagctttgtttagtccttcatctcctctgttcgaaaggacgaataaaaagaaggcctcacgtcgaacaagtgcttgatggcatcatcctgcaaagcctgctcgttaccgtgcttcttaaatccaatagcaagcaaaccaaactgctttccccaatctcctaagctgagagaattgaaaaaagacacaatgcgtaattacccagaatgagaaccatcagtacagttgacaaggtacccacatgaaggaggaggagaagaagaagaagaagaagaagaagaaaaacgcactagttgatcctgaggacttcccatccacaggtctcgtacaagttactcaagaacgcaccgatgatggtcgatcgaagatgaccagcgtggaagggcttcgcgatgttgggcgaggagaactcgactgtgatttgcatccgatcagacaaacacgtcggccttttcgatcttataacaatatctctctgcttcgcgcgcgagaaaatgaaggactgggtgggacataccgacgaccttcttgccctcaccaaagcttggccaagatccatacgagttcttctcaaacgtcgggtcatcaggtgccttgttggggaacgacctgatctggtcgagacaaactcgagcgagcgatgctcggcttttttgtgcgaagaccgatcacgtggcagtggacaagcggtgaatcgagtcagacgtttttcagggcaacgattgcagataggagaggaatgactcacttgatgtagtagctcaaagttccccccttgccgagagtgaccttgctaacatactcgttgggcgcaaactaaccgtattcaaagagattcgagtatgtgaacgagattatgagtccagatagttcttcgctcgagagaatgaaagagagtggagataatgaggagacgcggggaaacgtacagcgtcaacaatcttttgagcccaatcatcaggcttcccaccgagtcggaatcgagcgacagcgacctggaagtcggcagccctcttgtctgttagaattcaatcaatgaagaagaaacggaaagacgcagaggcaaatttcttcaatggctgatggcgagtttatctgtatgaacaggtaggcaggcaggtgaacaaaacgtactaggcacatctacaccgacgtagacctcgtcgggggtcttgccgatgacaggagcgatctgggcagcgatagcgaccctgtgttgaggggtagtttgagagaagggacgaaaagatgaatataagaaagaatcggtcagtatagttgttgagggcagaaggaagagaggattcaaggcaaggaagaaaaaaaaaaggtcgagaaagaaagatcaggcgaaagaaccaagatgagagaaacacagaagaaaaaagacaagacacgttgcacacaactcaagcagtacaaacacagacaaaggacttgcctgaagttgtcgatgatcgatcgttcgggagcgataccctcgacagcagggagctctggaaagttaatcttggggaagggctttggagcctcagaggaagaagaagccatggttgaaaacttgacggctggattgatgggcgaacggtttgagataagaggaagtttaaaagtcctgctagtaagagcacgagatcctctgaggaacggacggaacacgatggacgtgatggttatgagtcgagaggaagagtatgctgtatgagaggtgctcaagagcagagtagaaagcggagtgagaagagaaagaattgagaggaaggtctgttggctggaagagtcattggggatgtttgtagtcgctgtactaggatcgacgacggaaaagtgtagtcttccagcctcggtgggataactacaaatctggactagagaaagcggacagccagactagagaaaggcccgaggaaccggagactacagaacgagactacaaaagttggacgaatgactagcgaaaaagtaggaatctgtttcactacaaaacccaactacaaatgaatgtgaaacatactaggccgtgtgtaatggaaagtcatcgcttacataatcagatccatccgacgaatgggaaagcggccaagtgaaggaaaaaaaaaagacgagggagaaaaatgttttgcttgctctccttcaacttgtggccttccgttctcttctcttctttgtcgtcctatccttcatctcagcatctctctagatccccaacatgagtgacaagttgactcgaatcgccattgtcagtaccgacaagtgcaagcccaaaaagtgcggacgagtttcgttgtctggtttatactcttccttgacctctcacttgtcatagctaaactttttcttgcttcttgaaaacactcttctttgtcttttcttctgtttcgttcctcttctctttccttcgtgtacttggctcaccagatgtcgtcaggttagtctctctggttcttgtatctctttctctttatcgtttcatctcactcaactcattgctttctgatcgtaacaggagtgcaaaaagtgagcttagaaaatatactcgcagtgtccctcttctcctttctgttacccatgtccttatccccttcctcgttctttctcttcctcgtctaggtcatgtcccgttgtcaagatgggtaagctttgtatcgaagtcaagacatccgacaaggtcgcgttcatctcggaagacttgtgcatcggttgtggtatctgtgcccgaaagtacgtcgtcatattttttctttcttcgtgtcaatgttcctacgtcacgacctgtccaatctgatccttttgttacactctctttctgatctcctcgttcttgctcgtttccttcgccactcaattctcacattgaattgtctctcctcgccttctctcccgacctcttctcgaattcataggtgcccgttcgaggcaatcacgatcatcaacttgccgacaaatcttgaatctcaggtgacccaccgatacactgccaactcgttcaaacttcatcgacttcctactccccgaccaggtcaggttctcggtcttgtcggaacaaacggtattggaaagagtaccgctctcaagattcttgccggaaagcttaaacccaacttgggcaagtacgacgtaagttttaatcatcttcccattctcttcctcttctcccaagtttgtcaaaacccaccgtttctcttccttctttgtctgcctcgactaggaccctccggattggacggacatcctgaaatacttccgaggatccgagctgcagaactacttcaccaaggtactagaagataaccttaaggcgctcatcaaaccccaatatgttgaccacatcccccgagccgtcaagggagaccggaaggtggaagacatgctgaacggaaagaaggagttggacaacatgcagtacttgttggacaacttggatcttactcaggtgttagaacgtgatatcaagcagctctctggaggagagcttcagcgattcgccattgccctcaccgccatccagaaagcggacgtgtacatgtttgacgagccgtcgtcgtacttggatgtcaagcaacgtctcaacgccgccagagttatccgttctgtcctcactcccacttcctacgtcatcacggtcgagcacgatttgtccgtgttggactacctttcagattacgtctgtgtgctctacggaaaaccttcggcctatggtgttgttaccatgcctttctccgttcgagaaggtcagtgccttcttctgcctcctttcatacagttgttgaaaacagatactaatttcttcctccctccaaactatataggtatcaacattttcctcgacggaatgattccgacggaaaatcttcggttccgagacgagtcgctcactttcaaaatctcagagaccgcagacgactcgtcgatcgaaaagtctcgaaagttctcatacccggcgatgagcaagacccttggtggtttcaagctcaacgtcgatgccggaaggttcactgattccgagatcatcgtcatgctcggtgagaatggaacaggaaagaccacattggtcaagttattggccggaaaggatatgccggatgacccgtcgcatgagatgaagttgaaggtctctttgaagcctcagatgctctctccgaagttcgagggatccgttcgaatgttactcatcaagcgaatcaaaggagccttccttctacctcaattccagagtgatgtcatcaagccgatgcagctcgatgccatcatcgaccaggacgtcaagacgctctccggaggagagttgcagagggttgcgctctgcttgtgtttgggaaccccggctgatatctacttgatcgacgagccgtctgcctacttggactctgagcagcgtatcatcgcttcccgagtcatcaagcgtttcatccttcacgccaagaagacggcgtttgtggtcgagcacgatttcatcatgtcgacctaccttgccgacagagtcatcgtatacaccggtcagccttccgttgaagcgaccgctggtgagccagagaacttgtacagtggcatgaacaagttcttggccgctcttgaggtcactttcaggcgagatcctaccaacttccgaccgagaatcaacaaggccgactcgctcaaggataaggaacagaagagcaagggccattacttcttccttggagattaagcaataccttgcagtctcccgatctctttttgtccttttcctccttctctctttccgacagctcagcgtgtgtgttcgcgtatgcgcaaggaggacgctgaatggtcgcttcatctatcaaccgtcttccgtcccatcgttctcttctcatgtctcgtgcttggcttctcttttctgttttcgcctgagggatagggtcttgatttcagtcttattccaagggtgccaaatgaaactatggaaacaaccacaggctcaattcttttctttcttcttcggcttgccctgtgtcttgcttctcttgttcatgttcgctctacgttattctactcccctttctcccctcatccatattctaaaaaagacgagatctggtttagattcagatcatgtttcatccttttgccttccctaccccacttttaacttctctcatcacatcacactccattttgtttcaccaaactcgttcgctacttccatcctatacctgtttatttaagccctcatcttatcctcttcctacaaccttttaaatttctcttctcattgtcttctctctgtgctttttttttcttttccttagagatatgtaagaccaaactcaaaaaagatcaagatgaaacacattctcttcgtaaacgagatttaggggaaagtcgttagtgagagtaaggaactaacgcgatccagggaaacatcgcatagaagtttgtattgtcatgaccgccgaatgtcaccctcattgacaccctgcaccatcaccatcatcatcaccaccaccactaccatttattaattaccaacaacgacggctcgctgactccctcctaagtctaaggatggaccatcctccttcttcactactgccaccaccgccgccgccgccgccgccaccatcatcacttcctgccgccaacccccggcgtcgtccgactccgaattttgaaggaggacatcccggcggaccaggaggtgctcaacaatcattctcgtcactattcgtctttctgttgttcttgtatattataaattctggtgggtcggatattgaaggaccgattggcgtcggcgggggcatcacaggaggaggagggggcgacgagttaagtcctggtcgtatgtcccttctattctcttacctcttcactttggtcgttagatgagctcttgatgtgaaaccagctcttgggtttgcatgtgacagaggtcagactgaacagagcacttcataggaatgaaagtttcgcaggttatctatctgggaacagctcttctgggtttgtgattgtatgtgctctttcttctttgctttgggtctcctttgattcttggcatccatgcttgatcatatgttgatgactgatatgagcttgttaccttctaaaccgatgagtagccctcgccagcaccacatgagctatttgagacccttcttccttcatttggatctctcaaatcaacatctaaactctaccctcgtaatataaccgggtacctacatcacgccaccagttggactctgaatatgtctgatccaacgaatattccaccttcaaatacgaatcggtctcggacattcttcgatttgcttgcaggagtgaatgtttcttcaaaagtgttccatccgatcgacacatcgttcatcaaggtcggaaaccaaactgctgtgcggaatgatacggagattggtatcaacaccaccgagtttgcttctttgattgataaaccggtctcggcgggcgacgcggacggagtccataatgtgcttgcacggtcgctcgccaaacgactttcatcgccaggtgcattcgaaaggaatgagaccgatgtggaagcacttctgggtactttcccatggtggggaactaatccagacttttacttttccgaaccggttgtgaccaaaagagaacccacagggattggaaagctgtcatttatgttcaaagaaggttggtggggtagggagagaaacttgaggtcaaagacgataccatcaagtcaaacagaagaatggagcgccatcaaagttcgttcgatgacttctttcttttctttctctgcttgattaaactcaatggatgacgttcctttgatctttacagggctcggtagacttcaatctgaatggagacacacagacatttcaactccaagggatccatcatattcctaacggcacagtctaccttcttggcgctcataacaagtctgtctatccacgttcatcgaaccgagtacttggagtctgacggtctttaccttgttcgtctggctgggtatcgaactatagatctgcgatagatcttcgagcacttcctttcttttttgatccaattgatcaaccaggagcattcaaccaaacagccagatttgtttcgagagcactaaacgaaagtgctgaaatagccaaggctgagtttgagcgcggttcatttggagatgtggacggttcgtttcttctttcatccccctttttaaaagcgattatcccatcttcatcggcagccagcttaccctgattacttggaatgtctccataagactatcttgcttcgtccccatctactacttgtaaccttcaattcgtgctacaacttaaacctctctgtaaatcttcgatgaattcttgccctcactctcagcagattcattggctaactgttgatatctttattgaatctaaaatcatggacgcttctcaattcagccgatgaaattacttccttggatcttgaccgagtcgagcaagaactcttcgagccaaccggacttcctacgaagatgataccaattgagttggttcaggctgcttgggtgagttgggaatgtgcgattggagggttcgttgaaggtggaagaggcatcagggcagaagatttctggaggagtggtacgatctgttcgtattctgttctcttattgttacgtatatattcaagcagattagaacgctgtaccgagttgacggtttagaggtactgaacaaacgtttcccttttgtttctttccccctccaaaactgtatgtacttcacagatgctttcatcagcttcttaattcagctcgggctggtctggctgctagttaagcagatggaacgatcgaggacaccctcagcgctttctaatgtagcgctttggaccattgttgctcaagttatccttgacagttggtcgtgtgtcggtgtatgtcccttcttctctttctttttctttcctttttcctccgatttctttcacttattagaaacctagtgggtctttccgctatgtatgcacatgcaaacagcatgtcctggtgggtatcggtctagacaatcaaacgtccttaccactcatcgcagcaggtcttgtctctggacttggtttctttatgtttggagttgttcgtccttggcttctcgtgcttgtgaacgttcgagtactcactccgtgcctctatgaatttctgtcggaaaacgtgtgatatgtttggtagggatattgcgtgtcaatcagtttatcacaatctcctgaagcacctcgaccgacaccaattccaaatccacctcgacctcctgtacctgtaccagcatctacagccacaactacagctgctcttacttcaaccgacaatactgatgaggtcatgcctggggctttgccgctcccagaatccacagcagaagagacaacgacagcagtgaccacggtgccaactagaccgacagctacaacgcctcctcgacctatagtgatgagaccaatgtataatgagccagctcctaatcgtacgttcctaagtatctaatcagatagttgattcatttgagactgacaaaacacggtcacgtctgttcttttcccaatcagccatcatgtttttcactcttcttatcattcttctacttcaaaccaatctccttcccaacgtctttccgcacattctctttgtgttgtatcttttctggattcctcaaattatccgcaatgtcaagcgaggtactcgatatgcattcggatgggactatctcattggagtctcggttggacgaatgtggttcctaggatatcactggggagaccttttaggggaggataatatcttctttttcgagaaaaatggtccgtccatcttcttttccgtatatgtatatgggaacgcgcaaagacagatctttctcagcaaaccaatcctttttttgggatcgtagatatgttccattacattgcgatttcccagatcatccagatcgcattccttatgggtcaggatgtgtacgtacatcatcttttgattgtagacagattcttcgtgtttacttacttgtcctcgttttcaattcgatcaggtttgggcccacgttcttcttacccgtatgttccgcttcttgcccggttttcccttctaacgttatcaaagccgagaatagaaacttactgtgttctatgcgtatgaaccacccaggcgagctatgcccctcctccgccatacgactatcatcctctgctgccctcagcagcagatatcgagtcgggcttactcgacacggtatcagattgggcaaagacggattgtgcgatctgtatggagcctatcatcggttcggaggatgaaatcagagctgctagatctatggctggtaaatcaacagtctgggcggtcgcaccttgccatcacgtctttgtaagttgtcctcctttccctctatctctctatgcaagataggattttctcatcaattccggtggaccttgttttattatgtgcttttgatcttgtgcagcacacgtcatgtttgcaaacttggatggctataagaacggtctgcccacaatgcagaggaccgcttcctccgttttagtgcagaatcagatcacactaacgttgtatattctacggttttagaaacccaatccaagccaatcaaatcaaatcaaatcaaattaaaccagttcggccatgtttgcttagatcattctatctctccgtctatccttaataaaggaacgctttgccgataaatgaagggcagaattttgttctagtgtacaatctagacacctaatgctaaatctagataacgggctaacaaaaaaaaagagaaagaataagccaaaaacgacaagaagaaacgtctacctctaggctatttttttcccctccatgataagaataattaattcaacgacaacacaacccgagatggaggggaaaataagaacgccgaaagaagaggagtaagaggcaatagcggggaagggctgcgaaatgaagcgagatacagtagtttggattgattcatgctgagagttacactgattggatctcttttctgtcttgttaagatcctgacgcacagcgagagagagcaagtactatatgggaagcaggagaacaaagcatgagagcggaagaaggcaagttgacaagagaagtgaaccggaagggatgagacgaggaccttaacgcatgtctggtgttcctatatctgggtcaggccgtcgctttaaatttgtagaagctaatgtctgttccgtcgcaaatgaatactgagaagattccctgggacgatctctcgaccaagctgaatcaagctcgaataattgtctttgatccattgagccgtggtctaccgtcattcttctctgaccttctctaagcggcggaagttctagtctgaaagtttctcccgaaggatgaaacgattgtccaaaccgaaggtattgattgatggtatttgtcgaagaaggctcattcgacaagcgtggaggaggggtatgttgagactgatgatcgatgtaattcggggagcttgaagatgatgatgttgtgagtggggtggtgaatggatgagcaaaaggagaagatgtcatggaaggaaatgccaatgtgaattttgaatgatacgaggaccctttggagtttgtccgactgtcttcatctgggtatgactcgagacttcctcggtgggttgactgttgactaaacgtctggttcgaccgcatcccgaacgggacttgttcggcgtagttcgagtcacaatccgtgatttcatgatgactttcccaagtgggcttgttgaagctagaccgactggaggcgcctgacccggagaatgaataagaccggtctgccgtcgtcggcgccgttgatagaggttggttatattgataaattggaggttttcctgaaggggaagacgaagcactggcatgggcagaaactggagcggaagcagagttgggccatctctgtgtatgagtcgattgagaactaggtgatggctttcgccgacttgttgaattccccgtagagtttttggaggctgctgactgccgccagcgggatcgttgggttgagcctggaggagccaaggtgagttctccgtatcctggtgcgccaggtagaagacagcttgaagcaaatgttggcctgaaaattgggtagcaagacgccggttgcacaaagaagagaagagagttagaacgaggttgaacggatcaacttgtacgatattaaatctgggtacaagtgaaatacacatacccgaatagggattctagatcgttgcgaatttcgtacgctactcttcgagctagaattaatgtgacctattgtgagccaacacgaacagttgttgtagatacacaacccggacaaggataaagagtaagagctatgttgaaatagtatgagccgactccaaacgttattctccactcgcctcataagggatccacgttccttgaagctatcaacaaaaggagaagagaggcgcagtttgaagaagaagacaacatcatcagcagtgacgaaagagcgagaggtttctcagcccgcagaaagatcacctcaccttcaacagcccacctctcacttttcggatagcggccgccagttctggtcggtcttctactagtttagtcacgtcggctatcaaataagaacggaacgatgccaagaaaatctcgagatcagctcaagatccgagtaagaatctttattgaaatgaacagctatagctaaagcgtcaggaagggattttagaacctttattgtgacccaaacatttccaaatgggcgtccataggacaaggccattttctgtgtcaatcatgatgaacctgaagggtgcgatgtgtgggaaaccagcagaaatagagaccaagggtgatgtagcgttcagctttgttggaaaagaaaaagggaaaagaaagaaagagggtaaggagggcagaaggattgtgaacgaactgttcattgattggatattctaacactggaatgtatcctctgggatcggcggagattgagtatctagcggaagacactctgatcttagagatcccgggctggtatgatgcttccaaagcccggagtcgatcgatctgcatgttgtcaacaaaagcgacgcgcaaatgtataccaatcaagaaatccggcgatacgacacgatcagaggaagattattccaagatttggttgatgtcagtgagagaaatccaaactagatctgcccataggacggatcttgtgccagatattgaaaggaaatgatgaaagagtggaagaataggctgaccgcttcgggagccccgtttcctggttcttgtagacccgggatgtgagccgctatttgaggacgtaactccatcgcagacgactggaaagctggatccatgacgtgtaagatcactgttgagaagatctttttctagcacggagggagcggttgaagatgaccgtttccggaatgacgtgaatagaggagtcggaaggagagagggtgaagggacaaaagtgagagcggacaaagaaccgaaggaaagaagaaaggaagtctagaggactctagagaacgaggctaaggaaggtgaaggtaagaaaaggaagagaaagaaaacggggatactgaacagacaacagggttgaccaaaagtacaagtattcatacaaagcaaagaaggagacgagagcgcaggggggaagacggggagcggattaaaagaaaattcaccggtatggacatcatttcagtcaactgggctcaatcattgaagggacggaagcattataaactcttggggaaggtagtgatttcggctcacccgggaggaaagatggataattctcaattttgatgctcaagggtactctacaggttggtcccagagaaagaagagagaaaagggaagactagatggcggatcgaacagaagtagagagaacaagccagagtgaaaaaagagagaaaaaagggagtgaaaatggaaaagaaaaatctaagaactttggctgaatgagccgtttcaatttggccttctgatttgtttttttctttcgttactccagcggccttctcttcctcctttcttattcctactcttcgatgacgatttatctccgtatgctgtttctgcctatagctctcttttctttttcgaatagtttcaagggaagaaactagaggtaacaaaaacagcccatcgggcgaataaaggaggagcgacaggactgatgcgtgagcaggccgagggggcgggcaggcgggcgatcgctttttcaaggcaatcccggtacgtcacggtgttttagacagaagaccccgatattgccgagccggctccaaactttgaggattcgatcgtttatctttttctcattctttctactctctgctgaatgatcgcaaccaagcagactgagagctaatcgtgaggagaactgagagaagtgaaaagaattgggttccgagcgtagaacaacacctgcccgaaacaatggagggatgatcgagaataaaggtagcaaaaagaagaaggagagaataaaaaatccgtacaaggttttcaaccggctccaactagctcggctaattcgggccgcccactccttagccggaataccgaccgcacgtgtagccttccgttcttattggttcacccttactgtgagcgtagaatcaacaagctagatcagaacaggacggtatcatcgaacagaacgatagataggttaaatctttttcaatcggatacattcaaaatggatgatctcagtcacaacgtcagcttccgaaggcgacccgttcacagataggtagcatatacctgagccgctgataaacacgattggtttgtttattgttcaatcttctactcctttccctttttcgtaggttgtgtacatgtacttgtgaggagcaaagacaacttgcacgatgtatgtatactaacaagaagaagatattgtctttcgattttttttttctgagatcgttcgatctgcggtaatcaggaggagaggaaagaatctgaaaccatgggctgacgacgcctatagtttacacgtagccttgagttctggatcttttggttatacgactgatcgagcgtaaacttagattacgtagtgttctttctctttttttctttctcgtttcttttacggtagctataattgaaaagcgatctcggcgaggtctagacagttttttcgttgtgttttgtttgacagagatcatccttcgttagagctctcaaaggagaaggagaagactgcttcgatcgagatatccatactaagaaccttcttttacttgtcataccttgtacaacctttattaaatccgcaaaaggaccacatatcttgtcttccggcgagctttaccggtttgtgcttccgtcggaaccgtccaacaacgccgtgaccatcggacaaagatattctgcggcctgcgtattctacgatcttgaacttgttatgactttcttcgttatctttgatgaccgtggtccagtcattctggatatgaaaataaattatcccgaaaacaagaagaaagctccggacttatgagtgaaactcagtatagatcgtgatgcaacgttggaccttgactcatgattctaaaatatttcagctcgaagattgaatgtggagagatctagatagacacgtctgaaggaaaaataggtgattcaagattgatgaatgatagggggaaaaaaaacgaaccagaaaacgaaccagtaaacgttaattcggggtttcttcgtgcttgaccaccggatgtttccatggcatggagcagaagcattgtgaataagcaggtgtgataactcgagatagagtcaggttttggatgtctcactagacacccctgacgaagataggacatagtgtcttgggagggaaggaatataaactagcaggagacaacgaggccaggagggcagccattccaggcgagaaaggagaaacggcgctccgatatgattctgcatatagcatgcgatcgtgcgccgatctttgatcggtactatggctgacgacacactcataaggggacattgtagcgaacatcagacggaatagaattgtacatatctcaattatggtaaggatcggtgcaagaacacatgttgatgaagacaccggtagttccgccccgaattaacaccatctctgaggaaccgccacatgaatccagatcgacctatgtgtagagagatagataagagacaatcgtctctgttgggagcgatgcgttcgtgaaattgatacagcgaagaaaaatgcgggagggcatgaaacatctagctgggtgagcgtcgttgaaaatcaagacatacagtgcacctctgtagatgaaacctgatggattcttacaagtaacagaatggcctatctgtatcgtagcacaaacattttttcaattctcaaagcgttcacacggactaactttcgcatgacatcggtcctccctgtggtttgttctagattcgtttgcatgacaaccatgttcgtaaaccttgtctttcacaactattttcaaagactttcatctctcaagctctcagagagtcgcgcaaaaaaacctgcaacaaatcgcctgcttcgctcatcgaacttcaatggtcgtgtttgaaaggcggccagaaggatacctgacatgaaaacaaggagaagatcagcgtccgacaaccgtagaggctcaatccatgatcatgcgatgtttccataattctggctagcttggtaaacaaggtggcggccgaccacagtcagtctgaggtcaggacaactctgggaaggacaaggcttggtacaatcaagccgtgagtcagatgaatgcgcgcataggaagccaatctccatgaaggaaaacaatgaaacggaattaaaatcatttatacaacgcggcggatgctatctggagaacaaattgggaggagtgcgtagagatgtcgcattaattgtcaattagtatattcctgatagatcactccaaagagatatgagagaggaagtcgcctaccggattggcatgcaccgtcacactctcgagcttgatttcttgcagtggccggctttttgggttcacagggacacgctccattccgtctaacgtcgagtctgcaccgtctatcacccggccaaagatcgtgtactttccgtcaagcgaaggttgtttggcatacgtgatgaagaactgcaaaaaatagatagtcgtgaaaacgcaagaccagttcccatcagttcagagcggaggcactacagtctactaggtctgagagtaaggagatcgtccgaacctgcgatttgttggtgtccggaccagagttagccatcgcgaccacacctcttgagttgaactagagtgacgcgtttcggaagtataagtgataagaacaacaagagcaatacagtcagaccatatttaggagcaagagcagaatgacgacacgtatgtatatatacctttaatgtcgaccggacttcatccgcaaagggtcggttccatatcgactgacctcccttccctgtgcccgtcggatctcccgtctggaccatgaaatttttgatgttactgagggacacgtcataacgtacggattagcatcctaatggattgaaaggcgagaaagacgtgctaagacgtgtgacagagtggatgaatataaggtaacacaagatcgacgaaccggtggaagagacaaccgtcatactggcctgccgcacagagtcctaaaaagttctcagccgccttaggaaccgcctcacagaacacctcgatcttgatgtcgccgtgattggtatggagggtgacggacatggtctatagtcgagtgtattgaaagccgatacggttgtggtcgttgtcaaaagtcaaagtaatgactatgtccatcgcaagttttctctattaaatttccaggtttctattatatccctataaatctgtattacagtcctgtagtcttgtcttgcgcgaggaacattaggctttctgtattcaacgtattctaagctgctatgaaaattgatcgctttttctaatgagccggttgatttgtttccatctcgtttccatctcgccttcttcgactttcgtttgcaccctcacgcccacactcacattcagccctcctttttttcactcattgtttctcttctgtataagcatctgaaactgacaagttcttttattctctcttgatatccactatgtttgtttattcttgtttctatctctgtttgtttggcactatcgatcctgtcggctgacccgcctccaccctcctcataacacgcacagggcgcctcctccggacctcaaaacaccatcactcgcagataggcttgccaaactcaacattgctcagtcagcttcatccacaaatgcatcttcttcggctgctcctcgaattccaagcggttcgggctcttctcttcgggacaaaattgcaaaatatgaagtcaagggagcaaatccgcttgttcccaagggctccttcgggctctctgcaggaactggctctactggacttggcggttcccgagaactgattgggaacaggattcccaggtaagtgcctccattagaatgtcagcatgtgtgacaaacaactaaactcaaccacctgatttattcatatgcagtgctggtagaggtggctttggagttacccccaatggagttcagccgtccaagacatcgtatacacccaaaggagtcagcattctgaactcttctagctccagtggccaagaagctctttcaagcggtcgctcatcatcgtccattggtgataattattctcatgtctctcgatcgtcttcaggaacgtcttctcccgtaccagaagcagaatcggttgttcctgcccccctttccagctctaccccttcactcgcagcggtattgaaatctgaacccgagtccgagttggattcgatagttcctcctgccatagaccctcctatgatcactacaaactccttgcctcagtcgtatctcgcctcaacagactcggattacgtctcagagaacggccccggctcgctctctcggtcggcttccatcattgctcagccatcctcgacaacctcactttcttcacttgcttctggtttctcagctgtccatagcgttgcctcgtcgtatatgacggacctgcagggagcgcctcccgacattcagacgcccaagatatcttcaccagtttcatctgcaggtgaactggatgtcaagacgtcgtctcagggaagcatgatcggtgaagaagacgataaaggactcatgctcaatattcgatcgagctctcctgtgggaagcatgatcgtcgacatcacagactcggtcgcgccttccatggtcggtgatgatgaagacatcgataatcgagatgacgcattttccgtgtcaccagtagaacggtcccgcgaacatgctctcttctcagagagtcctgatcaaccgagtactccaaaagcgtccaacacacccgatgtaactctaaacgaattaccagagcttacttctactggctctcccatcagagcgaaagaagttccttcaatctctgttacctcacatcagttaactgctcagccgcctatttctagctcagatcctctaaagtcgatcgttcaggaaattcatttggaaccagaagaggagcctgagattgagaacgctgatgaggtgcctgtgcttgaagctcaagagcatgcgcatgaacgcgaacatgacatctctgaggataaattactggagattagcgcaactgagcaacctgaggagcgggttggccaatgggctgaggaagtttcagaggtagagagagttgagaagcaggatgcgccagtgcccaagatggagatcatgcttgagaatgagactgaagtggaagacaaggaaaccccgaacatcgacaactcgacgacaactttaccatccgcccttgaagacgaaacgctggttgatgagcctagcgctgagcacctagccttgaccgaagagaaagtcaatctctccaagatcgagtctagcgcagagaaagataacctcagctcggagattgtcactctggatctggcgcagtccagttcggaggatacgaaagcgcaagtcttgactgcagaggaggatgaagaggaggaggcggataagacggtagaaactgttgctcgagatgacgtaaagctgagagatgagcctgaagagacagacagtatcgatgctaatgatggtgagtctgaatttacgtttctttctgacaaatcagaaggtggatcctgatatctatccttctggatttatgatcgccattggaggcagatccctcacttctgcccagttctgagaagctcattgatccccaagcctcggagacgaatgaagtcggtgagctttccatggcagtcctctggacgagctatccatgttatataccgaactctgattcatttgtttcgtctggttgtttcatttctctttccggtagactctaatctgaacggtctagggataaaacgcctctcgatcgagtcagggagcaccactcagtcttcatcaccaacggatctttcctctatttctgatttcccccctgtaccaacaaccatctctacttcttctaccattgatttgcctagctaccaaaccccatcgatatcgccagccggctcgaccgttatatctcctacgttttctagccctcaaaccacccagtcctcttcgacgccacttccttctagaccattcgctcgctctcctgtaccttttacgacttccgaacttcaccaacgatctgttagtaactccaatccgcactcgacctcctcctctgcctccacctcacccatgaagatcagaggaagcacatcgcctaaacttgggactgcacggtcgacatctttaaaccttggtaggtcgtacgcctggggatcgacatcatcaatcgccagacatcgatcgaagagcccgtttgagattgacagtgatgatgaagaatcggctggagggcccagagttgtcgcgctcagtcgggagaggtattcgtaatcgtcgtcgttgtatttttcgttcaaatctcttctctttgcgcatcataccatcgtttaatccgttctttttcccatgtttctgcctataggtttcttttcttctaacttcatacacctcatctcattcactgatagcaaccccccattgttcttatttcctcgtttccatcaatcagtcattctcttcattcgtacctagtttttatcgaatctcaacccgtcgttcatgccccgtcccgtatcagttttgcactgtctgctttattgttttcctcgcgattcttttcatgatcaaagcgattttaccgacatctttttcgccattccttgtacaacatatctgactgtaaggggtgtttctgacttacccacctacctatctatccattcacgcgtcttcctctctcttttcccagagaaatccacgtactttttctttttctttacatatccattcttcccgtccctgatttttcgttgtcgtaccgtccttatcagcacgttctctctttcttgtcttctctctctcttggtttgagttttttcttctcatttaatcaagagcaaaagcgaatctcatgatatgaaacgactctgagcatgcaccccatgtaggaagatggaaagataagatggataaaaataggtacacgtgtataaacatcttgtaggtgaaacaagtgaaatgaaacaatgatcaaaaggaaaaggaaggggttaaataaggaaatatacactctagaaagtaccaacaaggataaagatgatggaatccaaacgagagaatgaaagagaaccccgacagacgtgaataaatagagtatgaaggggaaaaggaaaagacttaaagttgaaaagagaagagtacgtcttgctttagatataataaataacaaagagattgaatctccgaataggaagagaaagcaataagctcagaaagaaaatgtccggatagaagaaaccttgataaaagaggagctagatgattgataagagcgagacaagaagagagagaagataacattccagtggactatgtattgcaagacaagaaaaaaggagataggttggacaatagggagaacgaagatgaggcaagatgattgtgaattatgaagatcaagaacagttgtgaatcatgataaaagagaaagatgctgggtggagaaggaaaaggaagagaggaggggaaagtattcactgtgcccaaacaccagattcgatcgttatctcagttccttctgatccttcgagtgtggaggtagacaagctcgtcttcatctgtcccttctgaatctgctcgtatcctaggaattcgacctgatcaaatccctgatcgtcagtgtcggctccggcttcggggcccagaagcaatgacgaatgcgtgaacgagtccaaaccgaatttaaccggcgagtccatcgagtaggaatgagccatccctaccgatgactggtaggatcgaagtggggattcagagttgtacgacggcggaggtggatacacgtgcgaacaagtagacaggatctcgttctggattgggggcgggctgtcgaacaacaagttcggatgctgagagtgatgcgagtgagacgtcaaaggctggcgggctgcgaccagcgaggacgccggcatgtgaccatccaacgtcgagtactctgatgacgaaggcagagcgtatggtaccgtgcctgcgtcagtcgtcaattcgccagagttcaagccgagcccccacgatggctgatagagctgatttgattgatgatggaacgccggtgggtccgagtagaagagtggagggtcgaccggggaaaagggagaatccgaaggtaacgtcgttcctactgatatcgacgacaaagacggacaggtgctctgccgtcgatactcggtctccccttgggacgagaatagggggccaataccgttttgctgctgccagtgctgatgctgttgaccgaaagaggccggcccattgaccaacgatggaggttcaaacagaaacgcggattcatcggtatttccaggcaagattggtagtggataggttgtcgaaagtgcagccggtggggcaacagtagaggcgtgctggtagttatgatggtgatactggtggagggaagactcctggtaggtctgcggttcagaaacgctctgcccctttgcagatactgattctctctttgtgatccagattggttcgttctgtacggaggacgagtgaatagcgctatattcctggagggggccttctgcaaaaaccgcaggttcgaccgtcatctcagggtatccggatcgtttcttgaccccgggatggacggccggactagaccgaccggagctaaagctgaggtggccgccattgtcgagcgtagtcggcgaggaaggtgcatacgggtgatggtggatctttgccgcctgactcgatcgatgcttccaattgccgtccggactcgatggcaaccgaacgctggaccgtcggtgtcctgccgatactatagcgtctccgggcagagacctgaccggccaggagtttggcgtatctcggtgtgatcggtacgggtttgggtttgggttcgggttcgagtttgaattgagttgagtttcggaaagaatcttggagatggaccctcgacggagcgagtcgccttcgggcagagatgatgaccaggctgcgatgttgggctcctgcgcgctccgggatggtcttggaaccggatatgattggtaagagaccggtgggagtggcatgaaaccgacttgtcggttcttcggaagttggtccttgggatttgtcgaagagaccttggacaaatgactaggcgcagagaatgataagccggatgttggtgatgtcatatctgcctcggcactaccagaatgatgaaaagaaaaatcaaatcaacaactggcgacgtgtgagatatgattgtagcactcacacataacgcaatgttccgtctagaccaagttccgtttgaggagcaaatcttaactgttccttcgccagctgtgttgcaggtatgtgtgtgtgtgtgtgtgtgagagagacaaagagaggaagggagaaatggcgagagaataaatgctgttagcaattaaattcattgttgatgaaccaagtgatgttgctgttcacgtcacttaccagatcaggactgagtcctaatgccaagatctccggtacgcttgatggagtcctaaatttctgagccattccatcagagacagaataatacgagatcagatgatgtgtccggccatcaatgttcagggccatagtctatgggaaagaggatagagttggtacatcagtttccgaaaaatcggcagtcaattagcaatagagacaactgataaaagagacggaccttcttgactaaacctccgggtttagcacaatagctgttgcttagactaccaatgagctgtttctcctttgctctggcaagttcgatccctcccaacatgtcggcgtacatcccgacctcttcactttcgccgtccttgtgggcgttgctgctggaggaggatggcctccttgtcttatcggccttggtgatttgagaatatcgactttgaggacgggaggttgggttagcagatgcatgggccgaggacagggattcgttcattgggaaatctactgctgggaaaaggtttgtctttgatgcttcggcagaagttcctttggtacgtgctgaacgtgcttctcggacgtccgtctgtcgatagataagatagtttcctacatacggcaagattatgacggaagatgttagtgccggacggaagatgacgagcgaaacgttatgggaaaagagacctaccagagattcgagatggcgaccagatcagtccgtccgtccagcgtttgataccactctcttgctcctcaaagatctgcatgttggacaggacatccgactgagacaacgaatcgacagaacatgacagaaagtctacagcagacttacgaaaatcgagccactcttgataacggatcgttcgtcctccgccagcctgcgacacaccctagggacgacgcctcttcttgcggcttcgaataagatgagagcatcgagagtcgtctctagaataccggtgaatgtaggttcggtctgaacgttctcgcccgagattgttgacgggggtgacgttttggaacttgtagtcatgaggtgtggatgtgtgttggaagtggatgtgtaggcacgtgcgagtgcgggtgggtgggtgtgtaagtgtgggtgaatgcttcaatagatcgtgaggcgtgtggtgatgggctgccaagacagatggttggagggtgatagtctaatcaattgtatccttgaggatatacagcccgtgctaggataatctatcccggccaaatagaggaaggaaaggaaagggaaagaaaagaaaagaaaaggaggaaaaaaaggaacgtgagttgataaatcaaccgaaaaggaggaacgtggaaagaacgggaaaggaatgacgacggagatgggcaaccgaattcttaacgattcttaacgaaagaaagaaaagaaagaaaagaaaccgaacgaacgaaggaccgtccgaggaagagagaacgaggggaacaagagagagaacgaggaaagagctttgaattttaagcggcgatcgcggtagtaggctgaccggaacggaaaccctgatcggctgcattggacatatgccggtgggtggggtgtaggtggggaaccgagtgtgttggaccgataggtgagtaggtgagtggggagaaggggatgggagaacagggccagggccagggcaacggcaagggcaagggggagaggaaggatttggaacaggggaaggacgagaaaacacaaaacaaatgacagtcgcaagaaggcggagaatttagttagtaagcgctgagggagagccttaggcaagacacacacagagactgaaacgatacgacagttggccgcgccggccaagaacgacattatgccgctcggtcggtcgacgagagagtcttttagatcacagaacattcgtcggcacgattcggcagggagaagtagaacctggtggtccgatctgtgcgaaccgagtcaggtatgtttcccatgcaccacactcatactgacgaagactcgagaacttgacgggcgctcgatctggccggactactgtccttccccttgatgatgtgcaatcaaccagcgaggcatgctcgacagacaggcactcgtgcacgaacgcacccatagacacgcagagcgagagatcgggccgggatcaaggaaaacgggggaattgaatgcaatgaagaaaacgaatgatgatggataatgatagaagaggtacacaggcgtaacgccacagaggagttgatatatttcggaggccgacgtcgtataagctatcgtcgtcatttaccttcccgcgccacatatcgagagacaggcaggcaggcaggcaagaatcatttgagagttatccacccctttctttcatccgagtcgggaagtatcaggaatattctcaaacagaaccagtcgagctccaaactttatttcacgatctttgagcccatcagtcataaccctagcccagaaaaatatttgatccagccccacacacccatgcatatccacgcccatgtttatgcccttatttgagacacaaaaacgctcgctgtttgtgcgtgaccatatcggcctcatccttcatatatggacgcaacagccaatggcagcagacaaacccaaacaagatagaaaacaaaaaaacagaccgaaccgaagccaaattactcacacaaagagaacgtgtagaactctggagatggagtcgaatatcgatctctgggagaaatggcttcgtatatgtgtgtgaagatgggagaccgaacaggaggcgggaaacaaaaagataggacaggtgaacagagaaagagaagaagcgaatggacaaagaaagggagggaacagaaaagaggattagataaaacggaaagaaagaagtcgcttccgaagatttactctgtatatatcttaaagaaacccgcacgctctttcccggttgagatctgcatacaagaaaaacccggggaccgatggatcctcttcccggaaagggaacggacccactattcatgaccatccttccttctggtcccttggctcctcaaatgtgtcttctttttggtggcgctcgtctcatcttgcaggaagctgtgggctgaataaatgtcccaatctttcacttgctttcatttcttcctgtttcttcgattccaattgccttacagagatagaaaaagcagatcacgttgggcagtctgttcagtcttgttccgttgtttccaaacgcaagaaatatgactgtgtgacaagtcatgagacatcgattgtagcatcattccctccccttttgatccctatgacagatatctcagacaacagatctccttcttcttgagctatcatagacatctcgcacggacgcacggatctcttcatgaaagaataaaccaaacgctcgccctgtctctatcgacttgcctcctgattcatccagttgcttaagtttactcgagttattctcgaacagaaatcgatagagtaaccggcttttatttcccgcttctacctgcccttccgtcaattggagcgggagagatgaacgaacggagaaaacaaaatggaagaagggagatgattaaaaaaaaaaccccatatggcaataaagattgcatgaaaagataacacatgctgatctctcgatcggatcgtaaagcagctcgtttggaagaggaattccctcgcatacctcgcatccatccatggttcatgatcactctcacatgtacaagcgggtcattatccaattcttcttcctttctagaacttggaccacaccaaaaagtccatgcgagttttcaccgatagagaatgattctgaacctataattccagtgttgaagccaaacaaactcaaccgctccagccagaagagatagaaaatggtggcggaaataggaaacttgtgcttgaggttttatctttatttttcataccaaaaaaagaaaaagagaaaaaggacagacagacgccagtgaaaccagaatataatagaggaacgagaagatagaacagaagagaggttactcatctgccatgtgttgactctagtttctagtcttcctgatcaatggtcggcgagcgagattgcgcaagattatgttttcaggtcactcccagaccagtaccgatgggagaaggaaggtcacaacatagagtaaaactaaactgaacctcaacgaagcaataaagagaaagaaaaataagtccaagttcttcttgttgaagttgtcaagaaggaaagaaagaacaaacacggagtttctcgtacagcaaacgttaaagtttctcatactctaatttcaaacggaatacattcctacatgcgatccttccacctgttcactttctgaccactcctatacacgcacaaattgttcaagatactcgccaagatcattcaagttcagcctcttttctgttgcttcttttcctcggaaattgtatcagatcgacattgagagaaaccttgttttgaacgacccagctgtaacaagactctacttcctttcatacttgttcatcctttcattcttgttcatcctttcatttattaatacttgcagagtatttactctttatttgcactcaatcgtttctctttcctttgatttcggtgttctcatatgcacgctatcaaaagtcagggcagggtgatcaaacggaaacgcattagcgttgatcggtcagttgaatgagagaatctcgttctactcggttgactaacttttttttccctttcattttattatctcttctgtctctattttcgtgttttgtttacgcctcatctcggcttttcttctcattgtatctatcttttctgggataagaacgtgagtaatgaccggtaagcgatgcccttaccgattcacgatttgagtacagctgactttaacaaacggttgaccctcgtctatcatccaggtggcttggtttgcaatctaagcgtgtaagcgcccgagcgcgcatgcggctgccactacgaacacacttgacagatagagatcggactgatccgataggacaagaggagaaattagccgacggttataagacagatctagactgaccgaccgaccaatcaatcatactgctcgcagagtgaaggtcaaaaatagcgacagagacagatttgaactcggtcttggaacagtcggccgaccggacgcccagacatgaaagatcagagagagagagggggagcgaattaatgaatagatgaagaagttgatgaatgaacaaatgactgaatggaagaactgtaaatgtgaacgccccaaccatcaagtgccaatctatcctcatcctacccacccatttggacggatctggaagggagtagacgaaagagaaaagtaaagagaaagaagaatcacatcgatagaattctactgtttgatctacattgccatgtctcatctcccagaaacctcactcaaggaagccgctcagaagagtcctagaaggtcatccgttcctgcttgcgtactcgtcgacggcggtggctgggaagccgaagagctagacgcgaacgaggtttgctgaggttgtgattgcggttgatgttgttggggttgggtcgattcgttcaagggctgaccaaacccggagagggagttcgaaatagtgttcggaaactgagacccatgggtattcgtcgatgtcggcggaagagaagtctgactgaagagatccaacatgtcatccaaagcgttcctcacaggagcagcagccatgccggtagggttcgggttgatgatcgtagtagagcttgatgggaaatccggagcgatcgaagatgggatcgggtcatcatcaaagtcaaggctgttttatcgtgaaagcagaggaagagtaagaacaaccgatcattaattaaggagataaacctgagaaaagacgacaagacgaggcgcacaggttctcagatttttggccttgttcaacgacatggagtgctttctcacgcgtcgtcgaaagatcctcttcttgtcttttccactcagaaaaagaaagtcaacaatcggtgttcatgatcaacagacgagatcacagagtagaacttactcagtctctcgctttcgcatagcgtcgattcccatccgtcccttaccgacgaacgtctgaacggcacgaaaacaagaacaaacatattaactcggaactcggtttgaagtccatagagtaggaaagatgaagaaaaaggaagaaaaagcgaacctcggccggtttatggtatacactcgctaacgtagaaatttcttccaacagtccttctaggatcgccggtgggacggtcgtctgtggaagtgatatcggtggtcggtcggccagaacgacgctctatttggtcgggtaaacaaaagatgaagtcaaacacacaaatacaaatcattttagaaacctctgagaaatgagaagagcaaagacaaaaacatcatgtacaaagaaaacgaaagaaaaccccaccttagcagcagcaggatcagttgagagcaacctccaatagatgtatgcccgatcacgaacgtccgggctatcacagtctttcgtagctgtctgtaggactttctgaacgattgcctgtgattcgtctggctttttaaggaacagcttgacgattgccgtcaacgtctggagttggacctggtaagattcctctttgaaagtctttaagaaaatccctaggaggtcatctgcgttctcgatcttttcggcgtattctccaataatccagataagcgacgctttggcttccggttcatccagttcgtccaatgcagcacacaaggtggggatgatgccttcgtacgaacgagggtactttcgaaagatatcctgttgaggtagagaaaatgagacaacacagacatactgttaaggataggcccgatatgcaggttgcggaagaagaagagaggaaaactcccttgccttcatcacgacgatggcctcttggacgacgtagctgactctggtggcaatcaactcgagcaacacattcacacatctgtccgtcgcctcagggatcttaatcgcagtttgaccgatcgccttgatagactttcggacaaagtcgacgtcgacctctgatgcatactctttgagttcgctcaacaacgtgtctacgttcttttcccctgctaatcggaccataatctcgagtttctctaccttgacatagggcggatcgttatatttgcaaaagaacacacgcatctcgttctgcaagatatcaggccgtttctgaaggagaaggttgatgttccggagcgcaacccattgaatttccggcgcggaggacactagggtgactgtggtataagaaagagaaactgattagatccatcacaaagagaaaccgataaatgaggcaacgggtgtacctaacgggggagccatctttcgcacaagctgttttatcagatcctcccgctctacattcttcatgtgaatcatgacaacctacaaagtgagccaggaagacagggcgagcagagataacacgaatttgaatgagcattgggacaaaaaaaagaggaggaagacaatagatggaaccaacccggacagcactaaggaggacggaaccgttggcgtgttggaattgaggcatgactcgttcgcaaatgtgctcgctctcttccacgtcagcggccttgtatctggcaagggcggagaggatggcgattctgccccattcagagcattcattcagtgcgacgagcaacttgttgagtacatgagcgtcgatgataaagattccttcggacgtttgctcagccgaggtaggtgaacctggcggggaagccgacgacgcggaggcttggttggagagcgcgatgtcgtggatatcagtcagtgcagcaacggcattagcgacaacctggattgaaaaggaacgatgaacggtaggtttaggttgatatgtcgttgtgacgcagaaaggttggaacagttagaatgattcgaacgaagcgaagaacaagaaacgaggctacaaagatttcaccatagggttgctatctccgaccatgtctttgagctgctcgacaaaaccgttatcgaccgccagttctggttttaggtcgtacaacttggcaactgcaagagcggccgtctttctaacgtatgggtcgtcatcccggaggcacttttgcaacggatccgagaggtaatcgatgattttctccgctcggaggcagcccatagtacgtatggcaagtgcgcggacaagagggttaggatccgcagtgtcctagaagaagaagaagaagaagaagaagaagaacatatggaaaccgtatgagttctgatgaaccggcgatgaagaggaaagagtaactgaaaagagcccagatggaaacacactttgacaaacgtattgacggcgagaataacaagttcaggctgagtgctagcataattcatcaggtataggtaaacgagctgtaggtgtgggtgtggatgtagggaaagggtcaggaataagctatgagggtcgatcgaatctatcggtcgtgaagatacgcgtctgaaaatgaagacgaacctttttttgttccaagtcatccgtttgcttgattgggatgaaaagcgagaggtctattggtcaggaaaggatgcggagagataaagagagagaaaagggggaggaaggaaagagcacaccatgttctgtacgacaggcccattcaacaaaacgaaatagatatcagcacgagcgagaagcgggatcaaccgctgaacacaaacgaaacagaccttgaggacgtcagggaataacccagaaacgtctttgccgacagtcatgttggcaatgacccgcttgatggcatcggcccgtttgtccttgtactctgagttgaggtcggaccgtagttcatagttttcgcctgtttggttcgtatgtttgtggggtggataacgtaagaggtcgaatgacaggaagctgaccaaagatgtatgaggcaagaagaagaaggagaaaaggacttcagctctctatgcttacctttcttgggtacgaccattggatgagcgatggacagagtgcgtgtgtgagtgtgtgtggacgaggagagaatgtacaagacagagacaacaatgtacagagagatgggaaagagtgagggcgagtatgtgggttgatgggtgatgttacatatcacgtgatgtatgatctatcgccaggaatgtaccttgtccgcaacgaagcctgagttacacttgattggtaagccgtaacccataaacctctcatactaccagcgcatcgtactacaacgttcatagggtctgagaaccatgtataagacggacgttctcggccacttggtagatgaaatttcaagtttaaatccttttttactgctcattctctacttgctctcttgtcctcgtccttagtgatcctatcaatcctgttttccggttccaagagcctgaacttctttcctgaaacgtaagagcctttgtgtagttactacttcataattcccctgttatcagttcagcccccttccctaacatctactcgtagcacagcttctatgaagatacacgatcaggtaacacatgcacgcactttgtagccacttcttatgacctattatccatcatgctttctcattccatcatgctccttctcttcatcctatgtgcttgataatcttcaggttgataatcctgttgtctagtaatggagtgccaaccagcttgctgtttcttcctgggtggaacgacacaaagggaacgcttgcgcgctcctctagatatggttctccaagctaagatcctcagtagatcacctcctatccgtcatccctgccattccatttcatttagccttgttccctaagatctggaagccgaaatgctcgcgcctagacttctctcggaaattctcatagctccttatagcctccgtagcatgggccattatagctctattcagaacggcacgtggacgcgttactcgcctgtcttgttcggcctagtctctgctcgggacaaaatcacgaccgaactcaaacgcggtccgaagtctaattatcatttttatttgattatcataaattatatgatataaggtttgtcctccgggggggtcttagatgttaatacttgaatgatctacacgtatgtgtgaggtatttgaaattatccgattgataatcctacttaacacaaccttatgtaacactcacaactctatatgacctcttagccctacgcctccgatatttcttgtgctccttctctctgatatcttcttgctcacatcgaatctctcactctctctcatcctcgatctatttcagccctgtagttatcatcgtcgttgtcgtcgtcgtctgacttcttcttgttttcttctaggtttctttctttcttccttccttcttgttcaccatcgcatagtcttgcccaacatggtccttagcagaaagaacatcaggctggcctcaattctctctatcgttttcatagcctactactttctctcacagccgaacggtccttccttctctcaatcgttcccctcgaccctccctgatccagtccaatcaggctcgaaaccagaaccaccaaccgtggtcaagttttcgagtggtccacctcgccagccgttcccagcaaagcacggccatcaccgaatacccatccctccgccgcccacagagtccctcacgtcaacgttccgtccgacctggcagcttggcaacattgagggctacaacgtcttcgagaacctctacctgtacggtggtcagctcgtagcagctaccgaattggatgctgagccgatcgacgatgatagagtcgctacttctcaagagggcaaacctaaaacatttgtccatgccaaggacggtcatacttggtggaaaaagacggtggctgctatgagtgattcggccattcacccggcggaggctagggtacttgaaggtgtcgctgtgcgtaatcctctcggcagctttctctcttccttccttcgttctctcttctgatctatccacttgatctcttgacatctttcacccttatcgctctcactatctatcaggtcatctatcacgacgatgcagggccagccggtcttatggttcattacgtgtgagcatgtttttttttttttttt

SEQ ID NO: 857 - DNA, 19167 bp, Xanthophyllomyces dendrorhous
tttttttttttttttcacttcacgttctttcttttacgttcaaatcgtcatctcaccatggatctgcgtgtttctctaataggcactttgcaccagaggtttacattcctagtctccgagcactttccctcgcgggcatcaaagatgtgccatccagattgatcttccctcattgcgaagtatcaccaaatgaggaatcttggaaggatggctctggattaagtatgtttctatgccttcctaactttcgttctgtcccgcttgcatcaggacttgactgtgcctgcctttctgcctattctgtcctttcctctcttctcccattccttcctagattcatggctcgtcaacgtcaccttgcccggagcacaactcattcattctccagactgggaagcttaccaagaatccggagacatcatcatgtttgacaaggtcgttgttgtcgatcgatgtgcgtctccttttctacttgctttcttactcttactctttctctttcccctttcttcctcttctttcaatgggctcatacccactcattcatccacgcaggggccgcacacaaagcgatcgaaacccaccattggagcaaaatgatgtccaagatggccactcttccgctcgacactcacaaggccgctggtccgctcacctggttcgaaccataccggaccactgcactagacatgttgggcgccgaggtcgaaatcacaaacgagcgcccagtcgtagtttatctcaccagagagagctctgtgcgttgttctatttcatctgtctccttggcctttctttccttccgcactaaagccaattctcttcgtcatcgccctcctcttcttttcctcatccggtacctctcggggcaactctagcacctggctccctcgctttctcgagatgcctaccaagaccttgtcaagtctctccgtcgccttgctaatcatgctgagtacgtcttcctttggttcttcactatcccacgaactctgccctcctgtgctgtcgcttactatttttttatcgatatttaaacagagttcatcttaccatcgtaggaaacgtcgaaaaagaagatctgatacccttgcttgctaaaaccaacgttagtcgaaattattagctcgtctcatctgttgctcctcattcctttgaagagaagcggccgaccgtctgattttggatacacttgcccattctcgaaaataggtgttgatctcgcataagggtgatgatctgatgactacatcgttctggctcccaccaggagctactgtcatcgagatcttcgacgagaatagctttgtccgtacgtatcatgtctatctccatctgtctcttcttcgatttgacctggcgcgctgatcaatacgactttttttttcttcttcttttttcaaatgtcccccaccttccttttcctttctcccatttcttctttttgtgctcgatgatcatggctggacgagtacaggtgtgaacgagatgatgtcgggcctcctcggattcaaacacgtcatcgttcggaacgatcaggtctacgagaaaagcaactggttggtcgatggtcagacccagagtgaagactgggattcaaccgaattgccgttgaagggatccgtcgtggaaagggtggtgagagacgccttggagctttctcctgcctgagagctcggatctagcctatcttgttcattcttctttttcctcgaatttttcttgtcactcttttctctctattctatatttcttgggttcttcttcgtttcatcattatcgctcttcaaatcgaactttcaaggtcggcggaaaagcttagtgtctggtcataaattcttttctgaaaatatctcttttggacccctccactggtagatatcatctcttccatctcgaggacacatctcttctagacccgacgcgtttagttcacgtctatactcaatcctaacatcttcatctactctcttctttctttcttctcttctttctcgtactgactatatctagctagatctgtgttcccttgctcattatcaacatatcgcgtcactagaattgtccaccaatgaatgggttgcctagtgtttgtccgaggacgtaaactctttctttttcctttcccctcccctttctttcttcttttatttacatatctctttgtatatcgatccttcccctttctattctttttgaggtgttgtctccgggatgaccatggatgtggttagaattagtttttcttgcgttccctccgttgcctggtccactctctgttttctctaggcaagttgaacggcgtgacgactcacaaacagacaaaagctatgtatcgcgactgttcatttgttcatcatttttatatcatcacccagacattgcccttcgccctccggcataattccttcttttccttctctcctctctctctctctgtggtctgtcccgaatgggtgaaaaacccttgaccgagaagaaagaaggagaaggaagaattgataagaagtcgtcctcaggtttatttcctgaccgggcttttgaatctcgatctcgaaggagacctagaccttgaaggagaccgcgatcgggacattgacctggatccggatctggacctagacctggactttgatcgcgatcgggacatggatcgagaaccaatggatgaacgcgagcgcgaacgagagcgagaatgaatcctagacctggacctggatcttgatcgactaggcgagcgggacctcgacctggagagcgaacgggagcgggagcgagatcttgatctagagaacgaacgggaatatgatcggtttcgtggtcgagcaagagatctggatctggagcgggatctggatctggacctcgaagagctgaacgatcgggagcgagatcgtctgatggcattaccaagtaggtcgatgaagagacatggtcggaaaacacggagagcacaacaaatgtttagtcttatgatctaacggcgcatccatagaggtgcgctctacagaaaggaaactcaggtaagaagaaacgaaccgtctggctcccaacactggacttcgactcctccttcttccgccccgctcgtaactcggactccttctcccgcctctatatcccggtcgagctcgtcctcctcgttcgtagcttggactccttctccttgcggttccgcctgctcctctgacaggacttcggtccctcaatcctcctgcacctccccatctcccacctctagcacctcgagctcctctgatggaacctcggaaaccatccctgtttctctggtatggtgatcgagatcgcgatctcgaccgagttcgggagtctgatctccttggctttcgaacaggcgaaggcgaaggcgaaggtgagggctccgccggagggagagggaatgcagaaatctccaccgagaggatctgtccgtcgagcaaggcctggtgcatgtgggacacagccatcagagcagagcttgagaggctatattcaatcgcagctttcgatctgttgagtccagcttgaggcaaaggagaaccgaggtgatgtttggttgagtatacgcaccgtcaaaagaaagcatatgcgacaaaagaaggagagaatacaaagatgtaggacgtacttgctcgatagagtggaagatcaatcctggagatgcttccatactgcccgaagatctcttctagatgaccttttttgacgtcttaaggccgggaatgaaacgatacagcagaaaaagccacggtcaacgatctgacgtgtatatgttcccagaggacactgcaacggtccgacttactggttgtgaggtgttggatgacgactacgttaggctcagttgaagctactggcctagaaggcgaggcagtaagacgtttaggagacgtcgatcgtccacgagacatctcttgatccatagctgtacgtataaggacggtaaccgacggatgggaagagtgttgaacgagctgatggtcaaacgagttgatggtcaagggaaacaagatgaaaaaaagaaagaattaaaaatcgaacgaatttcattacaagtcacaccgtccagtccaatcccatctctcccatcgtcatccttgttgtgagccaacattgtgcacgtctgtctgtcaaagaggcaacccatctggtgctactggctattgaacagataggaacaataggaaggactcgtctgtggaacaaacatgcctcttcctcctccgcttgtcccaacaaggacgcctactccaaccgctcggtcagccttatcgtcaactccttcaagtacatctcgcacggtcgaggcctcgttattcgactcgcctcccacccgcaaaacagatcattctccttcaacctcgattgcatctccagcatcttctgatttcggcgcgtttgtctcttctgacccattgcattcgtcccgtttggataatcagaaacaacattccatggatccttgggatctagcagctgccgggagcgacttcttagaccaagctcggcagagagatgcacagagaagagaaagcctgctcggcgttctggacgtaggaaaagatggcctggacgggctaagtcttattgataatgacaagacccatgtttcggagcaaggcaagaaagccggaggaggatatatgagaaggaatagcagcagctttgttggtggtggtggaggagctgggaaactgtgtgttccacctgttttcttcatctgatgagagatctttctcgtatggttggttcccttcgtgtggccatcatcaccactgaccacagactccttctttctcttgtttgtcttatcttgtctattgcgcttccttctactgctggacattggcaagtgctatgagtccaccacgtcgtctatcccacgtgatgtcagtctcccctccgaagccgattgattatacccactcgatagcgtctcgacaagccgacgagcccactccactcgtttcaccatcgaacgcagatctctatcatccatctctccaaagaagggcgaattcggaagactttttttctcctttggtccgacagcaaagtcttgatgcctctaggtcaggtcatacgttctcggatgccgctgcacggcccttacctggcaaggagaagctccgaaagatgagcgaacggttcccgtcgaacaagtcatcaagtctacctgcggatacctcaccttcggtacgaaattcgtcaaacgcaagccaaccaatatctttgttgcccaatcttataaaacagacgtccaaatggaaatcgatgctctcttcgcctacgtctcactcaggaacaccccatcaatcgtcgatctcttcatccatagctgcaaatgtaccgtcctaccagtccgctcatatcactcactccaatccgttctacacaaacccatcatcagtttacgttcctccctctggcgcacccgggttcgttccgcatacaaatttgcttcctcaaggaggcttcccaagcgctgcccagggagggctgggtgaggctcgaggggtccagctaaccgggcgtcgacaagaaactgtcgggatcttgactgaggaaggcgcggagtgtctccggccgcatcttcctccgagattgaggctcgcaggtagctggtcgcttctgtattcattggatcaacatggaagctcgctcggcacactctacggaaactgtggaaagttcgaggatgagagaagacggaaagacggaagcggagccgccgtgggaaacgtcctcttgatgaggtccactcgaggagagatctttggcgggtatgtaggagaggcaatcaagaagaatgtagggtacttcggaggcggagattggtgggttgttcggttcttttaacgttcctagtagcaacagaaatgcgctttatcggtcaacttctgtaagactgacgatgacacctgtgtgaaatctgcttgatagctttctcttcaagttccatccgttcccaaacaccgttccgggtaaggagtctcatctgggcggtctcgagatcttcaagtggacgggcaaaaatcagtacatgtgtctttgcgagtcgacattcatgtccttgggtggcgggtacgtttccatactttatatctctttactccaaagctgtgatctgagagttgatagaacttgatctgttgccaactcccatgttaacgctcccactgtgttctcaatctttttgcgatatgcacgtcttgccattctcggtaaccttgtaatcacagagacggcaaatatggactatatctggactcgcagatgtacgatgggatctcgcaaacgtgtcctgcatttgataacgaggtactctgttcaggaccggatggcaagttcgagtgtgttggagtggaggtctggggtgtaggagattgaacgatttttttctcttccttgcatcgtctcggctttccttctgagttgtcttcgtctctgtctttcctccctctactgtgcgcatttcttcgcctttgaaaggcctcttgaaatgtgatccgatgtgacatttggctttcaccaaaccgtcgggaactagaccagattagtaacctaagttgtgtctttatcaggtcgtcatggttactgttcgctcatcttcctactcacgccataatctcaataaatgtcatccatctaaccatcatccacgtaccggaaagaagacacaagatgtttcctattcaatccatctttttcctcttcatctttctcttccagcttcctccacctccacacgcaccaggagagtttttcccggaaggaaatgtcttagtccttacctctcatccggacgatgaggtcatgtttttctcgaccgcattgtacaggttacacgaatacagtcgggacgtagtcggcgcttgtatgagcactggtatgccgtctttgtttaccgcttcaacttctttgccagaaacatggctacttgtctttttatcgtccaatttctctctttggggaaaccggaagggaaataactggctaatccttccttaacggggttgatgtaggtaacgcagaaggattgggagagacgagaaagctcgagctagagaagtcttacaatgtatatggatacaaggatgttgtctcattcgatcatccgtgagtccgtgtttcgtttgctcattacttgaacagaggaaatatatgaacaatcattgaatcggcctctcttcctgctcgctctttcttcttgttcggctcgatccttgacaattgctcattctatcgcagagaactacaggatggattgaacacaacatggtcaacagatgtgatcgtctcgctcatccagccgatcatcaacgagaaggaaatcagtgttgtccgtttattccttgtctgatttgttctttctctgtatcatgtcttgagagaagatcacgtgaattgcttacgtcaagcatcatatgcgcaatctcccttgatccacagatcatcacgtttgactcgaacggtgtttcccagcaccctaaccataaatccctttcggatgcctcgctccttctctctgctccttctggctcaaatctatcagtctaccacctatcgaccttgcctatcgccgtgaaatacttttcgttcctcccttccctctcgctcgctcttcctaatcggctcattcactttttcaaggtcctcactcaagcgatccccgagggagaggacgtttaccgacccgttccaggacagaaaccgatggaaagagtcgatgtcgccgtatcgaaggatggcttcttcaaaggtgtcgaggcgatgagggagcatagttctcagatggtttggttcagatggctttatctggcgggtagtaggtacatgtgggagggatcgtaccacctggtttctagcgatgcttagagcaaagggttgttgcaaaagtctctacaaactcgagagagttttgtaaatagagaagaaacgaggaaagagttgaatagcaaagttcacttaaagtcttcatttgttctaatagacgaatgaacagacgtaattgacttaataataagaaacttaagatcacaaaacttcagaagagaccgtgaaagcagacgaagaacaacaagacaggaagacaaaggccagggatgaaataacacagaggcatacacaagtgaagaccaccagtagctcgtggaaaaaaaaaagaagaggaagaaagataaactaagataggaagatttcctgattaggaatgaatacaagtaatttatattgagaaacaatatgcccgaaagaggagtgcccgaaagagaaaagcctagaaaaaagcccaaaaaggagaggaatggaattgaaaaaattggtgacggttcatgagctagccatggcatctgttactcatcgatatacaaagatatgaactcgaatttagtacgatctacaagggacaaaccgacagggaaatcaggcaaacattgagaaaagaccgaccttcaacatgtgtccagagttgtcgaagcgcgataggcttgaccaagaaacctgaaacccaaatcagattcagttaaacgcaggtgtatgtatggatcatactgagaaatcagctcggaagccaaagactacttgagagaaaggagaatatatgtacgaaccttgcatccccgcttccgaagcttttcgtttactctccagtgatgacgagccagtgagagcatatatctgtacagggttaactatcgggcccgatgggttttccttcgactggagttgtcttctggtttcttccgttttacggatctctgataaaatgaaggaaattggtacacaggaagaggggaacgcatcagaattggagcgtgcttcgtcatcatcgatcgaaaactgtggggaaaccatgatcagaataggaacgaagaagactcaccagaagcagacgcatagccgtccatcacaggcatttgtaaatccatgatgacgaagaagattgatcccggaggttgagatttgaaaatctctgcaccttcttttccgtcggctgcctcaaggtatttgacaccttttctactcagaaagacccgtaggacacttcggttgacgctgttcagcataaaggaaaagaagaaaaaaaaaatgttcagtcgtaaacataagataagacaaagttggaagagagtgcgcgctcacatattgtcttcaacgatcaaaacacacttatcgaccctgagtgtttgcggagggatctcagctaaggagtcgaggctcttcgatgatattgatgtttcgttgaatatcttggttatagctcggtacagttttctaaggaggatcacccaaatgtcaatatcgacacgaccaaaggagacaaaatgaggagagagatgtaagaaacgatcgcaatctgaagtcaattcaaaatatgagacctaccttggtccgcagggtttttccagaatctggtgtcgctcgctttctctaagcctattggagtccagccaattactagaaaattgaaggaccctgtaaaacctcaataagttgtccacctgctgtctagagaccgagtcatccaagagcaacacatctgatccacgctccgtcttgttgatcttgaatttccattctttgaggagagttctaaaaatccggcgggtgtcgggagagaatccgaggaggcagattgtttggtttaggccaatcggaggcaaccgaggtggatttggttcgaggatctcgagaggaacggtaatcttgaagctggatccttcaccttgaaccgagcatacatcgatttgaccgttcatgttttggacgattctgcaggtcaggagtagatgacaagacggcagaggtcagaataagcgcatcccattgattagggttccctctcgtttaggttctcgataactcactgttgcgtgatagccaaacctatcgtgtttcccgcaacagagatttgtaatcagtgaacgaccacacacatcatacacacaagacggtttaaaagcatacacacctagtccggcgccggcgacgaaactgttctcttgtgtaaactaacgaaagagaagcaaagagggaaaccccattataaatatttcaccaaggcttcaaaacttgatggtttacacttaccggagcaaacaaatggtcctggatgtttaaaccgaagataatgagttagtgtctcattctggcggtattctatgggaagaagaaacgaaccttgatgaaggaggcagacattccgatgccactatcgctcacagtgattatgaaaactctcgggtgatcatttacaggtgtcggagaggacactgaaattttgacgtatcctttctgaaacctccgatgaatgcagctctcatcagcgttgttgacaagaatatatcagggaacaatcccgcttacactggtatacttcaaagcgttcgtcaactgtcatatccaatcatgagattcgatgagcaattgataaaagacctcgaaatgattagaaagtgaacatcggaggaaaagcaaaggtagcgtaccagatttacgacagccctcctcacagcacctttgtcgatcttcacgttccatgtatcgaaatcctttgaaccaaagtccaaaagaacctctacaggtgtctcattcggatcaatgtttatatccgaggagagtttcctcgggcaatatagactgccaatcgcacctgccatttggtttcgctgagcttgagagaactgatggctggcgcagacggcaatcgcggtttcttctatgaagtccgcaagattgacgctgggaatgatggtatgaggccaacaaagaggagaagaaattattgtaagctggttggaaggtgaacgaatacagagaaaaccctccatacactgatagttccgttgaactctgcgaattctttggtgttgcgcccatagtacttgatgatgatttctgaagaaaccgcaaaaacggccgaacataataatgagcctggaacgaggtttaaagaacgagatgagataagagcaaaaatggacttacggtaaagtccaagactgaaagaatagtttccgacagattcgctccacagagcttgatagtgtttagatgagtttgctgcctagggtcaagtggtgtgtcagacaaaagctcagtggatgccaagattccatgaagaggggttcgaagctggtttaagtatcacgttgaaaaaaaaagaggaagaaggaggagaaagaaatagaaaggaacagcgtgagttagacggaaagtatcgataaaacccgtgcattaccatcactcacctcatgagacatctgttttcaagcaagaatatacacaagaatttctcaaccccgagaaaaaatcgattagatgaaagaaaaaggatcagtcagattagactatcaataacgaggacagagaaaattaaaaaaggacaagaccgcacatttgagataaatccaaactttgcatgatctgctccctgtatagatcttaggaccgaggcccagaggatcgcaccctcgacagccctgatgaattgacactcaacgtccaagaacgcttgtgcctcgttcgacgtcaaagttgcgatgagtgcgacggcggacttgttcatgtttaacactggctgaagttgaaggtaccgtgttttttccggcagccgatatcctaaccatgttgggatttctgtggacgagaagacgcggccagtgggatgagcgattaaaaattcacaaagctttgccggaagaaacgccgtcggaggtaagagagctgagtgtgctgaactgtgtggttgggtcgattgcgacatgataggaagagagtcaacatgtgaaggtgtaagcgagaaatgggcgttgttatctgggccgatgaaggaatatgaaccggcggaagacaaagaaaggttgggtttgaggtattggaatgcagagatatcaaagatgacagtctgatcgacgttgagggtttctctgaccgtccttgccgcaatgtcatacaccgtgaccaggttcgaagggtcggcaagatcacccgcggaggcaacctctctggtgagacgatcgacagctaagagtgttttgtaagccgacagtcagagttagttatacttaaggacgaggggaagaagaaacatgaagaaacatgaagaaacatgaaaatacatacatgctgttaagatggtcgtccttgccatatgcttctccagaagacaatgttcgagctcctggacaaggatcatcaacgtgaaacaaaccaaaagaatgtcaatctagataaaccgaaacgacatctttgccagtaaggaacgaccgacacgcatgaccatgtcactaagatcctgcagtagacctttatcttcatctgaaaattctgttcttggtttagtgtcaaggatacagaatgatccaaggtggaacccgtcggccgtcttgagttgggttccggcgtagaacctcaagggggccggcccagaagtttgaggctgaaaccgaacggatcccgatcgttggtgagtatagatgacgggcatcctggacaggcaaagtggatacttacatgattggtctgaaatcgccagtccgccatacagtcaagaattacgtgaggttcgttgaacagaatcgtatgcgcgcatgtcgagcctactcgatcatactttgtgttttcatatccggctatgaaacagcaaaaagagggaggggtgagtgtgagtatgatttgagcaacggggttcgaataagcatttaacaatctaatgcgaagacgttatatcgaactgaccagaagccaagatgggcatatcgacctcatcgatcaacaccgtcatggcggaagggacattgaatattttcctagccagcctaattgccttttccaacaccgggttctttcctctctgagccgggtcattcgggaaggattctctgttgatcaatccgaaccgatagagagcttttctcctttcggtctcgttgggcgggaacggagcgggtaaccaacctcgtttgacaaacgtcgattcttctacagtcgggtcttcatccacatctcttggttgaaggctgtaaggagggggaactgaatcttcgtgcactgtaggaagcaacttggatttcggtggaagaacacaagctagtttattcaggccgagtaaaattccatgcagttccgacacaagaacggagaacgtggaagaagatctgagcatatacgtctccagagaacgaacgatagaaatacttgttgcaacctcgcggaagcaagctagtaaagcgagacgcagacaagaactcaccaggaacttttccagctgcgtaagcgtttaaccagttggtaaagttctgatgtgctttctgatcatcggtcgaaccagtgttcaatcctgagagatcagatgatgaaacgtctgctcctttcgtcgatctcaccccaccaaccgagacggagggtgacacataatcacacgatatatccgagtctgaccgatcagaccggaacatctggagaaagttcgacgagatcgacgacaccgcagatgagcatggtgatgggccagagcaggtactggaagacagcggacatttgttgatgaccatacccgacagatgagaaaggcccgtggcagcgtccaacgggtcgggcactttatgcatctccccattgggcgtcatgggtagacaggacgacggactaggtggtgatgatgttgaagaggagcttgaaatcggagcaacctagatcgaatgagataatattcgtgttagaaatcgagaaactggcgagagagagatacaaagcaagcatagggtcgagaagaacaaagaaagagagagcgagtatgtgtgcataaacataatgggtgaccgactgactgaggtttgagtgaatgattcgtccaccataccgactacgaacagatggaacgaagaatgatgctccaacgacaatggctaaagcacaagtgacactcgacagatatggccagttgacccttgcaccaaacaaagctcggtatgccaattacttttttctttggacgagaagaagacgagaaagagaatggagtggagggagaggatgaacgcccggcaattctgattagtaacaacgcaggggcggatgttttaccattgcctattggatttaatacctcacgtgttttcgccgggtattctattttccatacaactgtggattcagcctcagtaatctgttcattgtcaatcgttacccgcacgtagcttgtctcgatcatgtcgacaaaacacacagacgcagaaatagagatagggatagagatagagagcatacatagaacgcaaacgatggttgcgactcacagtcggcaagacaagcaaagactgggagaaggaagaagcagatggataacgaagcacggacacagacacagacacagacatacacatatggttacagagaaatttcaaaaacgaaccaatagaaggaaacgggctctatacaaatatatgaatttctggtgaagctggtataggatgctctgatgatggtcccgccgatccgtttcctccaccttcatagttcgcgttcggcttaaccactcctctggcccgtccatctgtctcctcctcctcctcatcctcatcctcatcatctccaacactcgtctcgggcatcaatacgggactcgattcaacgatcaactctaggcctggggctgttagccgagccccctgctgtgaatgaagctgatgagcgtgttgaacggggaaacccagcggcattccagaccccatcaacggcgtttgagagggtgtcgtttgctgggaaatcgagccggcgaaaggattgtttgccgagaacgactgtggatgagccgtcggtcggacactttccgtaatctcatcaggtccgttcaagggtgaaacgggcagagccgagctagataccactcgcactccatccaactctgccgtcgatgccgggtcagccggtccgaaaatgaaaccgttctggaagacaggatccatttgggctgtttcttcaccgcctggccatctttctcgaccattctcatcgccctcttgctcgtcaccaccacgttcagccgagatggacgcacttacatccgttgacccaactccgatatttccagcgacctgacgatcgcccggatgacctccatctccaggctcgttctccgctgcagtcagtgcgtgctccagcgcttggtcaaacgcgagcttcacactcttcaagcttccttttctcgagatcagactctctcgcctggaagcgacttcccaagcatcttccgtctccacatcctcttccagatcggcgaaagaacgacagaggggacaggaaaaccctgggtaatgctgttgaagaagcggacggatgcatttgtagtgaaactgaaaagaccccaggtaagatagaaaattgattggttcagctgaatatgcaatcaaaaaaacatacgcttgctagaaagatggaaaaagagactaactacgtgggagcaaggactgtcaaagaacaaaaatggatcagttcagtcgatcgacacgatccgtgagattaaaattcagaggcaaaagtggcgtcctgcgtacgcgatgaagagactttggcagattgtgaccgagaataaacctagtattttgaaaataagcccaacgcaagtctcaatttcgagtgactcttgtcatggaagtctcacatttccgggggggtggaggcaagaatgataactcacagatacagcaatccgtcacactcgttttcgccgtctttttcgctttttccttgcttgtcgaagcagagaggctggatgtcgttccgcctcccagcgcgtttagctgtttcaatgcgttagtactgtacacacacaaaataaagccggttccagccatcggttagagagccttgtgtgttgataaaactgacgacagaaaacggttttagagcgatcgacctacttgaaactatttgccgcgttctgccaagcccgaccaatctcgatccgcatcttaacggaacggaagatttgttcggttccgccttgataatcgactcccagctgaaggacatctccgtcctgggtagagaggtgggtagaaaagaacagagatagagaggaaccccgttggctcatggttcaagaaaatacgcaatagctacaagacccttacagtgagcgcataaggcttggactctacaccaggaggcgagagcctctgatggttgagaaacgtgcccgacgacgactttgtatccttgacgaaaaactaagagaaggcgacgggaggagaaaagagcagtcccgtttgaaccaaacggccgacctggttagctttcatccctcctgcggaatagtaaacttgaattattctttagaaacacgcaccgacccgccggcaagcgcccaaatctcagcatgacaccgactgacaactttactcttgaacgcgaccttcgagcttgtcagcgcaccccctctgggtccaccgtccgatccgttttgcttgtcggtgaatcggccaatcttgatgggatggtagacctctccgttctcggccaccgagccaatggtcggagcgatcgaagtggactgtcggacgtctcggaggatgggatcaaaagataggctgtgcgatgtctcgagcatcggcacgaggcgtaatctatgggtaggggcagatgaagacgaagaaccgaccgtcgggaacggggctgacggtggattggctgaggaggaggaggctgaaggtgcttgacgagtcggcgcgttcgagactgcaccaaagaaacgacgttacccagggtgagccggcggtaaagatcaagagagatgtaaacaaggagagaagggaatgaagaagaagcgacaaaccaggttctgttcggctttctgagggggcggtacctgaagcacgcgcctcgccttcttccctctcactgacaggtccaccaggcggcgtactgttgcttttcgtcggacccgccgtggttggctgtctcgatccgacggacgatccatggttggagattcttctcatgagtcttgctccgagcgcaccaatcgggtcttccctgtgagagctcgagagagggggagagctgggtccggttcggttgggtgaaccacttccatgtgctctacttcgaagtgacgactgtggttgaggttgctgctgcagctgaggaatcgattgtgtcgtgcgccttctaatgatctgaggaggaacaggcgagccggcagaggtgcttgccagactatccgtggaccgggccgtcggagcttgttgggtcgaaggggaggcaagagaagacggagaagagatttgagcttgactgggtaaacttccgattgtcagtctggctggcggattagatagaccttctgctgtcaaattgggaatagcgagggaggatgatcctccagtggccgctcggggtcttctcactgtaaacggtgagcgatacattgtgaaagaaagaagaagagaagaagagaaaaaatcatgacgtcccagccaaggcagcgaggagaagcaggcacatgagatccagtcagctggagaacattgatatacgaaacgcaacatctgaaaagactttgaaagaaaagaaaagaacaacaagagaagcgtactgaaagaaggcaagaagctcgatctgcctgggctctgcggaggagttgctccagaaagtgtctgggccggcagccaaggactggatcccgaacctgctcccgaatctgcggcgggtggcatagcaatattcattggaagcggcatgcgatcctatttgtgatgaagagacaaaaaagacgggctggaccggcgaagagtattgcagagataggatgtgagactagagtggagaggagatgacgatgatagtccagacgatgacgagacctgatacgtatggccgaacggctgggtagaggagatggaccaagaggtacagagcgaaggatgacgacaatcaatcaatcaagcggtgagttcagatcttggagtcagacttgaatttatgcttggtaagaacaaccaaaagagtctgaagcaagctgctgaagtaatgtgcaaagaggaggatgagagagatatcagagaaacagaagaagtagatgggaattctcactttctgtgcaaaacacggccgatgacacaaccggcccgtctgtgtatgtgagtaaccatacataagtgagcgtgatcacgtttgagtgatgtaacgtgcgtaagagacaagaaatcaaaaacggaaatctaaaataaaataaaggaaaataagccattaatcgcagaaagccaatcgattggtacctcgatgagttacaaattactagagatcgagccgaccgacgtcatcgcaggttcgatcggaaccggttgattgaattcatactcctaatcgaaacgtccgcctcaaatctctcaagacgcgtccttccttttgtttaaatatctccttggcaaagcttggacattatatctcagatggccggcaggcagacagacagatcgatctatggttgcacttactcccttcaaatcgagaccttcaactagacagtaaagtagatgacaagcaaaggacccgattaaatctgatcgatttggaatggaaattaagagacggaacgggacgaggcggaacggaacggaacatatcatacaatgtagactctgtttctgcatgaatgaattcgaacagatccgaaatagaaagatgtgtctatgcggggttcgtaagcaaagggccgagcggtcttgcttccccaagcgcttttcgcggctttgttttttttgctctggattgttttaacattcgcaaattcttctttccctcgttttcttgttgaaacttgatgtatacacattacatacacggatgcaaaccaaactttgtttgattttctttctatccatttagtttcttctgatgaatttttttgcttcctttattgctcagttctactcagtctgagcccccttgaaagtggctggggaaattaaccagaacgatatagaccatgtcaagcctcgcttagactaaaaaatctcttgacctttcactctactcgattactttgcatcagcagtcacatgcgactagatacccgagcgaatatgatgcaaaacacgattgaataacagatcgagcggagggtgtcaaaatgcgataaactatatagataatagatagatg

SEQ ID NO: 858 - DNA, 2019 bp, Xanthophyllomyces dendrorhous
agataatagatagatgatatgcagataatagaatacactttatgagaggagagggaggaagaggaaagggggatataggttttttctttaaaggagaggatgactattttggagtgggaaaaaagaaaagaaaagccaaagtaagagactgaagacacactcgatgagcgttgagttatgaaagcgaacaatatggaaaacaaaacacgataaaacgaagccgaacgaaatttcgaaggaagcgaagagtcaaacaaatcgaagtggaaaataaccgaacactagaaaagagggaaaagaacgaaattgaaggcgaaggacacaatcaagtgtgacacccgagcaaccttataccacataaacgccatctgatggggccgtcaatgaatacattgtctttgaatccgcagcgactgtgatcggtacagactcatacgcgttgtttctcaacggtggtgttctgcatgatccgtagtgggatgatgtggcagacgaaggtgtggacgaagcggaccggctgtactcctgatcgggtgaagatggcggggacgggtacatcgtcaccgcggtcgacggatatgattgagcatacattgaggagtgaaccattgggacggatgctggagtgtattgggaatattgggaggaagacgaagacgagggtatggcatggtggtggtggttgtaggccgatgaagccgatgtctgtcctctaaaatcagttgatggcgagcttgtcgatgattcactctgttttacttcgtgagaactgaatttagcattcaagaggtgctgtagaaaggaggaaaaaaagcatcgccgtcagtcgatatgctatgaatattttattgcagctagacatagacttacgtcaagatcgatgacctgctgtggagtacacccaatgtcccactcgaggtaaccaagcatttctctctccatctgtttacgaaagagcaaccacgagtcaggccctgaggaggtggatgaaggatcaaggttgagaatgtacatacctggttgacctctttcaaagggaacatctcttgaccaacgatacaccaactctggtttgagtaggtgtcatcgcaaaccatctttgcagcgagcatgtagctactgagccagagtctttgaccagaggatcctctagcagatgggtatcgctttttcagtcggtagaggaaaagtagggcgatggtggccactgagggaggaagttgagtacggtaaagcgagtaggcgacaaagtttgccaacggtgatctcgcaccgcttgcggaagggtaaggaggcagatcgggacatgagaacaggtgcgaaatcttgtttaaacaaatcaattggacagatcgagaatgaacgagaaaaaaaaatgtcagcagatcgaaggaaggttacaggacagctctgattgaggaaagagaggtgagacatcctaaaaaggactcacatatcgagcggtggtggtagcaatagcctggtgtccataccacttggttgccggatcaacctgagcggactgttttgacgaggagcaagtggaggatgaagcagtattggaaggcatggctgtggggataagtgggttgtgaagggattggtcgattgtattggataaaataaacttttggccttgtattcgagtcttttgatcggacgacacagttgaagtttatgagtgagcgagcacgtggatagcaaaggtgttgtagaaggacaagtgacaaaagacagagggaagaagaatagagcgtcaaacgtggatggtgttttaaagattggatgggttggactgaaaatactgaaatatataataataataaagaagaaaacgagaaggagcgaatctttctatatgtttgcggagcctcatagaacacgaatcgacccacccggattccatcggatttggcgcctgttgggtggaggcactgcaaaagttttctctctcgaacccagctgggctgacgtcccgtagtctaagttggatgggcaacactcggtggagtcaaagtg

SEQ ID NO: 859 - DNA, 2691 bp, Xanthophyllomyces dendrorhous
cggtggagtcaaagtgggggcgggggcggaggcgggggggcggacggagagttcatctgggccacgaatgtctcgcgtcgtgcccagcagatgagggagagggaggggaaaacagaagaaaaaaactagtgacaacgctctcccgcctaaatgtgaaaaagaaaaaaagaggcaacggccgggatcatccgccggcgatttcgatcgatcgatcagccgatttacattagcttcagtgcctgagtgaagatatcgcacttccggcttttaccatttctccgtccggatgcgagcaccgtcgatccttgaaaaaatttcgctagattgattttttttcccgagtattctctcccggcgcagcatttttcatttcggccaatctttggtctctcagttcttctgtctcacgcgcacaaccctgtttctttggggatgcatgtctagtttcccaataccctttgttttgttgttcttggaaaaagaagaaaaaaaaaccagctatcaacaagatactacgtttgactattttccttgctcaaaattggaaataaatcccgaggggaaggaaaacatacaagaagagaacgaagaaacacacacatagacgcaaacatggaaaatgaataagaaaacctcaaatctcaggcaactcattcaagcatctagggtgaggtgactaaatagataactttctcccgtcttggtgaagaaagcagtgggctctttctctttttctctttttttcttacactcctttctcttcttctggatcgatgtgcgcctctttaaaaggacagaatacatgtacatgcaatctcgcgcatcccagacgatgcgcgcgatcagcaggatactcaccagaccctgaaacggatatttagtttcctttctcttttttttttcttcttccgttgttcagtttaatttgaattctccagcatcacttctcttccaagcttccagtgggatgggaccaatcagtatatccatctattttctttccgcaggatatagagaatgtccgataagcctgctctccctgtaatttttcctctcctcgtgcaggaattttgacggaaactgattgggagaccccagcccggggccacaactagggaggggaatcttttcatctctttccataatagtttcaaaattcagcgagaggaagaaagacaggcaggcaaggccaaagtcgtcttccaagaatcatgcgctatatttttcgcctcgcgaagaaagacaggaaacagcggctatgcttgaatatggttgccgcagtgccaaagactaagcatgattagacacgagcgacatccctctccatgaagaaaagatagagaaagagaatgaaaccaagagcctataggaaaccccggacattgggctcattggggtttgtttcttggcactctggagaatatcttgggtggcataggttctcgcaaccatttactgtctctttttcagatggagttttgcattgctacaatgtattccccctaatgttcggttccgacacgctatcctacctctcgttttctacttacaatcattcctacctacctactctcattgtcttgaatcactttgtctcttgtctctttgttctgtcctcttgttatcttatcggaagtaatataagagctactacaatgataaccaagacgggaaagctatctagcacaacgacatagcataggccatagaaaggaaagggaaaaagaagaaaagaagaagagtgcagaaacaaggccatgtgaatctcgcaatcagttgatcaatcctttccgacccgactacacccgtcttcattcctcttgaaaatatgtactataggacacaaagcgtgaaacaacaagagaggataaaaaaatcacatgtctgccagagtagaaactcgccggtcgatctcgaccgccaatctcttgtcaacctatagattgcatgccatacatgattgacccaaaagatccacgaaaggagagggaaagagattgaacgatagaatgacatttaatttcggcaacagttagacacgacgtcaagcccgggacggcatctaacgcacgagacagacgaatcgctaagttcaccgacgacgtcgtcgaagaggataaaaaaaaccgtcaagtttagatgcatgttaattaaccgaatgtaccgatctaaacaggaggagctctcgttttctcatcctttccaccggaaccggacccgaacggacgaaacggacaggcggcacaacgccagacgaatgttacaacaaagatggtatgaaaataattaaggatttagtgtaatatccgcgaaaccagtcggtgccgggcgacgcgttacgcctccttacgttaaattatcactctcccggtcctttcattcatcatccatcacctatcgcccacgtcctacatacatgttcatctcgaacggccggttcacgccgaacatctaagtgatatattgcctcaggaatcggtccacctctgaaagaattcaccatcgctcagtgactgatatgcacataaaatcacaagacaccgctaggtatctatctgactccgcgaaccgggtgcgatggtgcaagagactgccacctgaggacattacacgtaatatagaacagaatagtggctaaacacaagatatacgacattaagacgaaagacacacacacacacacacacacac

SEQ ID NO: 860 - DNA, 10260 bp, Xanthophyllomyces dendrorhous
tagaaatagaaatattaaacgcgggctagaccgaacacgtcataaagtatagaggtatacacactaaggagcacgcaatactgatgaagggactatcgctgaaatccggtaaatcggcacaggatctaagggcggctgaaagtacgataaggaaagcaaagagatctcaaccgatcttgatatacaacaaggaagaaagaattgacaagtcgatgcagaaactaaagacaggtcccgtcgagcgcaaacggaacatgcagacgcgacaaggcctcctcacttatcgaagcaggaatgaggacagcaacgccagaccgcaaacactatagagaccaatcatttcattaacaagaaacaaaagtgagtataacagatcgaccagtctacgcgacgatcgtatcgagaaccacagatctcgatcgccacctccgacaaattatcgctcaacatccctcgaacctctccgcagatcctcgagttttgcccgagttactatcgcatcaagagccgcgcattcggtgttatctcttagaagcaactcggtccaacatctaaaatgcacccaagcctcacaccactctcccctcaagataaatggaaaaatgacaggagactaatagggcttacacagatactatttggaaccccatagcaggcgagccttccgtgatggagagcgaccagacatatcctccaactgtgtaggaaagaaaagacaagaggcttggtcagtttcttggtcgatccttcaaacgagtgacatgaacaaaacttttaaaaaactgcgaggccacgtaccgatgggaccgattacccgagccgcactaacagacgactgggccaacccgtttgcaaggttgacgacttcgggcgcgctcatcgcgttgacgcaaacctgtaccaagcgaaacgttgtgttagcttgtattcctctgaaagtgaccaatcgagcatcactggtcagataaaacaatctgaatgtgcaaggacaaatgagttcaccatgatagcagtgctaatgggaatttgaagcacactaaggttagtaaactcagacaagaaggtttgtcaaacaagagaaaatgactcactaagtcaacgttcctcctgcatatctgcaagccatgttcacggtaagcactgagaatgtagaaacgaggacaaagatgtgaccgggcggaagagacagacatccgtcaatgtatcgtcctcgacagaaaacaaacgtgaatcacacgggactgaccaaacattaagaagggactaccgtcctcagcgctgctcgcaaatgcgcgcagagcaggtgtggtgatgtaagatgggatgaacaacaaagaccccaatcggaacctgtatcataacaaagaaagagatgatagtgagcaactgacaagcatggtgacgatgtacgatacaaacaatattcacatctggatgtgagagcaagggccagtggggggaccaagtcgtggatacagataaaactgatagaagagctggaagaggcacatgatagcgacaagaatagaaaaatgagcaggatccagtccaagacctccttcggcataatcgctgaagtgaaacaaagggagagaacaaatcaatgcgaaggacttgacataactgaagaaggagaaagaggttcgaacgtgttgaggaagctgaggaaaagctgtccgttgatagcttgaaaacagacaaacaagagggcaagcgtgagaaggcaagagcaatataaacaacaaagcccaactagagactagactcactatcgtgagtagcaagcgcaaagtactgtaagaaaatattgtcccagtccgtatcagtcaggccaatgacagataaccgctgcgagtgataaatgtgagagccgaacctgaaagatcaagaacagaggcaacttccagaacaggctctctttcttttcatttgcaaccggggcaggcgttgctagaggagcgtcctccctaatgggttgcaagtcgtttcctgctgggagagagaccgccgcaaaaggatcttgctcaactccacttgtaacattgggtgagatgattaggctaggagaatgaagtccggtgtgagcaaagatagctactccagcattcgcgcgtaaatccaaaatagctaatcagaaatgtcatatcttgtaggggaatacatctagtagggataaacaagaaaccgagagaaagagcgataggaacgtacaagctggtcggacagacgctgcagaaaaccttctccctgtagtgtaagtccccgaaacggagaaccgatgattgccaggaaagtgagcgaccgaaggtgccaagggtgcgtctccgccaaaaggatttcgcgaatatcttcgttgtgaggacgttccgtgatgaggtgagctcagaggagagtactcccgatggtatccagtgccgggtgatcgcacagcggaggatgtggtatgagatgagcgggtatgagaggtagcgtcgaaagttacattgggatcgaggaactcggtgttgggcgtgtatgttcctgaaggagaaggagtgatctggttgtcctcgccagcctcatcgatatcgcttgtatcgttgccatcgtatcgatcatcatcgtcttcttcctcgaagacagactcttcctgagcaagggcttgagaaacccaaagatcgttgatggtatttcctcccattccctcattggctggaatcacaaaccaagagagattagcgaaatggcatgcatcttttccctgatgagagctgctgaagaaggaaagagtctaaaagacgaacccaaaagtaatctctcagcaaaagttccccttcttcccctttctcgcttcatgagctcctcctcatcaccctgttccatctcttcgccttctatcattcgggatgttcgaacggtagaatcactgccccttctcccgtatccgtatgcactagaacccgaaactgcccgcctcttacccttcgataaggccgaagttggtgaagcaaggtgcacttcagcttcgctatgcatagacgaagacaaaggcaagacattgcctgatcctgcaaatttaagtcaagacacatgagcaaaaatcaatgttgtatactaaagacatgatgttttgaatatatcggtcgatgtaccttgatttgaggaattcaactcgtcggtccctttttcgagaggtagagcaattccaccttctcggacgccaccattcttgttgagtaaaagagataggaaggcgccggtgaaaagaaggacggaggcaagtatacaagggaacagatatggcaggcgtttgaaaatttctatcaaatcaaggagggttcatcaattcgactgtgcactttccagtgtccagaaggacacttaccaatctttccaatgaatgaatccgggtagttcttcgctggagattcggcgagtccacccaagaccggtccaatcactgtgtggccgaggagattgacacagaagcatttgagcgaatgaagagatcaaagaaagaaagaacaaatgctgacctcccccaagtgcccagacaaatccaaggatcgcatatgccttagcctatcgtttacaagtagaatttagatcagatgcctgtgacgatggcatctgatcgaactaaaagacgagataactgatggcgcacctcatttgttggatcggtcacatctcgaatggctcctctagcaactcctacggctccgttgaagacaccctgacaggctcggatagcaactgcctcaggaagagtcgtagacgttccaaaaaggataacagctacacaacgaggcggtaataggctcaatgaggtcagtaaatcgaatgtatgggggaaatttatttatgacgcacttattgcacttcctaaaagagtcacaaagagaacgactcttcgaccgtactgctcggctatggttgcccataagatcgaagtgaaaaactagattatcaaaggtcaaatcaacaaggctagtgaatatagaagtgcgatgaacagaagtgctactagtaatcgctcacttgggtcacaaagaacgaggctaccaggtttccgcaccatactcccacgtctgtcgaatctagaccaaatgatcgaaccatgggtactaagaagggagccgagacattagcagagagaagctcggcgagaagtgcaattcccaaaacaaccatgggaagtctattttgagtaattgttagcttgattcagaatatatgtgatgccaattgaaagaaaggcggcgcacattggaagaggagtcacatcaggttccttcctgatgagccctttgctgaataaactaggcacgaccggcttgtattgactctcttcgttattggaatcgagcatgccatctgcaccaagttctcgaaagactcgagagccggtagagactcgcctggagtattgttgcatggaggaggcattagattgctgttcgatggggggaaagatgtcagaagatgagatcatgcgcagaaaatgaaggtaaacagatggacaatagcaattgaggaaagatagacatacccgatgggcccttttccctgctgtattttgagagaaggatattctggattgggagaatttatttttgagagcgggagaggtcgattcgggagtgatactgtcatctacagcagagtctgcaaggttaaaggctggagggagcgagatcgaggagggggcgggcgctctggacatgatgagctaatctacctaggaagaagagacgcaaattcctccagtatatgtgtatacaccagacaaagagaattaacaatacagaggaggattgaaagtctaaaaggtctagagaagagagacctggatgaggatgagttaagatctctatggggcgataagttgagattggttgaaacgacagggattaagaaggaggagcaaaagtaatcaatgtggcgttgaaattaactggctgtgtcggtcacacgtggctatctgaccgcttatgacgtaagacaaatctatggagggggacaccttcagaacatgatacagatgaacgaacgacgcatagtcttggcttgcaaagataaaactagagatttgggatgaaccccagtcggcgatgtcctatctattcgatcaaatccctagactttaggatatctgaccatttctatgtatggcttgaacttgacatgtgctgcttaaagcaaccgagagcgaaagaagccgagctctgtaggtatataatataggctttcttctgctctttatctctctctccgatccttctcttcatataaattcactctctcctttcgaaaatatgatgctgtctagtatccttctccgtgttcttccgttgatcacagcaactgtggcctttgccacgccgtttgtgtttgactccgatttgaaaccggtggacttgtctctatcctccgataacttcccaatatatctcctcgagatagacatttatggcctcaaccaagccctttcgaacggaagtatcacttcgttcagcctggtcaactcgtacatgtcttcgatcagccaggtttgttcaaaatttatttgtgtctcttcctctgttaatcgagactcatcgactatactatataagaacaaccatcaaggtctccttcttcgagctctcatcgagacggctcctataaactcagttctctcgatcgcccagaaactggacgatgaacgggctaatgggactgtccgtagctctctccatggaatccctattatcctcaaggacaatatcgcgaccgatatcgagcttgggatgaatacgaccgccggatcgtacgctcttcgtgagtatactcttccgcgtctgccttggcaatgtctcagaatctttatcgctatcacacaagcataatctcatatggtttactctttgcatgtgttctattcagttggaagccctgttccaagagattcgcatgtctctatgaagcttagagcagctggtgctatcagtaagctatgatttatctgaataatttacccttatcgtgataatctcactcattctctgcgctcctcttgccgggtagttcttggtaaagcaaatctgtctgagtaaggagaagcctttcactgtgtcactcaattccagagatatgatgcgactctgagccactaacttattcaagcatctgaactttgcaggtttgctaacttcaaaggaaatatcaccaacggttggagcgcgcggggagggcaaacacaatcggcctatgtagtaggagggttcgcaggttcgccgcataatttatcattcgtacgagcttgccttcttgtttgattgccgacgatattcgtctttcgttcaacagctggaggagatccttgtggctcaagttctggatctgctgttggggtgtaagttttattactgagaaatcttctctctatgaatctaattgttcgggagtgactaagtctcaccatcatttgcatctagttctgctggatgggccgcttcttctttaggctccgaaactgatgtaagtagttgacagtatcatacaaatcttgcgaatcaactgacaagcgactgcttttatttgatgctcgaattctttgtcacgattagggttccatcgtttgtccttctaaccgagccgccttgtttgggataaagccatccgtcggtctagtatctcgggccggtgtggtgcctatcagctcgacccaagataccaccggcccgatcgccaaatctacatacgacgccgcgctgttgctcgagaccatcgctggttttgacgagagagataacgctacgtatgctgcaatcaactacacgctcactaattacacccaatatgcctttgcaccctacaataatttttcggcctatcgaatcggtgttcctcgaaaagtgttcttcaatgaaactctatccggtaaccctcctgagattaacgaggttcttgaggccgcacttctcaagatgaccgatttgggagcattcattcaagatccggccgacttgccctccgccgatgagcttaccacaagcaggaacgagacaatcgtgcttcaaactgactttaaagttgatttggggacttacttgatgggtctcaacggaaccggaccaaagacattagaggatgtgatcaagtgggtgtcgttcccgatctgctatgtcctgccacgtgttttcattcattcacgcttttgtgtccttacgcatcctgatttctgtctcggcgtttctttttcacagctttaacgatgcgaacgccgatcttgaatttgcccctggagagtgttgtcaagtaacccttatagcctcggttcaaacgaccggtaaatccaacccagcttacatcgctgcgcttgctagtgatcaagagatcggaggtactcggggtatcgatgctgtattggacgagtatggtttggacgcattggtgttgccaacggagggatacgcttcatcgcctgctgctattgtcgggtatccgatcggaacggtccctttgggatatctgaattcaactggtcagccctttggaatggccatcattgtaaagaaggtatcatctccacctctcttttctgttggtcatattcttctactgactaaccgactctgcttttactcttatctgtgatagtggaacgagccgacgttgatcggaatcatggctgcttttgaagctgcctttgctaaaagacgagttcctgaacaacttcaatagatttctccttctctaccttctctttcctactcttttctactcttttttctcttactacgtctttcttctcgcctataaatgtgtctaaatgaggtaagatcgacgctcttttcttttatgtttgtctatctgtgcgcgtatacacgtactcgttttgtcaactgttcctgtatatatgatgcgagcttgtgccttcttgaacaaactcatccagtttcatcagttggttaatgagtcctactatggttttgaattaaaccccgttgccatctatcaaagttaaagataaatataaagctgagttcaaagacaagttcagactcagaggtacagggtccgatcgaacaagcaaaacaagctctgaagattaagatagacatccaatcgaaatccggataaccctaaccatatgatcacctttttttggtcttggtctttctttgtcatcccaatcggtggttgatcgtctactctctcaaacttttcttataggtattccccgaggaggccatcaattcaacttttgatcaactgcaagatttccgatcgataaatgatacattgaataacgagaagatgaaatgccccatgcaattcctgtagagggcattggtagccgataagaggaaaatcagaggaaggcagaagatcctttgatcaattgatcaaaaggatcagatctagtaagccgaaagcttgaagaccttattagccgcctgaacgagtactgtcagggaggagatgactccaaagaaataggttcccgatctgttcgcgtaacaatcgatgcacacgatcaatcatcgaagcagatgagcattcagttaggctttttggattccaaatctgttttaacaaattgttgagattgtaaatagagaagaaaagaaagatcacagttggacttaccgaatgttggcgattcgagcggtggtaccatagtagtaggccgcgatgaacgatgctcgggagaagatgatcaaaccagagaagatgttcaggtacttagccggaagtcgagcaaagtttccgatgatctgtattggagaaagaggagtgaaaggtggtgttatgaaaagtgatcagcaaagggttgaccgagagcagaagaagaataatcagggcacaaacaatagcagtagcaaaaagagggaagctctcaattccgttaacatgagcaccagccaatcggtcaagttgctgttgtttcggaacaaagtaccacatgtcagatatatagaaaagaatagcaccaatcagagaacacttcaagagagtgaaaataagagaggtcgcgtagagagaacggtgatgatggggaccaacatctttcttctgtgcgtcggccgtaggtcctcccttcaattcgcctctgggtttcgtgttatcgaattcaaatccgttcttggaggccctaaataaagtagaattcaaatcatggtactcagttgattgaccaagaagtaaagactgtccaggaagatctatcaaagactatgagcaagattttaaatacgcacatgatgagcttgacagtgtgaggagcgaaagccagagcccaaacggtgggaatagcatagagagaaaggttggagtgaacagtgataggcatggtaggtgtaggtttagtatataagctcagtgagatcgagagaataagacggcagatggatgaatggatggttgttagaagagaggaggaggggcaaaaaggaggaaaggaggctgaaagatagctgtgaaaggacgggcggaaaaaaggccacgcgtctatgtatactactgcgcttcccggtgacgtaatctctagcctttttcactcacactcttactagccatagttgttataggaaatctcatcgatccaacagctaacaggatgaaatgaggaataaagaaaagagagctgataggaagggacaagaaaatatttctgaaatgggggacttttaatttacactcatgcatgtctctacagaggacgagctttacctctaggcggtcgctccagctctagcagccgtttcggtgaatgtgtgggttcgaccagggttgtatttgacctccagaggtcgtcctccatagacgtatccagtaaactttgcgatagctgtggtagcctggtcgatcgcaacaaattcgcagatgccttgtcctcgggatcgaccggtgttgtagtcaagaagaatctcggcagcgacgacctcgccagtggtttcgaacaactcaactagatcctcgttcgaagtcgaccatggtagctgtttacaaaaccacaaacccatcaaaggatccacccgttaggttcaaaggacagaacggcaaaacaaaacatcaaagtagagaaatctcacattgttgaccaggatctgcttgctctcgggaatcgacgcaccagcaaatcctcctccgccgccagaaccccaacctgcagccggtccgctcggcttgtaatccgcgtacggatcctgtgggaattgcctacctccagcagggaagccgcctcccatcccacccatgtgacccatgtgacccatatggcccatgtaaccc

SEQ ID NO: 861 - DNA, 5044 bp, Xanthophyllomyces dendrorhous
catatggcccatgtaacccataccgcccataccgaatccaccgcgaccacctcggaaaccacctccgaagccgcctcggggcatgaacccaccacggaatcctccgccgaatcctcctcggaaccctccaccaccatgagcaaatcgatcctcccgaacctccaaccgacgaccataccagtcgaacccgttgaactgggctgatgcgccgaaaccatacgcacaagaaaagcattcagcaagcccatgctagacagctgttcataagaggttgaaagcctcgaagtataatgaaagggtacatacccatagcattggcggcgtcctcggcgttctcaaacactacggttcctcctccctttggccttccatcagggaacatctgtacatcagctcggatgattgctcccgcaggtcggaagagatccttgaggtcttgccaggttgcctgataaggcaactatatgttttacaacccccaaacaggcaagagattagtaatatataagacacttctgccgattatattgattcacatacgttaccgatatagagctggttgctaggcccgcccatgccgtggccaccgaagggaccgccggccatgtgtccgagtcgtccctgcgaaggaggggctccaaatcgagcctcctgctctcggtcctatgtagaacatgcggtaaaatatagatatcataagattgcgaaatgaacttagagaacgaatacgaccgcatgactatcaagaataatccaagcacacgagacgaacctctctgacaaaaatcggccttccaagcaaaggtttgtcggtaaactcggtcaaggccttcacggcgtcttctctgttagtaaactcgacgattctatcatttgaaagatacacgatcaattctttgttctccttctccaagtgaatcaaacggggagtcactcacccgcatccctttgagatatgggttggcgtaactaagatctctgtaaaagccacatcgagtccggctatagggttcacgtggatttatcgtataaagaggaacgattccgcaatccagaaaccccgattttattcccaggaagccatacagcacacccggagcgcaaattgatgcagaaacagatacacaagcccccccagcacccatataccaaagaaaaccaattccatcagcccttccgactccttcaaacagtcaaacccttaaacgactaatcataatccagcaacgcaaaaagactcttatattgtctactcttcgccttcaatccaaacagactaggtcggatatatactcgtggagcgtactccttcctttgggaatgagggctgttcgagacgattgcgctctcggatgcaggttgttggtgcgagcgaggaagattttagacaaggaaagccaaatgtatcgggatcgataaggcgaaggagagtaagagaacgtcttgcatcgaaaccgtcgaaacgtttgaggagtcgatgggccgagaaaacttctcaggtgttccaccttggagatccatccttcaacatcaatctctccttcgccttattctagaacccctctcttcttagcccctcactcgactaacgaccagcattctcagattgaatgtgtgagccaccggatgggaataggccattcttccccatcttattttgatcaccgtctatctgatcggctctgcgttgagagagccatcttctctaacctttatcacccttacttcactcgaaaatgtctaaattccaaacacccctacaccccatagccatgaacaaagaaaacgcaccgtccatcatgaaattttccaggtccttgtacctgacttcgtaactgagatttccaacatagacccggttctccttgattgatcgttgggcgtgctcggccgcctggtcggaaggagcattgaagggtccaccaacagatcgctggggagctgaatgatgagcgtgagtgctaggagcatgagaactgtgaggcgcaggggattgactctgtttatagaaggacagtttccgtggaagcgccaagagttagtcgacagactaagagaactagcgaacagggagagaaaggtttactcggcgccgataagaggaccttcgaggcgagcgggagcgagagcgcgatcgagagtggtggcgacgagaggaggagtgatgctagaggacggatgaaagcagaatgtacagaaaaaataaagaagcaaggttgaccaaacaaatgtggaacggttggtcaagacaaagagagagagcgcgtgtgtgagtcagaagtaaaggcaaaattgacagagtatgtatgacagagcagagaacagatgaggtgatggtgggagtggtcgaaacaacatctacagcgcgtctatgttgaaatatccctactctctaccctgttttcttctctacgttctactctctattctacatactacaatcacgacatgatctcctctgatgacagaagcaagcgcgaaaaggaaagatctttctgctatcacttcattctgttccgcaggtgggtgccttcgccgttcgatccaataaacctctccgctagccatccacgtgctcgctcgcctcgacagcccctgaaacagacaactctacaaagtagaagaaagaggaagagaatgttaagaccaactcacgtcatcgtatcgatccgatcgtctggccgaatgtcctgtggtttttaatccggttggattcagaaggatagatgcattgccatgtaagtgtgtccgtatgaacttggacaaagtcgctcgtagcctctaaagtaaagagtgtgggaagtatcaaccggaggtgagaaaacaacacgtacgatcatcccgagaatccctatgttcatccctatggtcatccctgtagtccctctcgtctctatcgcgagatctatcccgtctagggaccggagatctgtctcgttcgtcggccatgtttatactgtgcaatgtcctatctgtttaggggatggtaaggtgaatgaaagagaacggaagaagaagaaaaaaggagatggggcttggaggctaagggcagtgccgagggttttagcgaatttgattattcatatttacttaagacttaatcaacgttcagtctggattaagccacgctgctctactgctcacactcaaacacatccattcaacctcaaacataactacaagatcacatagtatctgtcctctgatctgctcgctagtcatcagccatggcagaagaagcagccgctgtagcccaggaatttgtgtccagttcgtttcggatttgttcctttttggcttcgtatttgatggaattactgagcatttcttggacaacacgtactgatcattctcaattcgctcttattcctgctcgactcgatcaggtctggacaacctttcgtccgaggttgccttcctcctcaacgagattcgtataaaggacgaaagatgcgtcgagctcactactaggttgacgtcccggacctcttctcatcttaaacatatcaggccatcctccacattatccacccctaatccaaatgtacctaccatcctaaacccggccactacaaaggagacaacagcgacactgcctaaaatctctagtgaattcgagaaactagcagcgatgcaggcagaaaaggtcgctctgtccgaaaggctgatgacgctcgtaggaaaacatgcgagaaagttggagttggaggttgttggaaaggtagccgagttagggggcgttcccacaccggcaatggttccattccagtcggcagtcatgtcgggtctgatagagaagaagggcctgattaatgctggtgctggtttagtatcctcaggtaacctggagcataagcgtacgtctcgtctccaacctcctttgaacttctcttttcagtgttgactttcgtatcatgcttcaatgttggtaattgtgcacgttggatgatatacaggccgtcgaacctctcagacaccctcgaaacagcctcttcagattcagatgcctcctccacagatgtcttattcgatgcaacccaattcgcgtcattctcctctatctacgtcatcatacatgcctcctcaaccaactgctcaccaactagcctcgtcatacacgccttacgatgcacaccacatgattctccccaacggctcttcatcttctggatatcccgtccattcgaaccactctggacagcagcaacaacagtcatctcaacagttgcaaggtttttccgctcagttcaatggacattcctcctcgtcctctgcttctagacattcaaatccagttgctggctatccgtctcagattcaacagcaactccagcaacaaatgcagcatcagctccaacaacagcaactccaacagcagcttcagcagcaacaagcatcacatgtccagtcgtctggcttatcagccaacggtcagcctggcgctaacaaagcctcgaagcggaaacgcaagtcaacccaggctcagtcggacgaggacgagtatccgagtgcgaacgcgtctagaccgcaggtagtcgtagaagacatgggaggcgaggaggatgctgtgggcgaggaagaggaggaggacgggggagacgacgatacattatactgctactgcaagcagaagagtcacggggaggttcgtagtttttctctttgcgtgtcaattcttgagtctgctgctttcatgtttgctcggtacttgcatgctaattgtctgtgatttgtcacgacagatggtcggatgtgataacgagaaatgtgccattgaatgggtccgttctatcttctcttataactctcccttcatctatctagaaggcaaagggatgttgacatcaatgatcttttctacccttagttccatatgcgctgtgtcaatctgacatcacctcttccggagtcttggttctgtccaacgtgtgtagcccagggggcagatcggaaacggaaaggcgggagaaggtgatctcggtgtttgtcggtctcctgctaccatctattgtgcattgttgtttgttttgcctggggggggggg

SEQ ID NO: 862 - DNA, 24272 bp, Xanthophyllomyces dendrorhous
  misc_feature (10498)..(10507): n is a, c, g, or t
gggggggggggaagccttcatactcgtccttgtccttatccatcgtcccctttctttctttctcactctttgcatcccatcgccgttgtctctctatctgctcccgattgataaggatgcgttgtactttcctatgttgtacattccttctttaaaaaattaaaattaaaaactttcgccccaaggaggctatcagatactctctgcatgcaagatcggcagtacacgaacggtcttatattgattccctggctgcaataatcaatatgcataggtacggggtccatgtccttacactatcaagattttcatccgatacttgtgtatacatattccgacggttcaatcatttgatgaacacacgtacaaactttcttctcgtcacacgcatgtacatctgtacatgttgaagcactgtccatccgataactatttgtcacccagcactaagcagtctaagatgaagagtggagagagtgctagataaacatcataaaacgccgatggttctaacgtcccgccgagattcgtttgatgcgggattttcttagtaatgctgtcgttaagtgagaagaaagttgaccgagctacatcaaaaggtggtaaggctgtcgcatacatgccttcggataggcaagcctgacttctcttacagaaagcaggcaaagggtttggcgttgtgtattcctatatcctcaaacgaaaaaaaagcaatcttcaagctttcgtcctatccgttcaaatactcgacagacgcctcagccttctgctccctcgtacgtcattgacgcctgttagttcagccggatgaacccttgctttcttgaacttgacctgaatggctgttctctcatatagttatccttcttcttctcccgcccatctatccgtctctctttctgtttcttttttacttggagatatttagttcgtagacttagagcgatcgacgtcttttcttccagaacaggggcggtcagggcgtatgataaatttggtcaactccaaaagaggcgagttaccatctatgttgactggaggtaggcttcagaaaaagtcgacaagggggacggagaatccgtatcctgacagacatgttataccgtgagtactttgtccatcgttgttctcttgatttgccgtctgaactgaagggaagactaggaactcccgaaggctgatcgagagaactcaccgcacaaaccgactccagatataccggacctttctttgaacctccaaccgaacgccctcttctgcttgctccacaaagccaaaccaccaaggatcatcagtctcttgcttccatggcccatccgccaacatcctataaccaaaagtataatgcagttccagctacttctcactcacggtcccgctcggcaggcctcgtgtatggtgggattggagagtctcctgtgagtagacacagctcggatataaattccaaccggagtggctcgttcacgactactcgagggaaaataaaagagggcatactcgcatcactcagggacatccaatcatttggctcaggatctggcggggatgatggtccggagagtgtgatatctcacgggataagttcgatctcgtcccctatcatccctccgcccgaggaagattttgatcatagaacaagaaccggtacacctcatggatatcggatttggatcactcccggacaagaatcatatgcttatgccccagaggcccatcccgtcacgacgtcttcttcttcttcaagagagtattcccccgatttctttatcccgctctctttccctcatcccgaccagcaattttcgccatacatgttcatctccgatccaatgagtcctgccaaaccagactcaaaattcatcccaacgcgctcagcacctcctccaatcgcgcctgtgttcgagagaccactgccggcaaaggtgttcagcaaagcacatatcaccccgcctcttcaacccgcgctcccgttcagccatcagcatcctcgtctccgaccctctggtgctggttccttgaaatctatctcggtacccaatctcagatctacagctgcccaacaggcctcttcatctgagatttcaaacacgtccgaccggcgcgtagaagcgtatcaggcggcaggcacttgttcttcgtttacctttcctaaaccaaaactccaaccattcttgatcactccgccgacctcacccaatgtgagtcaagttttgaccgattcgacatcttcccacgctctagctcaaaagagactcgcaaggaaacctgtgttgagggaagatgtcgatctggatctacaaaaagtacgaagcacggatgaggcggctgatgtcaaagctctaagggagtgtgcggctcgtgataaagagaggaatgaatgggctcaacttgctaggaagaggggtatgtctagatcgattacctcagtgggaggcatattaacacggactaagagcgcttccagaagggacagaaaggattcaggaatagggtcttctgttaggaccggatccattgacatcttgcgaactccgagggagaaggaggagtggtcaaagggtggatctgaagaggaggaagcgcgtcggccaaggaacgggagggtcattcatgttgcaagatccatacctctattcgaccctccgtctgtccctccgcctctaccgcctgtcaatgcaccaaatttcacacttccaaaccccccggattcaactgatttggcagccttccgtcctccgatcacagatactaattcttatatcacaccatccgcaagacttgaagaaatcggcttggcgatctcccctacagaatcatcattttccttgacgtcttctcagaatcctatctctgttgaatatggcaaaaccacccgtcgcccatccatcaactctcagccgagatcgtccttgcaagcatggtatcgtcgatttccgcctcctggtgctagtccaaccgcagagtcgccttcgtccacgtcttcagcacccggaattgctggttcaaatagtaacgtgcctagggaaagttggcaaaagcatttggtcacaagatcggaacctccatttgcgtttacgcctagtttgttggagttcacccaggctgaggatgtcgacaacggagaagacaatcaaaaggcttcgttctctgccgacgaggagagagaccaagaacggccagttttaggacctaggctctcgacgagaacggtggcacagaggcttgccaattctagtccagagaagaacttgcgggtagtcgaagtttgtctgctccctctttgcttttgtgtccaataaaacattggtgttcattcgtatttggttctttttctgacaagggcatgtttttcaagccgatctctcctaatcaaagtactgggtcccttcaatcaaacgaatcggcttcttcgtcccctgatctacaaaaaaattccccggtagacgatgattcaattggacgagctcgatcttcgctcagcacactatttaccatgaaaggacgtggaaatcagagtcatcagtcaatcgtccctctaggagctgccatcatgaatagttagtactcttcatcgtggtttatcttttgactccaattagggccacgcacgcgtccggacaacactgacactacgtctcactgtttggtatcaatcgtccgtacacaaagattctgacgaaagcagacctacgcttcaccgcgtagactctctccgtagcagagctctcgtatgtcgccgtctatctcggcattctcttcgagccgaactaggcgaaccagacgacgcgtctcaagagatcctttctccgactatgatggatgcattcccgactcctccaccgtcgctcctccataaggactcgtacacatcccaatcatcatacactactgccaggccctcgattcgaccgacgccatcgtctgcttcggtgtttgactgggcgggtttagcagatgtggaaactggagactccaggtttaccaacacgggtacgggtataggtctgggcatgggcatgggcacggacgtgtatcagggcagagtatctaccgaacaatcatcgcttgaaattccgcctctacagtcgtgggaatcatttacatcggaagcatcattcgtgaccgctcaacaaaattaatctattcgtacttcgatgaatacgaggagagaaggaagattgacgattgccatactctagaattcactctttcttctgctcgttcatcgccgctaattacctcgttttctctagatactgctctctccttctatatagtttgccttcaaaggaaacgccattgaattttgaagtctgatcatgtcttattctttccaatctctcgcctcttatgtccttcttgtttgttcgttctcttttgatgttgatgataccatcagaatcaaggctcttttcctatcttcattgtatgtggatcttgttccccgcgcgcttgttttgacacttcttctctatgctagccctgaagtctttcgctctttgttttgctgtcctttcctccttgctattcttattcttgcttttatcaatacgtaactttggttctggcttcttcattcttgctataccattgtgttctgtaactttctccttcctcttctaaagacgaaagtgtactcaaaattggcctttcattgctgataatggatacgcttgttctggttcgatacaatggcacgttgtatctatcttgaagaggaagatgcttgctggaaagagactacaactctacgatattctttaggaaaccctccttcctttctctcttctttttttttcaacccaggatgacgttccaaaagcttgagatttacttcttcccaggactttcccaactcaaatcttcccatccagtcttgatgaacacctctctcactttcctctctgcctctatcctacttccatctccttctccttcattccctgtgttagcaccagtagcattgacctccgaccaaactctcacagcttgatgaatctcttcttgattcttggcaccgaccaatactggcaccttctctccgttcagcccgttcaggtttctcagaccaaaccctaacgccaggtcgaccgcacctcctctagctgaccagagttctcctgctagcttcccagcctggcgagcggcttcggctaaaccagcattggccggattcgaacaagcaggatgccaagcggggggtccttgagaagagagaagacccatgttgagaggagaggcggtgagaagtcgaacggaagaagggaaatgagggagatacgacgaaaatgcgtcgttggcgaggttagaatgagagtaagatagaattgtggtgagctcataggaggaatgagcgcggattaggtatgagagccgaagaaggattggaagagggtagcctaaaccattcagcggaggatcatcagaccgagagtcgagactacagatacaatgcgaagaaaacggggtagattgaaccgaccacatatcccgatctccttgatcaacccttcttccttgagtcttcccaagacctcgaatgctttcaaaaccttggcatcgccctcacccaggatttttccttggtcttccggggcgagacccatagattgagcgacctgggtatagctaaaagcttctttaggtcggttgggtttctgaagacccggcagtttgtctgctataaactcgacatcgtgcaggtctaaatcaccagagcaaccagagcgtgatcggttattgaccctatggtatgagagcaaacgataggtttagaaggtgggacggagtaaaaaggacgtacagacaatatccaggtattcacagcccagtctgtccaagcttcgtctcacacttcgttctatattctcaggtgaatagtcgaacccatcggatgagtactggccgcatttagtaacgaccttgtatgtgtttctcgggtattcatctctgagcgcacgcaaacaatttcccaagacgatctctgaaggatgataactagatagcacaaggtcacaaaaacaccatgagaaatcctacaacaaccagagttcatacatccgaacgagattcgaagagaaagaagaggacagactgtgggctcgtgtcgacgactctgattccgtacttgaacgccaagcgaacggtccgtaagggtagcgagagctcttcttttgtcaccgcctgaggagcgtagatcccccatccaaacgtcgcacatccaagaacgagcggactccatccatctacagtctaggagatcccaaacagagagtggttgtcagcatgttttgcaagtatgatgaacagtaggtgagaaatagtagactaaccaaaggaatcggcgggcaaacaagctcatcggccggagtgagatcaagggaggcgagaggaacgagcggaatcaaagggtctggatatctgggatgtgcgcctgagctcattttggatgaagagccagatgatagatcaacgaacgaagggaattagacgaccgatagatcgatagaagcagacgagatgatggatggagaggaataagcggattcagccgaaagcgttttcttccatccgaacatccactccgccaggtcagagcagtctatccatccagccagcgggcctcttcctcgtcatgtcaaagactcaggtgaaatccaaagaatcttctggtcacacagctcagcccagaacatatcgatatattcaagaaatctcccaaatggtttgttttcgctcgggaagtcgatagcatttagacttattttgctcatccggcatctttcgcttcatttctcggtacactcagatgtttgtggctggtgaagttcaggatccattggtagacactgttcgtcaggtcgaggacatcgtccgcggccaagtgatcgaacttgtttgtcttcgcctgtctctctgcacaactgccggttcatatacacaccactgatcatcatcaacatgtacacatacatacacaaaacaggcaatcagagctcgccagatcgccgctcgcagagggtccagaaatctagcagccgaagatttgatcttcttgatcagagatgaccgagctaaagtgaacaggttgaggacttatctaagttggaaggatgttcgaaagaatgcaaaggacagtggaggggatgccggagcaggtgtcggagcaggtgctggaggaggtacaggtggagttggaggtacaggggaggaagagcctggagaaggagacggttcgtttgacccgcctccttttgatcctatgcttacaagactgatcgtcttgccttgtacgaatttttggactacctctagatgcgctaaagtcaaagacacgacagaggcagatcgtgaagcttccctgggaagtcaccacagtttacgccgacttccttcgacacttcaaaggagctcgaaatggagcacgagcaaacgtagatgacgaggagagtgaggaggatgaggatgagctcgaagcgaatgaggacatgcttcaacgattgagggtaagctgcgatctccttctcatgattcgtctcggcttgccaagaaacggaaaggcatcaacgtttttcgagtccgccggttgttctcctcatctgtcaaacaggacgcagaccttgtcacaaaaaacatgtctagggaagaatattctcactactcagattgtcggcaggctagttttacatatcgaaaaggtctgagtttgttcatctttcatctattgaacccgttactggtgagagaagacgatgggcggtgtctcatttctgcctttctttgtctttcctcatgaagcgaagcgatttcgggaatttgtcaatctgtctgcttatctagacgtgaaaccgaacgacgacattatcgacatcctcggtttcctctgttatgagatggtccacactctttgcacatctgctcttaaagtgaaggagatccattctccaaccccagcagattctctacctatcactctcctgcctctcgtctcttctgcctctaatatccacactgcttcttctaacaccgccacaaatacaagtacaagcgatcatgtggatcatacaccgatccagtctcaaactcttcctgatccaggagcacccgctgtcaacccactcaaacgttcaatatccagcacgaacatttcctttcccaacccatccaccactactaccggtgcttcttcctccgttgtacctccttcaggctcttcgccatcaagaaaacgaccgatgacagccaccgtggtcacgggtgcgaccacgaccacaaccgtagtccctggtggaaaaccagattcacccgaaccggcggtgtgtatgttgttcgaaagacccagtcaggcacgaacagctctgacacctggacatatcactgaggctttcggaaggattcaggagagtcaaggtaggttgaaaggtgttggggtaggaaacttccgaggcgctggaccgggtagaaggagacttgttctgttttgaaagcttctctctttccatcgttgtcaacatctgatgttctctctatgccagttaattatatatgtttttcctctttcttttttttcttactcaagagagaatggaccgaaagatgagctgagaacagacagtgagacacattatgatttatatagaagccactactttctgatgtataaggtagataggcaagaagtccgtgataggatttgttagagataagagaaggggtaattatgtaacaggcggtggatagaatggataggaagacaactagaatacagttgagatgaacaaaaacaaacgaccgagcgtctgagaagctcacctcgataaggcagagaggagaagatatattgatacagtaagatagatcagagccgaagagtagatagaagatagaagagagaagagaaggatagacaggattaaacctaaggaaagaggatcaagagatagagaggaaaaggaaagataaaaaatcatctagaagagaagagaaagagagactctgggtttaccaccatcgtcgttaagcaactgccgaggaggcggctgaggcggctacagaggacggcgctgcagaggatggttctgcagaagaggcagacgatgaggcagacgatgaggcagacgatgaggcagacgatgaggcagacgaagaggcagacgaagaggcagacgaagaagcaaccgaggaagtgactgcagaggaggaagcaaccgatgatgcgactgcagaggaagaagcaaccgaggaagtgactgcgctgatactggaagccgcggagctgatggttgaggtagatttgaagacagaaatggcgtaatgtcctccacacatctcagtactatcacctccgcaagccatgttgcagttaggagcggtagtggtggtggagagcgaagatccacagtctgtgttgttgtttcggtttttcgatatttatgtaaacaaatgacgtagaaagacttggtcagaaagaaagtcctttcaaccgagacaagaggggagggaaaaaggaataaagcgatactaacagcattgagttccgtctgttgataaacaagatcggtagtgaaagaaatgacgaagcggattagcattgattgagaacgagaacaaaagagcctgatcggagaaagaaggaagaagaaagacgtacactcgactccggcgtacatgtatccagcagcagtgcaagtactagaacacttttcgatggctaattaagtcaaaaaagatacaagcattagcatacctactttcagactgtcgagacaaactagacgtgaatatgatagaaacttactcatatcgtcagtcgaggaactagttccagtaagaaccctgtcaaccgaagaaggatcagagtagcaaccgacgtattccattccggtaggcgcggagatagtgacagtggatgcggttccttcgacgaggtggtagaggttagccctgtaagttcctccgcaagagacagaagagtctccggagcaaggggtattgcactggtcatcggcgacagagacaccaagaccggagacgacgtcagagccgcacaagcattgggagtagtactcggtggcagcgtaggtgaaacccatagacaagcaagtagcaatgcaagattcaggagtggccgcatcaatggttccccagtaaccagaaaggagtcggacatccgagtcagtcacacagccaagatcggaccaggtggtagctccagaggtgatcgaagccttggccgaggcgctagcgctaggagtcgcactcgctctcgcactggtgctagtcggggcggcactcgagtagtagccggccatggcgctggagtagtagctcgcgctggcactggcaccggcactggacatggccttggaactagacatggcactggaccaagctttcagactctcactagccatggcactcgagtaaccactttggacagcacttgggacggcactggcgctagggtaaggaccgaggctggcagaagcgctggcannnnnnnnnnccgtagctggggctggcagaagcgctggcaccgtagctggggctggcagaagcgctggcaccgtagctggggctggcagaagcgctggcaccgtagctggggctggcagaagcgctgctactggtaacggcagccttgatgtatttgtacaactggactctccatgttccaccgcaggtcaagctcgaatcacctatacacgagaaaggaaaagaatgaacggttaagaaaagaacaagtataagagaaagagtgaaaaactaactaaccggcacaggccatgtcacatcccgaggaagcaggtccagagctggcagtgctgaccaagctgtttccacagtagcactggtttccgtctgaaagatgagaccaagaaccattagcaaagagtatggtgggacagaaggatggcaagaaaaggaagatagagatgacgaacattcgacaccggcgtacgcgaacccggcggtcttgcaagtagcctggcagaactcgggagtgtttgcgtcggtgaaaactgagtaaccctggaggacgtaggaggacgagtcggcgtagcagcctattgcgctccattcggaaaccgaagtgttggtgctcgtcgaaggagtagtggtgttggtgcaggtctgtgtgctctggtagaggttcaaatagttggttctgtcgaagagaaggggaagacacgtcagaattaaggaagaaagtattttgaattgggagtagagaaagacgcgtgtaggacttaccctccgcacgacgtgctcgagtctccggtgcaaggcttggcgcagttggaagacaatgtaggctgtcctccgctgttgcctaacgaatcggcacagtagcactcgttaccatctaagggaaaggaaggagatgacccagagcgcgtcagttatagcagagagaagccaagggagagaagagaaggatgtgagaatgacacgacttacactccaaaccggcgtaggagtaacccatggtagcgcaagtctgaagacaggccgggatggtgagactggcaactccctgctgggcgtagccgacgagagctcgagttcccgaagttccctcggtcacgcaaccaagatcggaccatcctgagtaggatgccgatgcccggttctgaagcgcaagtgctcgtgaaggcggcttggagtgacgtctggatgaggctcctgggtaggcggcctcgaccggcacggaggagagaaggaggaagaggaaaggaagtgaagtgagagtggagagggagaacatgatgaagtgagatatatgtatagtaagataattaagtaggtgaaccaagttaggttgggttgcgtatgggtctggatatactaaatctagtccaaaggtaggaatgagaaacaagaagagagagtggcgatgaggatggagaaaagagaagaaggaaggtggtaagaaagaagggttgcttatataggagtaagaacgaagacaatgtggaaggggatcgaaaaaagcaggtccagcctggtgaaggtcagtgtcaatatgtttacacctcaccctccgataaaacaaagacaacaaatcgatggtaggagaaggagagagaatggaaggaagaggagagcggaaaaaccggtaaggttgtgccggagcgaaagaagcaaggcaaggcaaatggataacaaggcggaaaaggtacaacaaaaatagatgaagagagtgaatcctaatccgtttcgagcgatgtccaaaagtcaatgaagtgagcgcgaaagttgttccagatgaaacctgattgatccagaatggaagaagaagaacagagaaagattaggtacgatcgaaacagaaaagagaaccgaagcggcggcacttgaccggacagagagagcagattgacgatcgatagttcgatcaaggtgaatcagtccaaacagattaaaaacatggcacacaaggagaaagagtttggaagtcaaggaataaaattcgctgacacgaacgccacgtacaagatacagaatagaaactccattggataaacaagatggaaacctgtgatggtcgtttgtttatgcccaacagaactttccttttgcgacaatactgagtattactccactaggcatgtttaacagtagggtgtggtggatggctgcatatccgcgtgctgaggtgcctgagtgccacggcatgcatccgcttgcttgtgctggataatctttacggtttcgaaataacaaagtctgaaaaatcccaataggattaagaacgaacaacttcaacacaaggagaaactcgtaggaacaaacagagagcgtcaaccgaaaagagtcaagataaacagagcagaaacttgagctaggttcagatcccagacagtcgtctcagtggagtgtcgatcgcttcttgttaatccgaatgtttggcttccgaccgcgatgaaccgcctgatactccgcagtaaacaacatgatcttccgccgatcggtatattgattaaccttgtcaaaatggtgtggcacgtgtgtgctgttgccacacagattttcgatcgttctgaacgttgcgtacagcatctgttaaccctaaccatatactgtcatctctcattcatctcacccagccacaaaagtccacacgcactgacccacgcctatacgcacgattttatacggttcctacacccgctcagagacgtcctagttggtcagatctaggtaatgcgttttcgagcagtcgtctcagaggtctcaaccttcgtgcagatcgttcagtcgatctccaaactctccaagaaatgtatcctcaagttttcagccgacaagatgcatctcatctgccacgacgagaccgagggaggcgtccaggtttggaggtatgtcatccgtggtagtttaaagagtcaaagatcctggctgatagatatcccgttttggtttggctcctcggttgatctttcttctgccgtcttctctttcgaaaacaaaaaaacaacaaaaaacaaccttccccatgtagccaggtgaatcaggtgagctcccgtgtcttttgttttctcacctccttgaccactcacagctcacaaacctactctgataggatttgattttttcttcataccgaatagaatccaaccaggcaaacgagatccatatctcgatcctcatccagcccctcctcaccgttctcaagtccgccctcgcactcgaaggcaaaggtgaggtggtggtcaagctggcgaagcgacctgttggtcaaccgacggctcttaccggtagtgaaccgggtgcgccggcggtgatgaaaccaatgctcgtatgggaaattggaggcgatgtttgtccttcctcttcctctgcctccttcttctctctacaagatcacctcccttctctcttttgagtgccttgaactcaggactgataagctgaacaaggcgttaacacgttcattcctttcatacagtcgcggctcaaccgaccgccgccgttatctcacgagctacacatcaaagtactcaagacaccagaagttgagcagctcaaagaaccgttatgtcctgaacccgacgtgtgtccttcatgtttccctcctctatagctcgtcatcaagccatctattttgacgcgtctctttttctcttctcaaaagatccacatcgtccttccacctttaagctcgttgaggacggtgacagaccatctttctagactgtcttctcacgtatctgtctcggctaataacttgggggagctcaagctagaagcaggcagggatgaacggaacggcgtcgaagtgagaacatcatggaaaggtttaaacgtccccaaaggtctttctcctctcatctttttatcagtcatcttccgttctgtccactttgcaagttgtcataaccaactcaaataaaaacatgcctccttgtaataaacccaatatagtcaactcagactcccagtcaacacaggataggagtcaacctcctccaggccacttcttcaacacgctcgtttcgatcaagtctcttctccgctttctcaacgcccattgcattcagggctcgacgatcgcctgtttgtccttccgatgtggtgaactatgagaattcaacatgctcacttaaggatcgttcctttgtttgatttgtctatatactataggtatatgcgagaatcattcgttgatcatctacttgtacatcggttcgttctccctcacccgtgcattcctccctcttatcttattctcaccatcgttgtcatcgacttctataccatccaggtgatatggttcagaacggaggagtccttacgttcttcataccagccgtgatcttggatgaggacgattgacttgaaatagtggcgagatagcgacgcgaatagaacgcgtcgataccatgaagactgacatgtacccgacatgcaagggaaaacgccaagcctagcaaagaacttggcttgggtaagctctgatggtttcggatctaccgcattctatcgctgcttcattacttgtactgtttgcccagtaaaaagaaagaagagttggttcccaagatatttctgaattatatgtttgtatgtgtgtatgccaagaatatggtggagtttaacgaccgcgcgaacagatagtgagacacgcgtgttgccgttcggccgacgtgactccgtggatcggcacacttgatggttacaccggcttgatcgactcgccggctccggcccgggagataagcatggccctggcacgaaatctgatgagatcatctattcggccggtctcttggcgtttccttcttggcaacctccgattatgcttcctacccttctgcttcttggacttgcgcactctccctcttctctttcgttactcagatacattggcggcaaagcatatcatgggtttccttgggggactggagggtatctctgatcgaagttcgcctgatataaagagccttatctcaggtctaggagcattctttctttctctcttttccttcatcaatctttgccacaatattagtcggatccctatccattcctttccgacataatcaaatatcccaatcaatctctagcgtaaatagagaacgagcacaactggaatcaaccacctcttttctctcttcccaacctttgcctgttcacttttgcccgtctttgtataagaaagaacagaatggcaaaatcaacacaatttgtagcacctgccccaccgcttcccggtcccgcacatatcaccttggcagaagatctcatccatgctcttgaatccaatatccaatcaggacttcacgagtcaaaagtcaaagaactacaggccgtttatggcccaaaccagataaaacctccaaagcctccttcggtgagtttcttgatccttggcctaattgatttttttctttcgatgtttctttacctttcatttctagatgtcgttatctttgattcatctgctctcttaagcttggcttttgaaataacatggttctgtagctgatcacaaagcacttcatgatgttgtctacattatttctatcgttgcccacgttcatcttttgcacggcggaaaatgatcttttcattctataggcgacaaagctcctgctccgacaggtggccaatgcgatgacaatcgtgctcctcatgagtatggctgtttcgtttggtacgcaagattggatcgaagcaggtgtcatcgccgcgctagtcatccttaacgtctctgttgggttctcccaagaatggaaggccgaaaagacggtggccgcattgtcatccgttggcagtccagttgcggaggtcatcagaaacaagaatggacgagatggaatagcgtcaatcattcaggtcgaggaggttgttccgttcgtcccgttcttagtgttcatatctatcgtacagctttcttattgtgccgcggctaataaataaccttttcacgcccccctcctcgcaaatcttatcaactctcttccaacagaggagatatcatattgctaaaaaacggcgatgtcgttccagcagacgctcgggtcttgcccgagtacgtgtcctcgttggagaccgacgaagctcttctcactggagaatccctgcccgttggtaagaaagccgatatcctagatgttcccgactgcccggttggagaccgaaagaatatggttcgttcatgctcttgtctcttctaatggtttgttgtggacaaagctgacatctctaggacttctttactaggtcttctccggaagcactgtcaccaaaggccgagctagatgtctggttaccggaactggaatgaacactgagctcggaaagattgctgaggccatggaacgaaaagagacgatcaaagataaaggctggcgagcaaagtggtacaagttcaaagtcatcatgggaaccgccggaacatccaaactccagatcaagtatgctctcactcctcctgtttgccagatcaagaacaaaaacaacgcaccttatgatgtctaactccttctcattgtttttcttcgctcctttcttcctgcgataggctcaacaagctcgcgtatatccttctcggttgggcactactcctcgcattcatcgtcgtcgccagtaccggatttagtgacattccgttctctattgccagttcgtatccacgtgtttgattggatttccttttcctttgttaaagacacactagcgttaaaactttctaacaactttctctctctagcttatgccgtcgccactgccgtctcgattctgcctgcctcactgattgctgtcgtgtcacttaccttgtcgaacgccgctcaggagctttcgaagaggaacgcgttggtcagaaggatggatgctatcgagtctctttcaactgtgactgatatctgctcggataagactggaacgattaccgtcggaaagatgggtacgtactttggcttgctctcccagttctagttattttctgactaacgcatcaacgccttctatttctctctgtgaaaacctagtcgtcaagaaggcttggattccggccgagtcttctttccaggccgacaagagttctagcttgatcgacacaactcgtgggcaagcttacaccgccgagagcggatctgagtatgttttctcttcgtacctcttctattacctctctgatcttatcttaaaagtgccaacgcacctgtttgccgttttccacgatattcttctaaaagcccgttctatcctagaggattggtccgcgcacttcctcgaattccctcccggaaaaacactcagagctcctctgatacccaacttcagctcagcaatgatgacgatgatgacgacgagatggattctgaggatatcgttcgaatttctgagattgaggagaacttcaagaatttggtcttgtgcgcctcactttgcaacatggcagttattcataaaggagacgaaggcaaatggcaagctagtggagatgctactggtatgtctccctttcaggatttattagtctattgtatatggtttctttcgctgaaaatcactcatgcgtgtcttttgtttggccgacgatatctatagaaatcgcgctccaagtatttgcccataaacttgggatgggtaagccacacatgacccacaagaggcatgacaaatcccaccaccacgatgagctcatgttgaacactctggattctcgaacggatgagactctgaagaatcacccaactcaggtccctggaaactactcgatggttatcgagcatccgttcgatagcactgtgaagagaatgagcactgtgagtttctactgaatactcttaaaacttggacggcagccagtggaacctaatctctactcaaaccttctcacaccatctcttcaaggcctggaaatttgaagctctgaacgctgaagaatctactcaagacatgttcatctttatgaaaggagctgttgaaagagttctggatcgatgtgccttcatcggactcagccccgagaatcaggtcaagctgaccgacgaaaatcggcaacagatcattcaccgaatggataaggtcagttcttctcatgcttctcaaatcttcactggacaaccttctgaaccagtttgggtttgacttgaaaatgacagcttgctgccgaaggactccgagtcttggcgctctctggaaaactcgtacccattgcgcgagaggccgagatcaaggcaatgccccgagacgaactggagaccggggtttgcttccttggactggctggtatctagtacgttagctatcctcctaaaaacggtccaaatttctggctctgatcaacgtcgtttcttttcttttgcctttagcgacccaccccgacctcaatctaagggtgccgtgttggatgccatcaaggctgggatcactcctcggatgttgaccggagatcatcctgctactgccaccgctatctccaaggccgtcggtatcttgaacgaaacctcaccccaaaactgcgtcatgaccggacagcagtttgatgctcttactgaagatcagattgacgctttgcccgaacttcctctagttgtcgcccggtgcggtgagtcatgccgtctttccgatcagtctgccgagtttggatctgatcttgactctttttttccttgatagctcccgatacaaaggtacgaatggtcgaggctattcaccgacggtccaagtttggtatgcagtgtacgacaatcatgactggagatggtaagtcatttggctcagtcttgcaattcaaacaaaagccaacacccgcattcccgccttgtttctcttgtaggcgttaacgattgccctgccctcaagcgagctgatgttgtaagttcagaggaaaaagtctttaatcgtgtctcgttttggtatatctgattgctcataatctcctgtttgtcctttcataggggttcgctatgggagaagctggatctgatgtggccaagggagccgctgaggtcgtgctgtacgtattccttcttagttgtcccattcaagttttatatcaatcacacctgaccattcttcatactcttgtctatcatcaatacagcgctgatgataactttggtaagcctcaaaccgttgtcgacacccctcatatatacatgcgcgctgaattactgacccttgtcttgttctggggctcctacagcaaccatcatccgagctattcgaaagggacgaggagtgttgacgaacctttccaagttcctcctcttcttactatctggaaacattgccgaagtcttggtcctttgtatgtattttgcacctcttccttttaagctggcgacccgttcaatcaatgtttgctgatcaccagggtttattgtttcttagtggtcggtcttgctttcaaagatcctaccggaaactctgtgtaccctctttctccggttgctgctctctttatcaacacaatttgtgccggtccgcctgctttagcacttggtcttgagcctagtatgtagcttttttctttctttttcttttgatcgtctccctagtctgtattcgttattgaccgaccgcttccttaatcacttccctccttccaaatcactagccgcgaaggatgcaatgcttcgaaacccaggggatttccgaacgatatttacgaccttctggtggctcgacttgttcttctatggcttccttatcggaggtctaacgatcgtaaactttgtgatcgtcgtttggggtaccgtccttaacggcgggaaagggcagatcggtctggaatgtaacgatgggcattacaacgcttctcaatgtcaaaacatcttccacggacggtccgccgcgttttcgacgttgatgctgcttgcgatggttcattcgctagagtgcaaatcactcgagaagagtatcttccagatgaagctgacggataacaagatcctgctctggtcggtcggaatctgcagtctcgtcgttttcccaatcgtctacatcccagtcatcaacgattacgttttccagatgtgagtatgcacctcttctcctcctccctcctggagagtctttccctcaaattttatcagagacatgatagctgacggttcaattttggggcacgtatggatggtctcaatagtgttggaatgggatgggagtggggaatcgtgttcggcgcgctagtggtctacttgcttgctaccgaggtttgtctttcttctttttgtgtctcactcatccaacccaacatccgctggcagggaatgaaggaaaaggaaggctgactagattctggatgttctttcttcttcttcttctcctcttctaaagatgtggaaactaagtagacgaatgatgtatccacttccagtggccgagctcgagaaagacggtctccctcggttcgatacgatcgctgacgagaagcgataggccgtgtttttctttgatcgactcttcatttcctttcattcttttgggtggatcttttgtatgccctgtttgagcttctattctatctctggatcttatccctactattcctttcttcctctctctcttcttctttcctttgtattcgttctctttattcttcattctacttttgaacttttatttatctggttgtttgatcattcgcataaactcaggatgaagaacatcctgagatctagtcttcaacaaactgtgtatacaacaatgcatttctcccaactgtctcttctttcaagtttatttgaatcatcaatcgtcgaccactgtttgtcgtcgctcagagagaaagaaaagaaacgatcagaaagatgtgttctgttccagcatcagtgctttcgcctgatctggattctcatgtatcgattttgatctattctatctgttgatcacgagaagcacaaagtacaaagcacgaacccacagggcactaaaaacaacagaacgagatgagacaagatgtgaagggtttgaaaaggaaatataccgatgttctagattactatgcaacataggaaataaaaaaagattcctagagtagaaaatataaactacacaagggaatgtgatgtatacagcgagtgaatgaagaaagaaaaaaaaaagaaaggaaaataaacgatgatgatgatgtctgggaataggaaaccagcacgcacgaccttagtccctcactcaagccttagccttacagacctcctcccaggttccccacctagcggcccgttcgtccacccaattgatgaacgtttcccacttgcagctttcctctataccgtcctggcagccacccatgatctctactttcccgttgacgacacatctcacaaacttttctttcttcttgaccaaatcgttggcgtcggtacctttgggagggatgtactcgaattgttcgagagcgatatgtccaaggaaaggaacgagatggcttgtcatccactgtctgtcctctgggatcctatccaaaggaggatcgattcccgcgctctgaccgattccaccttgagcttctgttcggttgtagaggttcaagaacacggacgcgaaccctggggattctctatgagtaaagaacgggtggagaagttgagtatgggtctcattcggaggtagctttggtatagggagtggccgagtcttcggccttttcaaattggaagtcgatagcgaacgaggggaggtgatgtagaccgagtcggcctcggccgtcaggtgggattcctcgccggcgagtagatgagcggccgtccggacccaaggtcgaccaaggtaaggcgagagtgagtttccgtaaccctgaagaatagagacgagggagatagttcagagacattgacgagtcaaaagataggtgtacatgagagaacactagttggttctctctaaaaacatatgaaaatatgcactcacaatcatgtagtggtatcggatgtcaaagtaatactccacggcgagccactcttcgtctgtgaacactttgcacaggggggaatccccctggccaatggtctggtacccgcagagcatctgcatagcgagaatgtccatatcgacgaatctaccggcaagtttctcacccaacagcctatcatcactcagtcgagctctagtctttgctgcgtacaccgcgagccaggtttcagctggtttcttggaggattctttttcgaacgcatcgcatgccttgtggggtgtcagcgagcgctcccaagacttttcatgatttggaacttcgatgagctcgacctgtctggtggtgggagagaggatgcaagaagaagttaaaaagtcaggacgctgggttcttcagctgagaaggtggtagggaagagcagggagtgatgctcgtaaggagtggacctactctccatcaccggttccgtccggcccgctctgtatggtgggaaaggcgcctctgatgtaggactttgaggtatcaatgtctcgagcggatgaagctgaccagacctgagtaagcgaagtgattaggaatattgaaacaacgatcaatatgaacacaggtatccctagggcgcaccttgtaagacacacgggtcgactttcgggacgacgatgacgatgacgacttctttttgatgaccggggggaacaaagatccatatgcgcttctgatcatctttccgaatgcctgagtgatgaatgatagaggaggttagatcaaccaaggccaggagttacagaatgtaggaaaaagaccgacataagaatcgtccttgcctcggtcggacagcacctcgaggtctttgcgggaaatgtgactcttccaggtgtttaagaagtgccacgggtgggacttatcctggggaaactcgctctttgggatctttttgagcttgtctacgaaaggcttcattgtttcgtccctttgagaggagaagaggaagagaacgaggaaggagaagaaaagaaaagatcatcaggacacggcgagcgagctactaaatggagaagatgaacagacggaccactcttcgtcatttgcaagaatggcagagtgtctaacaagcaaggctgctcttgtgaggttgcagttttctggcagcgaagccacagcctgttccggcaggaagaacggcgagattgccgagaggtctggacagggggaaagcgagagaagggaagatgaggcaggagaaaaaaggctcagctccaaagggaaacatttggcgatgagatagattctactcacgagtcaagggatcgatctggttatggatgtccatcgggtgtgatgatttgtacttgtcgggctgaaaccagaacggcatttgagctgactgctgagagttgagcggccttgcctgggcaattgacccgacaagcacggaggacaccccaagggcgacccagggtgtggagggtagcataggagagggtggaaaaggtgatgggacgagagagcgagtgtgcgtgtattgagagaacgacgaggacgaggtgagagagggagttagagaaagaacagagtagaaaacgaaaacggaagaatgagaaagtaaatcgatcggagggatgacgtcaggttggctcggaaggggggttttgtcagggacgtgacctgagtgttacacctcgggtaaccttcttttggttctgttgtttctcctgcctcggtattccttatgctctctcattacatcaacatacaggtatatgaccttccagcgcaggtgcttctagcaccttctatgacctgttctattatgcataatcattggagtctaaggatgatatataagacgggtccccctttgccacccatagcatagtctaccaagcctgaa

SEQ ID NO: 863 - DNA, 4693 bp, Xanthophyllomyces dendrorhous
cattgttgtatcaaccttattcatacgatttccctgccttgcgctctcgtcacagtcaccaagctagagagcctgaacttccttcttgccagccctattccctgccaggttacattcttgtaacctctccgttaccctctgaacccggatcctgacagtatccctgacaggaaagctgtaaaagtcacatttatcacgtgcatactgcgcagctgtcgacgcgtcaagcaactggtcgcaagcgcgtcagacaaacctgcgcggccacgcgccacgcgccacgttgcccacgtggcagagcgaggcaagaaggaaaagacaagaagattcccctggacgttgtttgtaatggattttttttcgtgttcaacagtgcgccttggttgtactgtgagggtggatgtgcagggagtgtgtagaggatgtacagagtgtgtgaagagcgtgcgaaggggctgtattgagagaacaggaggggcgtgaaaacactacaaaatctctctagtgcttccgtagtctggccctaagaactccatagtctggctgtaacacgctcgcccccgacgcttatctgccggtcgctcaacatccctcccgttcaacatcaacctcaaccttccgtccggtttcggtgtctctttctttttcttctttcttttcatccacacgcacacacgcacacactcgctcacacacacttcctggtcaccttgatagtcaagggaacatcactctttacaaggaagagaaaataacatatactttctcgctcgctcgctcgttcagtccctctgcccctgcccttctctctcctctgtttatcgcccgtccttcctttttcactttttaccttcccgctttctcatcgccggcaaagcacatttggatatacacacacacatacacacacacattcacacatgtactcggcatatctagcatccggcccatcctctcctccatcctcagactcgtaccatccgatagacccaattaacaccgcccagccgaccgccctgcttgatagctttactccttcccattctttcaacgacactcacctcgcctactcccacgagcactctccgatgcccttccatgaccacacccatggtagttcgcttggaagctctcaccaccccatacaggctccttcacagtctctgagccatcggccgtccgttgggaacatcactcaagcttactcgacagccgcccctccccagtacaactcggaccattcgacgttcggccaccagcagcagcaaccgcacatccatactccagcgttcgctgcccacgagtacgatcaacagcaccatcagtcgatacaccagcagtctctccatccacccagccaccatcagacgtatcgaccacaaactctcacctacgacacgcatcccgccggtcagtcacagccagctcccgggtctacctcgctccccaacctgtcacctcaagagttgaccccggcttacgcccatcactccgagaccatcaggatccattcgtatagcgctgccttcagctcaacagatacctcctcgtcctccaatcccccatcgtcctcgtcctcgacgtcatcctctttctcttctgctctaacccccgccccaaccgtcctcaacgtcaactgcactttgatcgtctcctcgagccagacggataacaagccaaagatcatccggctctgtttcgacaaactcccactagctactcatgtcgccagggcacccattccgtcagacaggcatccggcctccagaccggaagaccaggatctcatcctgagctgcagactgccgtccgagagtgagcgtccaacatacaacccacattctgtgaacctcttttgcgagattctcagcagagatcaacctggaccgggggttgtgttggaaagactttggtttggtacattccagtacgcgtccaacagcctcaatcacatggattctcaatcgacacctggtgcgttctcttcgcgttctgcctgtaatgtttctatgcccctctcttccccttgttccttatgttatcccactctgatcttggtttctcctctcctttctccctatcaaaagcttcggcgcccccataccagacatcgttcccaaatccttcagtcgtcaacgttcatacggaccctcatccatcgtcatcgacttactcatccagaccgcctagccggacgctaaagactcgacattcctggtcccccatctcccaatcaaacatccagcgccaacaacaacaacaacaacaacaacattatcagcagcatcagcagcaccagcaccaacaccagcaacagcaacctcactatcaatcacacgaccgcttcgagttctcgcctatcggaggaccggacgagcagggagaatatctaaacgtctcgtcagatgccgaacggttaaataccatcgaccctcatgcttattcttccgacggtcagagtacatacacatataccccagattcgattgaacaatctcaatcgcaaacacaaccccagttacattcccaaccaccccttgtccttcagccggtcgccccccagccggcaagatacaacatccatccgactcatcagtcggcttcgcagaccatgttctaccgacctgtcctctccaacctcggacaaagtaaacacgatcatcaagtccatcaagtctaccctcatcaacagccacagccatcctacctctaccctaatactcaggcccaggttggacccacgccgtcgccgatcaatttcagacagaccagggtggctccaagggacaaagacagaccgttgaactacggaacgggtgtccattcggctgccgctggtggcggaaggaaagccgctctcgaagtctatggagagttgagcatgatggctattggctggtgagtatccttctcttgttcttcttgttctcgtttttcttcttgtccctctcatgtctgggcggatcttagattggcactaacgtcctctctcaacgtcttcctaggtctgatgaggaatggcaaacgtccagacgactcgttcagttctggcgaaaagtagaaggccaaactatccacgtgacgttctcacccatcacacaggctcaatatgtcgatagttcgattgtgatctcttgtatctggagagaagataccaatgattgctatgtacgtctatttttttatacttcttctccctaggttatttctttgttctgacaggtccgcgctcgtctttgatcgaatctttctcctccaggttacttcggtagacgcaatctttcttctcgaagcactcataggcggtcgattctctgttgaagagaaaaacaggattcgtcgaaatctagaacgttgcaagccagagacgatgtccaaatcgaaaccagacaccgaggctttcttccggttgatcatggggttccccaggccgaaaccaaggaatatcgagaaggacgtcaaggtgttcaagtgggcaaacttccaggaggcactgaagaagagtgtctcaaaatactttatcaacgagcagaccgaacaagcaaagccgacagaccggatgggcccaccggtcggcttggtcatggcttgatattttgtctgatcgaaaagtgtcttcttttccttgtctctttcctctttgttcttttctctacttcattatcactcgctctcacatatgaacatttccgacgattaggacatacaccctcctcatctcctatcctctctctttcttttccttctatcgacttgactcgctcgtcaacggataggattcaagaaagaaagaaaaaacttgatctgtcaaatatccattatctcctaatatctttccctacgtctctctcctcttgttctccgggaaccttctttgtctttattctcaatatccactcccagtcatctgcgtgtcgaatcttatacctcagtccttaatatcatctccttcttcctcgcctctttctttcttgccctttttttttctcttttggtttctttttccttccttgtttcgttcggatcttcattcgatagttcactagttcgcacgtccatcctcgtccataagattcgattcttaatctcttcctcgggttatataagacttcttctttctttaccctctgtctctctttcgctctcgaactttatacactcacacgagagtttatttttttctaaagagaaaagaaaagaaagcaagagggaatgagaggagtgtgacaagcgttatatcatcagatggcccacgcagcttacgaacagatccgatctagctcgactcggataacgacaaatgagaaagaaaaagaagaataaagatgatgatgacgatgcatgatagtttgcaaaggaaaacaaaatgggaagaaagaaaaagaaaaagaaaaagaaaagagaatacacaaatttcacaacctttccttgtcatacctcgtactcccgcccgttaattaaaccgatatcgactcaagcgaggtcttgagtcaactcttcagcaggtcgaccttcccagcagatctggtggacctgttaaagttttccataggcgaatagagatgaaagaaatacgtgagttgatcagttggatgttctgcctccttttttttctcatgatcaaccgagcagaataaggaaataaatattgccagaaagaaataagaaaagagaagaagggcaaagataaaat

SEQ ID NO: 864 - DNA, 35197 bp, Xanthophyllomyces dendrorhous
atcctagaatatcccggaacattcaagaagaggtagaagcagaataacaatgagaaggacgaacggcttggaagagagggtacttgtcgacctttccttttgccttgaggaatgtgttgatctccttggcggtgtaaatcccttgaagctctaaattgtttattattgattccaggaaagatgcccgatcgtttatcgtgatcagttttgagacgtaaatcaaacgaaaagtaacatgattcggaatgtatattagaagagggtttgtccttccggaacgagaaaatgaaggaaccatctcatccctcatattcccggttcacttgaaacaccgaaagaaggatgaacggggagagggaagaaagaagaaaagaaaagggaaaatgaatgacgtactttgcccattgagcatttccttctccaggtcatcccacgacttgttgtttccgacgaaagcctatccgtccaagtatagtcaaatccgcccccacaaatcgtgccaaggaaaacggagcaaatacgatgcgtcagactcggacatctataccccgcacacactcgtagaaattggtttcctccattcctgcacacgcgcgcatgcacacgagtcattaagagagaggaaggaaaaagattcctgaaaactcacagcggcacaccgtctgtttcgtcctccaagacaggtggtgatcagatcggccacaccagcggattcctctaaaaatgtgctctccttgacatcgtcaaagaattctgtgcaaaagtgcttcatctctagaagaccgattcgcatgatggcagctaaaagaggaatagcgaagcgattggtacgtaggtctttcggttactcgagaggaggaagagaaaaaagcgatacctttggagttctgtccccaaccgagaccgtcgttgaaaccctgagagcaatagcgagataagataggaagaagcgcgatcagctttgtacacataaagagacattctgaaagaggaacactcacagcggcaacagccacgacgtctaatcccaaataacgatcagcagataacatgtcaactctgaatgaagaaaccaggaagaacaaagtggcaaaggacctactcttcaaagctccacacaatgaaactccagcgacatcctcaatgatctgcaccctgaactgaggcgttgcgaacaacgactgccaaagttttccttcgacttcggttcggtaaccaatcgtggtttctgtatatgtcggcccaggagataaactatgagcgagcgccacgtgatgaatatggaacgcatacacgaaccagagaatcgatccatagcaacctcttgggcgatatttgcaccacttgaaagaaccgaagcgacagtggatgatcttattagcctgtgtgacatctcgatggaatgatagctacataaaatacaagaaaaagactgaatacttacctgagtgccgaacagctcactcccaggtccttctcaataacatccgcaaagatgtgaatatcttcgccgtgaacgtcgactccctatatgggtcagagccatgtacacaattgagtgatgggtccaacctgacttgatgtggagggaataggaaaggatactaaccttgatgcacgagacggccttggcaccctctgcaatctttccttgtaactgcccaagtagcttgtctaggaactaatcgagccaacatcgagagaagactcaatcagggtgtaagagagctgtcgtacaagaaacgaaacttaacgagaaagcgtttaaaaggtaaaaccctgacctgatggggcataacaaagactaggcaggttgcgtctttgacagcttcgaccaagtcgggaacagccacaatattttcaggaagcttaacgtctggtctaggtttgtcgagaaaagaccacaagagtttgaagtgtgtaggtgtgtatattgggtgtgagctctatttgaacaaagaagaagcgcaaagagaacaaacagatatttgacgttgacatggtcctggttgatgatctctgtgagctttcggccctcgacctgagagaatgatataaaaggattaatcgttgcttgaacgaagcatcacaggcaaaaatatggactaacctcttcttcatacacccacatcttcacttctttctcaaacttgtcgctatgcttctggacattgattcctgccaaacgggcgatggcagatcccctttgttgaagatagtttacggacggaacgcgagatcaatttaattatgaaagatggggttgagatcaagcagcaatttagatgaaaccccgacaagaaaaaaaagcagcttaccagttaccggatccgatgatcgcaacagtctctctcttgctaggcggtgtagtactcatggctcgcgcgatagaaggtgtcaggcgtgtattgaatgcggtttggctataaagatgggacttgatggctcgacgagacacgctatgaagaaggcgaatggagagtatggcgataaatgtacccagctgggtcgacggatggtgagcttgatgagtgtttataagaatgagtcaatttgtgcttcttcctcttctttcgatcgatttcttcttcttcttctgttccttagttcgttcggagttgctgcttcgtcttcttcttgttcttctactcttctttttttcttctcgtcatcagaaatcaatcgaaggggaaatgagcggtgaccccaagacgacggcgaaatcttgagatcttacgtaatcgtttcaccttgggggccgacgagggggccagcacagagcggttggggaagagctgtacatatcacgtgacaatataaacagccagaatccactcacgtgatcatgcgtcacagtctgatctctccctctaccccgctcgggccagcctgctgcgcgttcggccgggctgcgctacggggtcaacgctaatccttttctgtctcttctttttttgacttgttttgtttccttatctgtttgctgcactctcacctcgacctgaaccgttctcactttccttttctcgtactctctcttgcacacgctcgctcacacgtatattccttctacagcaatgcacccttctgagaaacacagagagatggagcttgattctcgatcggccaacaatgttgacttgccacctccttcgggatcgtccgagaaaaagaagggtctcagtgcagcaaccatcagtcagttgttttccttctctctctccctctcatctcccttgctttgttgcatcctcttctttgcctgtcttctcttcctgtcgtctatggacgtatcggatgagaaaataaaataaagagagcgacaagagaaaagaatgaagcggttgccgtcaacgcccggtcgcccgcgatctctgaaggaaacacagtcttaacccgaaaaaaaagcgggaagcaccgatgaggcgcctctgatcttgctcattgcctgccgttaggaatccatactaattgttctctcttgaatccccgtcttttctcgttcgaaccgggttcccttgtacgatgatcacgtctactgttattgttgtctcttgcacgtttgacgcaaacagtcccgatatgggtacgtcctgcatacacttttgctcgcttgctcacctgtggaagatgcacagtctcgctcagacacgtttcaacgatgatctgacgatctcttgtttctctttgcactctcatcaccctccaatagatcgctctctcttcgtctgtgatccttttcaacaagtacctgtttactacccttgaattcccttacgttcgtatccatcactcctttcacattctcttccgactagagacacgccctcgtcatcttccgtttccctagagtcgatctcagctatcttacatctcatcttcctctttctcgactcaatttagccggtgtttttgacaacatggcacatgaccgtcgccgtacgtcccgctctaggtcctgtttcgctctttttgaatattctggtttagattgatatctcacacatatcctgctcatccaggctattggaactaggctccttcgacagtttacccctttgttgaaaggactcgatgatgtcgtcatctctgtacgtgccttctatctctgaccaaagaacttctaacggcggatggcttatcgaccgaacgcatcccttatctcctattcatagagagacatgtacatccgatcgattctccctatcggagctcttttctctggatccctcattctctccaacatggcctatctgagcttgagtgtagccttcatccagatgctcaaggtgagcctccttgatacggagcagtcagctcagagagtctgaatcacacaacttatttgaattcttcaatcattcttcttaggcttttacccctgtcgctatcctgttgatctctttcgctttcaagctccaaggtttgtttcaactattcccatccatatcgtttgcctatagtcaaacacaggactgaacaactactgtctccgttacacttgctcttacatagagcccaacagaaagctcggagccatcatcggaatgatctcagtcggttgtgcgctcgccgcctacggagaagtctctttcaggcctttcggtttcatctgccagactcttgcagtcgtggtatgttgaagcttcccttctctgtgtcccttttctgctcgtcactcacgcttgtggattgatcgctatgatttctccatccaactctgccttttcacagttcgagtcctcccgattagtcatgatccagatcctcctccacggcctcaagatggatccgcttgtctcgctgtactactacgctcccgtgtgcgctattatcaacgcgtgcatcgttccctttactgagggtttcacgcccttcatcgagttcttgcgagtcggaccaatcgtcatgttaatcaatgccggagttgccttcagtttgaacgtggccgccgtgttcttgatcggagctagcagtggtttggttcttactttggctggagttttcaaagtatgtcaatctcgttctttggatgcatagtgtctaattatccggaccgctatactcggcttctaatctttattgtcgctccttcgttttgcaaccttcaggatattctcctcatctcgtcgtcctctttgatcttcggaaccgttgtcatgcctctccagatcttcggatacgccattgctttgggtggacttatgctcttcaagctgtctggcgcgaaatgagcggatcctgtctttcaagagcaagaccgactttagatacacatgctcttgtccccttttcttaatatctctgtctttctcactcatcaatcaggatgttgttttcataaggatagaaaaagaggggcgctaaagtacatccgattcttttgatgcctctctttctggttttctgtcttttcctcctttcgtcttgtctcaacttatactcagacattttcgtttcggttcatctcgatctattgactcttttcgggttctgtttaactactctctatctcttggttctatctcatctggttccgcattttctagactgtcctcttcctttccgtaaatcactcacattttttatctctcttcttcttccatgtcgttcttcctcgccagtgatcgaagttgccctcgaactgcattcttcttccttcttgtttcgatctcatatcttttctctccgtagttctcaaaagtcgtcctggtcgacaagtagaggacgattgatctttccatttatttatgagtggacaagtttttgttcttgctttcatacttgatcaagagatctattttgtctagttttcagaaactgaaacggagagggaacgagtcttttggcagattgtaattcttggtcgtcatgtcctccaacagttttctggacatggctctgcaagaccagtgactgctttgttcgagtcttcgaatctatcttcgtcttgactgctgttctgctgtgttttattatgttcatcataacgatgaacaatcaagtaaaacaactacctctgtagctacatcggtatctttatctacctgtgatgacgcataaatcagcctccctcatggctatcatacaatacagcaagaccgagggctcatacacatgcacactttcttctatatcgataggaagacagcagtagacgaattcacattctgataaggtatcatctcattcttctcttcgttcatcgtcatctttgtgatcctctatctcaacctctccgtcgatctccgacgcaaaaagtccaaactcctcttcgcctttcaatccatggagtcccgttcctcccgtccgattggcagagaaccagacccggcgaagtcgacagttggcgtatactttgacgtatgtccagctcgatccccgaggattttgaccggacggaaggatcggagcttggacgtgggagtgttgggcttgaggccgagtccgggtatgagaggacgaagttgagggtgcggagagcgaagaagtaaacattgacaacctgtgtttttccgtcagagagcacgtagaagagtagaaaagaaagtgagatgatcggttttagaagcaggacatcaaggttgatgaacagtcatcattctcatcaacgaagaagagagaaaggaagaaaatcgaacacgaacagggtaggaagatgaaatataatgtgtgtccatgctgttagtatgggcaccgttcctgacgtagagccggatatcaacgacgtagggagtggaggaaggtgaaggggaaggagtaatagtgccggctgggttgatgagaatgacaaatgaggttcgttctgcgggatcaggtattcatcggacaagatcgagaagaaaagagaaagatgagtaccccggaaacagtgttaatgagagaagaggaaacaaaagacagcacgggaagaaacaattgataagagattcaacaaattatccgacgagatcaaagagggcgatctcagagatcttggttagatagatcaagcgacaaagataggatcggcaggagagaacatggagaagtttggtttcgaaacattgtcatggtatacacaaatacgttcgatttatagcaaccatggacgccaacgatgataacgaaaacgtctagtttccagaaaaacatcaacgcgaaaacaaaaattgaaacaggcctcaccgtgaaggtactagctctgacgatacccttgatcccccttccatcaaccacgccaaactcaacggccaactctctccttcccagaggcctcagttgaaggtgcgcccattccaaaccgatcccgagatcgagacctgatgatttagcgggacagcgcagatatgtcgtgcggatcgttggactctgtaaatgaatgaccggatgaacgatctgtttcccaggccgatcaccatttggttgatggatcagcgtacaactcggattcaacggggttaccgggatagaggacgcgtcggattttagaggagcgataagagaatcttcaggaagagcaagatctgtgcgtgcctcccaatgtggagaagggtaagtagatgacgaaaagagagaaatcaatgggattgacgagagagaggatggaggaaagagcaagggcatattgagcgtggatggttgaatggatagaagaagagcaagtagaaaagattgtcgtctttataatagaagcggcttgtatcagatctcagaaaagactacaagaaaaaatattagtctaatctcgcgccgtcactgctgctgctgcctcgtccagagatgcctttggtccagagaaagagatggtcgctgacgaagaaaaggacaagagacctttctgatctcgcttttgcatcactcgggcagagacagaacgagacgatggatgatggatgatggatgatggatgatggatgatggatgatggacgatagctgttcaatgctggtcgacgctggattgaatgagatgcacgtgacgcaaagcgtctacgtgtaacctcgttttcccatctaaccgtgactggagaaaactctgtccctatacttccacatcacactcaacgttcatatagtacaccatctcttgttgcttcattgttttttttagtttcttcttcaccgtccagagataatgtcagaccctctagcacccgccaaggagatcgttcctccggccaaagatgaaaccaagggctccactccatccgccatcacgcccgctgagcccaaaccgaaggcacccttgacgatcaagcaggagctcgagacaaacctggacttgctcgatcgaggagtcagttcgtttgagcccaggtatctggctagagttcttagaactttgacgacactgagaaagaagttgggcgggccaaaaggagacggcttgaaggcattgaaggaggtcctggttgaaagttatccgaagagttcgttatttgctttctcttttctgtctcattcgatagcaaccggctcttgtttctatccagacaatgagaccgccgtgatggtctgagaaagtatgatgaggaaacctgttggtcaagatctagttgaagatgaaaattacatcgccttcatagaagggatcatcaacaaggagatggagacagggattgtcatcaatcgagccttcggccgtttcctcgtccttgaaactgaataactcgcctatattttggttcacaggtagttcaacggcgtctagtctcgcctctatccttcctgaagctcccgcctcggaagagtcgatggatatcgatgcctcatcagcccccgctgagcctgctagttcatcgtcggccaccgtggctgcttcgagcaaggagaaggaagtgacagaaatactacccgaagcggacgtttatcttcgattgttggtcacgctagttctgattgacaccaaggcgttggacaaggttcgtgtcatgtcaatgaacaagaatagcaaaactccgccactaaccacaagtggtgtttgatgaatgttgacatcataggcagaaaaagtggctcatgagacagttgatttgattcagagtctgaatcgtcggtcactcgatcacctttctgccaaggtctacttctatctcggtcgaatctacgagctccaatctaaggaagccgagctccgacctcttttcttgcaagctcaccgaaacgctactctccgacgtgacgaagatcttcaatccacacttatcaacctactactccgaaactactttgcccacaatttgttagatcaggcagataagctggtcagtaagagtgtgttcccagaaagcgcaggcaacgctcaattggctcgatacttgtattatcttggcaagtccaattttttctcctgattctgacctggtcgacatgtatttgagatctaaccgaagaagggtctgatgtatacacgcgcaaaccgcgttgtaggccgaatcaaggctgttcaactcaactacacagaggcccacgctcatctacagcaggctattcgacgagccccctcggctcatatcgcccctgggttccttcagactgtgtgttccttctctgctttacatgctgtctcttgccgtactatgccactcatcatcatgatattcgatctacccgtctttgctaggcctacaagttcttcattgtggtagatctgctgatgggaaacatcccagagcgatcaacattccgattacccgtgttaaagactgctttggtgccttatttccagatcgtccaaggtatatcttcgtcctttgcttcttgtggtaatcttgaacacttgaaacttgactgagtctctctgtaccaccaacattagctgtccgatcgggagacttgtccgctttccagaccgcgctatccacccactcggccacattccaacaagactcgacttcgactctcattcttcgcctccgacacaacgttcttaagacggctctccatcaaatctcattggcttatgcccggatatcgctacgagaaatctgtgtgaagcttcagttggacaacgagcaggacgcagaatatgttgtcaccaaggccgttagagatggggtgctaggtgccggggttggggtcgatcacgagaaaggatggatggtttgtggcaagacggaaggtgtgttggagagtggagagccgagaggagtattcgcgaagcgaatccagttttgcctagagttagtattttccttcaaactttttacttttgcatatcctcgaagatctgcttgtataacatcctgttgactcttgttctgccttctcttttcccccaaaagtcttcacaacgagtccgtcaaggcaatgcgtttcccgttgaacgctcaccgaaaagatcttgatcaaggagcagaggcaagggcacatgcgagagaactcgctcaggagattgccgagggagcggatgtcgatgaggatgacgagatggacttttgagtttttttcttccttgtccctcccttttttcgcattataggttatcgctcttcccatttccttgtatccatgtttatcctacctcacatcctagccaaacgagtctttaagacaagagaaagtagactgaaacaaaatcaagtgcatattatgatgaatgacttggtttttagatgaagagtaaactattccttctcagcccattctgtagaaacagactacctcgcccggtttttcgggttgacctcctcatgcttcaccatatgcaacctcaccctggtctgagtgctcggagtgtttccgccatgacctttaccccagtcgtaggagataccggctgctaggattgaatgggaactgttgaaagaaagggagacgatgggtgtcgcttgagaaggaggagtaggcaccgttgggttttgggagagggatgctgcgtcgagtgctatggagaagcgaatagaggggaggggagagggtcagaatcgaaggggatgttgatatgcgggcatggttcagtcgtaaggatgaaatatgaaacgaaacccactcttcaatttcgacctgttctcatgatcccagaaagtgattcgcccatcagaaccagcagtagcgaatgtgcctagggttctatgaaacgccatcgcgttgacacctgttatttaagagagcataagatcagttccatgtttcggagaaggtaagagaaagaagggcgatgaagactgactgtgaacggcgacctgttcaccagccttaggagcgtccggcaatcgatgacacttgaacgaaaagtttttcgacgacgcatccttgtccatgtgtctttacgaaaacaaaggaagagaagaggaagagcataggaacagtcagcattctgttcgttaattatccttctctacacgcgcgcgcgttcatcgatcaggaaaggagaggagaacggaacgtactggatggcgactctgccttctatacttcctaccgcgaaccctttggcagtggggaagcaggagactactcttgtctgatgttttagtggactctcttgactctggaaaattggagtggcaggagggaggattgggtgatgataattttaatataagatactgcagtaaaaagaaaattttgaacagagcagacaatcgagaacacaccttgaagatcactcccggattgttgagatcgaagatttggatagatttgttggcacaaccgacaaccatcaacggatggacgacatctagcgtgctgtaggagtaattatttcaaaggaaggcaataagaaatctgatgagaatggaaaatgaagacgaggcggttggcttctttttatgtcacttactaaaccttatcgggtagcgtcacagtagacacagggtttgctgtaaaggttgtttccggttagatcgaacgaatcatcagtttaggagagctttctcgaaaccagataaggcctcataaagagtgaaagaagagaaggacgtacgtgttcttagatcccagtactgcaaacagaagagccacctttgtcagcttgacacgtccgttgtaaaggagcgattaagtatgagatacaactgaccttcaacgtcttatcccaactaccggtgaccaagaagccactgccattcgcctgaggcacgtatctgcaagatctgatgggagcatcgtgggcggcgacttgagctgtttaaagcgccccaaaacccaggccaaagaaatgagatgatgagctcgaattctttcgagatagcaactgagatgctagtgacaccaactgacagctttgtccagttgctagatcgtacatcctcgctgctttgtctgccccacagcttatcacttttgatccatcctaagaatgcattcattcgagagcaccaagacagacacgtgagagtcagcaggaaagcgcttgagtagtcatgtatgaggcagaagccgtttcttacaggtacccaacaaagatccatgaccgggccctcatgcttgtactctgccttgccctgggattgaccttgagcattagtctcgtatagccgaacctgttcgtttcccaaggggattgcaagcgaaaggcaaacatttatgttgttactcagccaagaagtgaatgaagagatcattgatgatcgaatgaggccagaaacaagaggaaggagacatagggatgaagagaaggtgaaacaggcgagcgttccgtttgaaagtgcgtctagaggcaggctatggataggttggaccacaaggatgaacataactcacggtcgaatcccaacttgaaacggccaggatatcggctgtcggactgaacgaaacggccgagacagagtccgaaggtgggttaacgagatctgaatcgggaggagtcgaccctgcactagataagacgagagccattgagagaaagaggaatatatgaagtagagaagagagaaagtagaggattgaaagagactgaggtctctggatgagttgagtctgatggacgatagacaagatgaacttggaaggcgtaaaaaagccggctagattatttttttactatagaattccctaatgatttttgaaatatcgatcaggccgttttgtattgaccagagaagacaacaagttttctaatgaattctcatcttccctattgctcgaatagaagtcttatcttagtctcagcccgcccactcgttctccctgcactcgtccatctcgctttgatcattcagatgaagtcagtacatagtccttccatctcctcattcttatactatactgacctcttgaagaatctttctcacccatagtgttgtacgagagatcaaccaaatcaaccaaaaagagctcgaacgaggtggagcgggctcttggcacgatgactacaaaggtccgttgccttgggttctgaacctctttctgctaagatactgatccctcaacgcatctgctttattttgactttagactcggcttacatctttgttggaggcctgccattcgaaatgaccgaaggcgatgtcatcaccgtcttctcacagtacggggagatcgccgacgtgaatctgcccaaggacaaggtacgttccatcgccctcattctcagcccagttctcctcatacaatgttgcttcttcctcttgtctttgctcaagctgtctctcttgaaaatgcgcccaacaggacaagggtacatctcgtggatttgcgttcgtcatgtatgttgatcaacgatccaccgttcttgcagtagacaacctgaacggatccaaagttgctggtcggactctccgggtgagtagtctcattgtcttgtgccccatgatgtctcgtgctcatcacaattacacttgaatcaggtcgaccatacgaaaggatacactcagccaaaggtgcgaaatgacgaaacgggtgagatggaggacgctgaggagcaaagtatgaatgccatgccagctctcgttggtgaaccctctgtcgcaagagtcggagtcggcgctggtgacgtgaatgaagacgatgtggatatggaagacccaatggcaaactacatcctcgaggaaagggtgtgttctctctttttttttgtctgcccatctctgtctaattcgcacctctgactgcgtaccttcatgtctacgtattttcatttgggcttgttcgttttgggtatatctgttatagcgtcgagaagctttggagggttcattatcatcgagcaagaaagacaagccatccaagcatcaccatcgatccaaggaggaaaaggctgagaagaaagaacgtaagagggaaaaggagctcgcgaaagaagccaagaagcaacaacgagcaggctcctcttcgttaacccacaaatattctccatccagatcgcctgtatccgctccgtcctcgagattgacctatcaccgcgacgacgatcgcgatcgcgatgtgagacgaccggtgcacacactcgccactcggactagaagggattcgcgttcgcccgtatcctcaaggcgcgttagctcaagatctcctctccctcagtcgccgccaccaagaagaagagacgaccgatcttctcacccttattctcgagactatagggacagagagcgagacagagatagagtgagagacgaggagaggagaggaagcaggctcgaacgagacagggaacggagtaggtacgacgacggggacaacgcgagatcgagagaaactcatgatagacgccgagagagggatgacgacagatcacaaggaggatacagaaacagaggctatccatgaacagacttccagactctctatcttgccaatcatcttgatggtgtccattcattgtccaatcttgagagctgaccgtccctccgaagccagggttgactgacagctttctctaatcttcatcggtgtcgacacgatttcgattgacgggatcatcctacgtagccgttaacagccatctctacttgatctcgtttccattttaaatcgatccgaccgtacgatgtcgttgcctccctcacctgatagaacatctcatgcgataagccggtcgacgaaagacattgctcgaatcagagggacgtacgtagcgacttgttcttcctcttgtctttattccatttatatactaccttgacaaggcctgacatcactcgttcatctatcttgtttgatatcttgttcttcatctcttctgtcaaatccagattaggaggttcgaataatctttattccgttcatccggctgttcggaacacacagagatgactatatgcgcgttgtctcttacctgtcttccaaaattgaacaaacagatactgtatacctaatcgaaagcttcaccgaatcactcaaccagaccgccagagacaaccgactgcaaagagaccaagtaaaggaactgatcggtagttggagacaagaaatgaatactgtctgtcagtcgacaaacgcgacaggtaagtgtatctttcaatacaggcctttctgaaatggggtttccgttcaagcctgctgaaattgttcctatgtgaacgaacgaagagcagctaagtcaatggaaactttggaggataaaactcgtcaaacaaacgagagattgctcgccatagagtctagtatggctagattacaggccgtcagttcgatctcaggcctagtattctctgtataagacaactgtgagctgacagattatctagaactacacagtcacaagaagaacttcaaaaatccttaaatagccaagtggatcaactccatttaacatcaactgctcttcaagcgattgtctctcgtctctcgtctccttcagtttcttctcctgcgcctctgcacagggaaacaggatcatttccgccatcgcttcctccagtacatgtacatatacctatggatacgatctgcgacaaattgagcagtcagctggaacgactctatgcacatccatcctcaactttttcatcggcgtttctaacaccgactccggcaatctcttcccatgaccagtcttttccggctggggttgttcgaccgctcaaacggcctagtctgagggacgatcctcctatctctgtctctgcatctgtcttggaatcgagattcctaagtaggaaacgtgtccgaggagattcagcggaggtcgagattgcacctgaaccgagaaacaatgtcaactcggtggatccaggctctccacctcaaacagagaacctgtcgagaactatggtcgacatccctgtatcagccgattataaaccctcgtccagccaaccaccgatctataccaataccgatgtcgataacgacgttgatgttgacgtcgttcctccatcggacgatgaaatggagcctaagattcaagatgaagtcgaagtggaagggtccattgaacagccacgttgcgtttctccaagtttgacagccccaagtattgatccaactaacaaagtagacgatggctcaggtgggatagattactctcaacggctgcagctgcagcgacaacagcatcaccagcaggatgtgaagaaggagataacagaaccgactatgcgaagagatgatgtgtttgtcgagagaaggaaggagccacgggaaacaagacctaacaaacgaacactgctgcaacccttatcctcttcgaccgatacggcccacactgatcttcacccgtccgagacggaagatgaaggagatgaaggagaaggatacgaagaagaatttgatttagagtttgatgtatgagacgttgcttttttgttgatgatcggtcggttaatcttcgtatatatgtctttgcaggatactaaagtgggtctacttggtctggtcgatgtacaaatagaagcaacattggaagagggagattcagtcgtatacattgtcgaaccgaagctacatcaacatcaagtattttctatttttacattcaaaaatttcaccttccccctatatccttacgccaaacttcgacgggctagagtcgaggttatttccttgtgctcacacaaccacttagggaacgaaatctcttcgtcaaacattacatgacccgacttctgagtcaccatttttcgcagctccgttcgatgctcaatcaaaaaacctgcgaggacaactaacatcccgtctgttgaagaagaagcaattaagacacggccaggagatcagaaagctgggggaggaggaagaagtgaaggacaggtaaatacgttcaacatacatcgatagaggtagttgcaccctagctcgaatagcttggcctgcttgacgccaggaggagtagtctctgctttaagctatgaaagagcaacagaagagtttttcccaaacacaagacaaatattgtgagtgaccgaacatatgtctcgcaaattgatagattcagattgatatcgtgttaccttgtagtccatgacagcctttcgtaagttttgcacaccatccatctgatcgatcgctctatcggccagtgcctttgcttgtggtccccattgtaagaaagccactagagacaagatcatcttgtattcgcctagacggattgataaacagaagagtatcagttcaagctgaacatgtgaacacccaaccaagataagccaacggggaatacacaccattcaagtatggatctgtttgcctagattcagaggatctcgaatctttctccgccagagcgcggtctccgttcacgacagaagagatcaagcaagcggcaaccataccagtggttgtacgtcctcgtcccctggattttatgcataggaacaattagattgtgatttgaaacgagcctcaatgacttctatgggttggcaggcttacatctgacagttgaaaaccatgtcggatctaaccgtaagactatcaatcactcggtgtacaagagcatcaagggctgctggaagaggcgcttgttcatcggtctaagtagtgatacagatgagggcaaggatatatcagcactccgaatctcctctcttaagcgacaagcatcttactaacgatggcaactcgcgcatcttcaagcattatatcaagaggaacaaatcaatacaagaatcggatgccaggacaaatcgtcgctggaaaggagagtaactcacagttgaccataaatccttctctgcgcacttgctcgtagacgtctttaggagtcatgacatcctctttcttgacagtttcccaaattggaacgatctcaaatcctccctggccatcttccacttcgtcatgctttgaaacaggacaagaagatgttgtcaacacaaaagctttgagccgaaaggatcaaaattcagagaatgcttacaagcagtattcgaccatcctgacttcgtcggatttcatcaacaacatccttcttcaaggagacttccatagactctacgacgtcggtagtaatacctacttgatatagacacatcaatcagtctcgaatttagcccttgtatcagatattatagcgcatacctgtagctctgttgcaaaaagattacacacgatgggaaatgagtgagatagaacctgaatcaaaggaattgttaagatgaagtagactcactcaacattagtgagaggtcgggattccaaacgtagtacgtggggtcgtccggccacatagatgaccggttccctgtgaaagagtatacatattaatgtctaatgatgccaacggacgaacgaatgattatttagctgtttctttcagaaatttaaggtggcttactctcttagcgaagtccaggcaaccacctggctgcccttaggtccagcgtccatcttgtataatgcattcctcaatccatcaatactcggcatacccgtccccactgcatgcagcccatcatctaaccagccggtcagtttcttcgtctgctcacctccatcggctggaggcgcaaacgcgagtgtgagtggtacccgtctataattggccgctccttccactcgctcaggaagtgatagcttttgaaggttcttaaagaagtctgacttgaggatcgtgagcgcagacagaatgattcctgttcggtttgccaccgcagtttgaacttcatccgaggttgccaacccatcagcaggaaccagtcgggtgaccggagcaagcgattcgaggccaccctctttgagctccttctcaaacgtgctgaatactggccgcttgctgacaaaggactcgaacgactctaattgttcaaaggtatctggatgggtttcttctaagtatgcttggtactgttcatgtaaatacccgatcagatgagcatatataaatatctgttctttgatctccattgagtcagagtggatatcgataaggtttactcacaagcacaagctggaagtaacgtcgcaaatggtaaactccctgctgtgtatacttgtttcgaagctctgctgatgtcgcctccgttgccttggaccgtgcgtcctcgatacagtctcgtaagttgatgttctgaccagctttatcgatggcttcgtccacggcctaattattacaatcctgatcagcatttcaaacaggatgttggcgactgggaacagacttaccaatttgacttctagtccatttcggacaactcgaagcaggctattgatgacctgccacgacatagccttactcgccttattcgtaggtagtacagatgccgctcgagaggtagttcgtcctcgaggagaatgttgtcgaattggacgagatcgtcgcacgatcgattcaccttggaccacagcgtcctcttcttcggcctgaggaacatccaagttatgaccgtcggaggaggagttggctcggtgtttctcaagccattctttggtaagcaaaattataactgatgaaatagttgactgtgtagatgaaatggatccagggatattaaataggtaaatatccggtgagaagggcgatccctgatggtaagaatagatgataaacatacccttcctcggcctagttgatcgtttagtacaatagcggtttcttccagatccgttcggaggacgagctgggttaaagtactgatatcagcaaaatcgagaggttgctcagacgctgtgataaaacatgagtagaaaagacatcagatactagagccaatacaagacaaccgaattgacgtcagtaatcgagaacctactaagcggaagtcttttaaaagtaagctgtagctgtgattgtgaatgatccttctcttccatgatctcccgaacggatgcgatagatccctcgtcacagtcatcccagacgggaaccacagatccatcagaagtctcagaatgtaggagtaagctaaagcagataatggcatatgatgagcgggaggccagaaagatgcatgaagcaaggacaatgtcgactaacctgccctcaaataccttcaactctgtctcaacatcactttttagtctgtcttccaaagcttcaagtctggacgccgaaacaccagagtaatcctatcgtaatatggtgatcagtaagtcagacgaagtttttcaagcaggaagaacgagacttgtgtaccttcatattacgaagtgataaactctcttttcgaagacagaaggggtggccgttgatgtactatggtggacaagacatagtaagtcccagaacagaaacaagcatcgcatcaacagagcttatacttactaccagaggctcttctctcaagttcacccacaaaagtgatttgacgttaggcgtacgctccttgatggagctaagaaccttgtctactgcatcctctgtaggttgtcccacacttgagtccaagagatacacacatcgaatgatcaaggaatggaggtaagaaatactttgctatggtcagggatatcaagagaactcacgcgtagatgtttgagcctggaatattacggaaaccagccgctccgcggatgatccaatcatttgcagagtttgctgtttgggagaaccactgatcagatttgagaagtgtcctggagcaccaaaccaaaccgaaaaatactgggtcaatataaatagatgcatgagcaatgctgatcggagacatggaaagcccaccctgctcgtagaatgattccagatcgttgagcgacaacatgctcagcccactggaagagcaaccttcgtcagtacgtgctcagacacaactgagtcatcgcttgagtaaaattccatacctcaatttccataagttttccgccatcaggttcaggatttcggttggaagccctagaaacaatggaaagatccgtgactggagcaaagataaacaaccgagagccagttttgtgtccttttcgcaagaacatgatttggctgacaaatcaaagacaacgttaactcatgacctaacaatcgaaattaagttggtcacgttaaacgcacttccagatctccgatcggttctatattaacgtagtcgaggaacagaataaatcagccagacctttttgtatgagtgaggtgcgtttacttacccttagccaatgcgcaaactttccatttaatccatccgaatcttctataaaagctgcgaaggaaatcatgaagaaatacttctctagggcctgagatgctttatccagcatagtcttctcagtttcaagaaaatcaatgagaacaggtgggacataaacgtgtcagtggtgccgggaccgacgaaggttcactataattcgggaataaaggaacgaacctgtctcattcggtcctcgagctccaaagaagctttgatccggtactcgatgatctcctctcttaagtttgtgaccgcatcgcctgataataatgaccaaatgtgcgcacaaaacaaaacattcagactcaatcgtttgttcgatcgaattaactgagtagacaaagttaacgattcaaaggacttacaggcatcgattactgagtcgaccagattttttactcctcttccaccttccagacagcctagcaatgagaggatgacctgataggagcccatatgggccgaccggagtgaatccaacaaggccggtctttcagaaagcaaatcagcggctgatccatttcgccggttgatcaatgctgtattatacgtgagagggtgaaggaagaaattcgaaatggcatcataagattaagaataacgccgtagcatgtgagcgacagacaagggatgacttgcctgaatcgagcattcttgtcaacttgagcaaacttcgatttaacgcgtgttgtgcggccgctgattcgataatcctaccagcctgagagactggattctgtagttataaaatgatggaccataagcgcgctgcacaacaggcgatactaacactgcctctcacggccaaaacggaggagaatcaagtgtaaagagagagaaaccacatacagagacagtcgagatggttggaatcgtgcctgaagatgaatgtgtgggactcatcaacgttggagtcttctttccattcgaaggagtgaaggttccagagggctgaactgcgaaatcgtctgcatgtcctaacctaagcatctggtgtcttcgaatcagcacagcggccgtcatggcaaaagtcgttcggacgacccccttaagattacaggcatcacttcgttagaagattcggaatttctgatatgaaaaataaggaaaagaaaagcgaactaaccatgccacagttgatgaccacagatgagttcattgggtccagtccttgaagaacccctaaataggcatccagataattgtcttcaatcggacgttcaggcgagataggaatccttgtgaatcgtcccccagaacaacgttttatttagtaagcctctgatataaagataaagtatatgctgctattatagaaagacatgagctcaccgatgataatctactttccagccctgcttgttgaagtcttcataaatttccttggctgtctggacaccagcttcatccacttgaatccagacgggtagaacttcaccctccctatcagctgtctcttggtgagtcaagatcattcctccatatttcaccgcttccttaagtacatctttcttcagtcggttctcgacaccctccaatgtctgagccgatcctccatagggaagtgttcgaaggggagatgatgaatctcgaagaacgaacggtctgccagagatatacagtataggttcttccctggttgagagcgatactgttgtttgttggctggaagtttgcggagacgattgaagaatagaaagtatagtcttcagcccgggtactgtcggctgggcgacgccatacacgttgtagtttgaccccttatttgaaagacctctgaagtttggagctccaattaagttgatgtccaggtccatctgaaattttatattgatgccccaaaaaacgcggttattgattagtttcaggttagtagcgccttatggttaagacaatactgaccgctctcccagttgggtagtgatccgtcttgagtataaatctagtataggtacaaaagaggttatatctgtcatcgcattctgagaacttttgtttgtaattggaagaaaaccataccctcgagccaaaacacctccatctcttcgtctgacaactccaggaagactcttcagtagatgggcgggtgagcctaggggaggattaggagttggtccggctggaattgccattttgaatagcacagtttcgggctttgagtttgattttcgatcaagttccatcgcacaaaaggaatcagtacaaatgtcggttcaaacgacgaaccgaggaatcagatcagacacgaacgtatacacgagaaacgatgagaagaaggagaagaaggagaagaagacagtgagagattgataagttgatagatgatggtgatggcgctggcaatgtccaaagaaacatgtccgatcaaagtcggataacttttggcttagtcagcccgatatgtatggagataagacacaagtgctttccactccgccatcaatgatgcgttctgatcttgctacaacaaggggataggatacacccgtcaacagctgttggaatatcattacatagacgagcatacaatgacagctccttgaaaacaaaggcccggtatggtacaatacaaacctgatcaaaacaggaaacatgacgaggaggccaaaacatagctccctcgtgcgggtatcgaacagctacaaaaattcttgccttatcggcttgaaagacagaacaacgagaagaaagagagacaaagaatagacaactgattgtagtacagaaaggaggcaactagtggaacatgacaggtgcccgcttcttcttctcgacatgaacgacctcgcccttttcgttcttgatcgtctcttcggataggtgcgcaggaggcacccactttgtcgagttccacggcttgacgcccgactgccacatagcatcgacctcttcgagggaaagtcccttggtctcgggaaccatgaagtagacgtagaatgttccgaaaatcaatactccggtaaataccaacaagatcagaggaccgatttgtgcggcaatcttgggagagaagtaggagagcataaagttccagaaccagttactggcggttccgagagcaatagccttaggtcgtactcgaagagggaaggattctccaaggtatacccaaggagtaggtccccagagaagggagaagagcatgatgtgaagcacagcgaaggcaatcagaacaccacctccggcccggtttttggaagtgagcgccgctccaggatcagcagcagtgaagtgaccagcaagacctgaaggtggatgaacaattccgaagttaaacatacacatctgccacgaataagatttctactatcgtactcaccagcgatcaaggcgcaggaagcttcaaggacagctccccaaagcaacatctttcttcgtcccattctaacaacgaaacaagaccaagaaaaagttatagtatgtgagtcatggagtgaagggaggggcagaaggcttgatggttcgatgtaactaacctgtcgatcaaccagagagaagggaaagtagcaatcaaactgacagcacctagaatgagctgaatttgatacgagtcgagttccgttccagagtttttgaagaaagtaggtccatctatagaaataaagagaaatcccgggcgggttcgagcaaaacccataatgttctcagttttgacgtgcggcaatgagaccaaatcagatagttacaaggaacgtacagtagtagtagaagttttgaccgttcaactgttgaatgaactgaagcatgataccattgagagttcgcttccaaaggacgtttcgggtggaaaagcactcaagccaagtggcctttcctccctcgttctcctcggcaagaccgtagttcaaatcgtcgatctcctcttgaacggtaggatcatcgatgctgcagttgttgagcaaggagatagcctttcgggcttcctcctctctgccctttccgagaagaagacgctgaacagagacgaatggaagtctaagaacaaagcaagtgactggtctcattgaaacatcagggtaggctactcacaggcgactcgggtaagaacaatattcctccacagaggatgagaccaaagaggagctgtagaccaacaggtacacgccaagcggcactgccaggaaccttgtggacggcgtagactagaatatacgagataaagattccggtaatgatttgaacctggtagaataccaagagaaatcctcggagagcctttggagccgcctctccgttgtagagaggaacaatggcagacatggctccgactccgagaccggcaacgaatcgaccgacggtgatctgaacaagagaacactcagagccagtctggatagcgactccaacagtgaagatagccgaccatataaaaatggatcctttctgatagatcaaacgaggaagcgaaaatagaattcagttggatgagttgagaaaaagtctgaagatacggtttgaggcttactcgtccaaatcgatcggacgtaaatgcctgagataaagctccgaagaaggtaccagctgataagagagaggtgatgatagattgcctattagcacttaggaaatatgtgccggttccgtcgtcttctccgaatcgcataatgaaatcaggctgaatgagcaacccagcaagtactccgatatcgtaaccgaaaaggaaacctgagaaggtgggcagtaggtcacgaataagcatcatggtcttgacagatcgagaggacgtcagcgatatgaacaagaagaaaagacaaacctccgaatgctacgaagagacagaacacgaccacccgcttgttggccatgaggtttaagggagccatggtgaagaaccttcaactatttagtccagctccttttcgaggagagggggaaaggcaaatatcgattgaaagacgagagattgattcggttcttttcgttgtgttgtagacgatgatggttctgaagggaatgagaatgaaaagaaacaaaaggccgccgagagcaagatgagagcccggttatataggagggcacggacgtgaacatcggtcggttaggatgggtgtagatcctacgtagagatcccaaatggggactgacgcccggtaaacgactctcacctgtccgtccatccgaaagaaagagagcggtctaagaaactgccctcgctcgtatgtatttccacatggtcgcctcacctcggctctactatattttcatcctctctttctacgcacgatattcatctgtcagttcctccactcagagcgaatcgacccaagaagagcatggttaaggcggagaggatcaggatcgaataaagattttggcacgtccgcggcttccgtcgaacccgtgtgcggatgtgagtatttcgacaattgttctttccataaagggtaatatcacactaaatctgatagtttactatgacgatttttgtgtaattaaaaataccgacagtaagaatacaaagaattggctttcgattctaaggaaatagtaggtacttcaggattcatattttatctatttccccatttggaacgaaatgtccgagcggacggaacagaacaggggtaagtgtggaaagtgataggttaaaatagggacgacccttgacaaccgaaagccatagccgatgtcagccgaccttaggatccttattttgagcatagaacagcatagatcgacggaccgaggacgcgcagtaggttatttgttggtccgttcaattggattctttcccgtccaagtttcgatacagaagtatgctcattcatcatgttcccctcaacggacgaagatagttggatagaaagaaaggggtataacttttgtacaaaatctacaacaaactacgcagccggacccaaaatcgactgcaacgatcctccacctgattatccatctacacgcccgaacgtaatctcatcagtacatcgcccactaacccagccacgtcgcccgctctttgagcttcagttacaagctcggatatatccatatccgagttgacgagctgtttccaaacagagttgaaactgaacatgatcagaacgtgtagaataatgcatttcggcactagcttcaacgtcgtgcagaaataaaagagggatcgagtctttatactcaccgtaccgtctaacagggccccattcgtccctggctggaagatcaacacgagcgtgattgtttcttccttgacgacttcggatatctgtccaccacgtcctcgatgattgattccgccactaacgccgctggtatttgatgaggatagcagaggtatgctataagtcagattcagctcattcttcccattcggaccagtcccaggggtgattgattgaaggcagagtaaatccttgtgtgttgtcaactgggtagagtacctgtaaaacagcgcggacgtaaacgaatatagctatcaaatggccgaacaagaacagagtgcacagaaacaatagatatgaagacgcaggaaaggaatgcgaaccattggcaaatgttctccactcgaagagattccccgtcttctgtcagccgagaggtctgcgccgtcttgactctagcttcatccttctttcgttcaggctccaatcgatcgaccttgagtttttcgtgatatcatgtcaactgaatgctctagtcttccttcttgtttctagcaaatacaaaatgggaaaggaagaaaaggacggagaatactcacctccttcatcaaattggctacctcccgtttagcctcttcaacgttccgcacctgggcatcgccatcatccgcaatcatctgcatagcgataatttgattatctaaaatctcattcgcctcgtcgatcgtcattctctgtcatattgccggtcaaaagaacacgcttatcaacatataacgaaacaacttttggagagagggtagaaagaatagaaaaatagatcacaacggaggaagtaaaatagaggaagattgagacgcacgtcaactagcggaacagactgtcgaagtcgagaaagctcgagctcaatctctctaatttcctttgaaaagtgctctgcctgttgaatgtcttgagtgagctgatcgtggtcttgattatcgaaagagacggatcagtaagtgaggtaatttgactcatataaaaaaggaagtcagataagagcgaaccgctagaaacctcatctgctactttgatcagctcctctttcagctgatccagttctgtttttgctcttttgagcttttcttttgagcgacggttttcttcagctgatcacagatccaatttttggcgtccgagtgttacatcagccaatggaggatctatcacgcgcttatcggttttaaagagacaattgaacgaaagctaagacaaaccaagcttatcgttctctgcttcatcaatttgaagaggctcctctgcaagcatcaattttaagaatgtttcctttgattcctgttcaatgtacttgaacttgatctttttgaagaattcctgttttgccatcgaatatgatcagggtttaacatgaatgagacatcagccatcccaacattttcctctcgtaaagattctaaagaagagtttccaaaacttacaatcgaagcggcaatctcttcgccaatcaatgtcggattgcccgggtcaatagccatagcggagtctgagaacgcgacggtagcatcagctgaagcgaccgtatagaatcggtccttcatacccgcgatagcgaatggagtctggtggaacgccgtgaacactctaagccattcgagccgggaaggtcaggataaagtaagtccgtttggaatcaaatagttcattcggcataaacgagatcactcgtactgttgagcagcctgctgtggatctgcggacgacattattgacgacaaggggtaggtatgattgaaggttgtattgaacacgatcgggggaacgtaaagacgagcgcgcgacgcgtctacttcccaagtagcttatgtaatcatagagacaatgagcttaagcacatgccaaagggaaagaaaatgcgcttctcagctttacgttcccttctctatatcaaacctccttttccatctttcttggtagattcatgttgtgctgttttcacactagcgctcgtgaatttagatgcatgttcttttgtttccattctggttgtcgacatcttgagctcggcgtaaccggatcgtaactaataaagaaaatctttcccagggattgatgacaaagcattgaatccaacggagtttcaatggcccactcgaaatttcacgatttctaggcatcatctcgccgccactcttccggttccaaagctatccaagaccattcctctttgcttcctttgcctcctcttcaaaaatggagtacacccctcagacggtagcacactatgtgctttgtgcagattgtggtatgtgttggcatgaattcggcatttattcgtgtcttatgaggcatccttcgccctcgcgaagcttgggatgtggttaacaaaagctgacatgtctgcatcctctttctttgctatgacttcgtaggaacaccaattgagcccaactcgggtatgtacatgaatacgtttcaacttctttgaatattcgatacaacagttggaatgtttaatccttatcatgaaacgtttgttcgacagccaacttgtgtatctcatgtcttcgaaatacgttagtctactttcctcctctcttcctctttacaaaatgataggcaagctttcgcttacaatatcaatctggcgtttatctcaacaagggttgacatcactgagggaatccccaaacagtcatccatcaacttctgccgaaattgttcaagataccttgctcctccccagagttgggtgtcgtgcgagttggagagcagagagttactcagtatttgtctgcgaaagctgaaggtttgtctgtttgtcaatttttcctcagggatctagtttctatcatcagtcggaaggtccactgacaataacctgttctgcttcttaatcgtttctttgtagggtttggtcaaagttcgcttaatagatgctgcgtttgtctggaccgagcctcacagtaaacgtatccgagtgaagctcactatccagaaagaggtaggtcgatgacagttgccgtggtatgtccgaaaaagagcaaacgttgaacttcattcgggttcctcttgttcttctaggtcttcacctcgacgatcctccaacagatttttgaggttgagtacgttgtctctcatggtcaatgtccagactgtactaggttggcggcgaagaacatgtggaaggcttcggtgcaggtccgacagaaggtgaaccataagcgaactttcttgtatcttgagcagttgattctcaaacacaatgcccacaaggataccgtaagtgccatcttgtcttttcttctgacgtttatgtgagcgcgcgcccccgcatgttaaatcaactctttgtttgctcctcttctcattacttttccgaaacaaacagatcagtatcaaggaggccaaggacggattggatttcatgtacatccaacgaagtcactctatcaagatgtgcgagttcttggctgccgttgctcctgtcagagtcaagagttccgagcaactgctgtcgaccgacacccactctggaacgtcttcatataagtttacgtactctgtagagattgcgccgatatgtaaagacgacctgatttgtttgaacacgaagctagcccggtcattgagtaacatcagtccgctgtcgatcgtgactcgaatttcaaactcgatccagatcttggatccggcgacgcttcaacagacggatatcccttcgaacgtctactggagggagccgttttcatctctgacgcaggtgaccgacctaatcgagttcttggtattggacgttgagccttccggtccggttcgaggaaagtacgtattggcagacgcacaggtgacattcgcaaacacgacgaccactcacacatctacggccgagggcggaggagatggaatctaccacacgcgaacccatttgggtgggatcctccagccgggagacactgttctcggatatttcctcgcccgagcaaactttaacgatgaagctttcgaacagttggacccttcaaggattccggacgtgattctggtaaagaagacgtacccgaacaggcgaaagaaaaaccgaacgaggaactggcgactcaagtcgattgcaatcgaggcggaggaggtgccatcgaccggagccgacaaggttcacggtcgaggtgcgatcggccgacggggtgggttggaccagcagagggtcgagaaggattacgagttgttccttcgagagttggaggaggatccagaacttcgagggacgatcaacctgttcaaggccgctcctgcagcttctgcggctgccgttcctgccgaaaccgacggtcagtctgtcgatgtggctatgggaggatcttcctctgcaggcagtggcctggctggtgggaagcgacgaggaggaaagaagacggctttctcgatggataccgaccaggtggcgacccctgctgctcctacgatgattgctggggaggagaacgaggacgaagaggacgaggaagatttcccagatgtcgacctcgacgaactgctcgatcactttgaggaactcgctatgagtgacgatggtgccgatccagaggttgccgctcatatcgaagaggagatcgaggcgtttgctaaggaagagtagatttgtgtgaatagatgaatgggcgtgtggacatgtctactttgttttatggtccatgtgcttttaaattcaccggacacgaagatatacctgaacaaaacagttcatcggcataacatcgtaaacgatgtattacatcatgggttgggtaaagaagaattatcgagctatagaaagaagaaaacagaacgaaaaggatataagagaatgaaacatatgcaacgtggtccaaccaatgcctaacacgcgcttctcgtctgctctgcctgcttctgcttccctctggatttccagacttctgctcagcttcctacttgtcaggcaacattggactctgttggaccgtcttttatcaaatttacaaaagtttaccggccgaaggaaagcgaaggagaagaagagagcgaggaagtacgaaacaatatctaaaaacacgaggggcctagacaaaatgaataacatttaaaatacagaagagcgcttgaagcacgccaatcgttgcgcttctttgtcttgatcgtcggatcggcacttgctcagacccttcggttactgcgcgattttgccttatgcaacgtttttttttctgatcaaattttcagccatcaccttccaagatttgatcagtcgttggcaataaatgctcgctccagcattgaatcctctcgatggcgtctttcatcgtcaatcagtcgaccgaaagagtccatccagattctttccttaaagacagtcgtctcgttcgagctgtcttcactcttttctctctttccttgatctcgtactttccttccttcttagtggctctattcatttagtcggctgctaccctctggcgcgcacatacagtttttccctctatcccttccctgcttcacttccttcttcacctcttcacataatgtcctctccggaccagacaaacgtcacaccgtcgtacttggcgaacaaggtggccgaatcggataaaacagaatcactcaagggatctactaaagacaagtcgacctacgacccctcgatcgcattggctcaagagagtacgttcctttctcctgactcttgcttcctagtttgggctatgtttggcgtcaaagaaattaattttttcttcgcttgctacccctctccctacctctttcagttgacagagatggagagtcatttgatgaggtccctcagtcgaacagacgaatcggaaccttctcagccgtcatgctcatttctaaccgaatcatcggttcgtcctatcctcttccgtctcacttcttttacctcgtctcgatgcgccgacgcctgataatgttttctatttctattttttccaacctttcataaccttctttgacctcaggaaccggaatttttgccacgcctggatcaattgtgtcctccactggatccattggacttgccctcatcttctgggttattggtgccttgattgccggatccggtttggccgtatatctcgagtggggtctggccatcccgagaagtggtggtgagaagaattatctcgagttctactacaggaggcctctctatttgatctcctgcatgtacgccatgtacgccgccctgctcggatggccttccggaaactctgtctacgccggagagatgcttctcaatgcggccgacaccgaacttggcagatggaaccagcgagcgatcggtgtgggtgtggttacattcggcctcatcattcacggatgtgctcccaagtggggaatcaggctccagaatgtgttgggtatcttcaaaatcggtgtcctcctcttcattgtctttgccggcttcgccgctctggctggccgggtccaagctggagcacccaacccgagtaacttcaagaacgcctttgctggctcgaagtctgatgccaactctttcgtctctgcgatgtacaacgtgatctggtcgttcgttggctacagtaactgcttttacagcatgtccgaaatcaagtctcccatcaagaccgtccgacgagccgccccgctcgccatcatcctcatcaccatcgtttaccttctcgtcaacattgctttctttgccgctgtccccaaggatgtgatccttacgtccaaccgacttcttgctgccgagttctttggccgaatgtttggtgataaggccaacaaggctgtcagtgtcctcattgcgctttctgccattggaaacgttctctccgttttgttctcacaaggtcgagtcaaccaggagcttggtcgagaaggcatctatcctttcgcaaagttctttgccagcaacaagcctttcaatgcacctctcgccggtctcgctcttcactgggctgtcacattaatcatcattcttgctcctcctggtggagatgcttactcgttcctcctgaacttgatctcgtacccgctcaacatcttcaacaccctcatttcattcggtttgctgatgatctacttccagaaggacaagcaccaatggaattcgcccttcagctgtactctccccgttgtcattttcttcttccttgccaacttgttcctcgtcatcgctcctcttgttcccccggcagctggaaatgagccctacaaatatttgccctactggttgcacgttgtcgtcggattcgggatcattggtgctggtatcgtgtactggatcgtctgggcaaacatcttgcctcgaattggtttgtcttttttacttctctgttctactgcctggaacgtagatcctaactccttgttctgtattctttccgacgatcgatgaaactcaggcggataccggttgggacgaattgaggttctaggagaggatggcctcaccaggaaggtctttgtgaaagaacgactggattaatttgcttttgttttctttcgctcttctctcttttatcttttctttcttgctctcttcttccattgtttgcatcgcttgacctttaaaatgaatggagagtgacattacacagatctttccttgtaccttcttacatctttcgttcgttatcatcgtcctcatcgaacacgtttcatatgc

SEQ ID NO: 865 - DNA, 11029 bp, Xanthophyllomyces dendrorhous
cccttccccctttcaaactgcttgggcttttagaattacgcttttcctctattcctatatttctctttaaaatgattggtctccaatctataacgtcctccagtcttaattcaatatagttattagtttgttttctttccttacagagattatatgtatacaccattctcaataaccgggtttcttcgttctcttcaattgtcctttaaaatgaaccgtgccttgattgtcaagattaactagagagaacgattaagtctcgacttgaaattggcaaacaccttcaagctttcaaatgttgtttgggccggatcgacacctgatgaaacattgttcaagttttgttctatatgtcttattattgatttctcatgaatttattaactgccagatctcgaagtacgccttcaaataaccaaatccaatcacccgcatcgattgatcagtctatttgctcaacggaagaacctgaagagagatagaggaaaaaagggaataaagcaaaaagaagattagaagaacgtacagtgtattcatcaggagtcatcaactcttgatcttcttccgtcacttgtccgaacggtttcgcaactccatcgactgtaaacgccaagtaaatcccccagatacccgcgcagtcgcgatcatggcagttgataatagatttcacatcatggtatgaaggatgtgttaatttgagggaaggatgaaaacaagagatgaagatcagagaagctaaggaaataaagtacgagaggtggtatacgtaccagttactaaacgttcatctaagtccacctgcccacttccttctctctctgtcgcctgctcagaggcagctagaccctcttctccttctccttctccttctcctcctccaactgataactcgttgttcactattgactcgtattctgtgcgaattcgtttctgagcgctttcttcatctggatcgagggatgaggatctagcttcttggcgctgttggtatttagattaccacatccgtttattgtgtcaacgtagaaaacatgaattatcacagagaagaagaagaagaaaggagggacgtacacgcttagaagaggtttctgcagagtcttgatatgtaggttcggactcagcagagttggtctctccgttcgtcagtgtcggtgtggctccggaatgtaatttttggtagtagtcttccaaagcttaaaatagaaacgtccaatacatatgagagaacaagacgaaacatctcagcagtcccgcccaaaggtgttggtaagagagggaaaggaagattgattgggctaaccagtagtatgcttctcctcggccacttgactatcatctaacgtagaagctaggcctgccagtaacttctccctctctgcagcgtaagcaattccaagtgcggtctgttggccagacactgtcgaatatagatgccatgctggtagagagttttgtgacctggatatgtgaaatgaaaggattgtatgagatacgggagggttacgttgatgcatattcaagaggagaaaagggggcacatgcctttgttgagcggccatttgttcgcgctgcttagccaaccggtcttcgtctccatccgcttggatctgaacttggacattagagtcagccgcttctcttgatttcgcatgctcagctaaccacatcttgatgtcgaaacttgtttgtagcagaaagggaagggaagggggcatcaaaggaaattagtctcaagacggttgaacacacaacagagcaacgaacccacaagggaaacaccatctctgccgttttcctcagtccttcctgaatgtaagctgtttggctgttaaatctagccatcgcgtcttcctgtcccttgacagaatcagcatcctcgttgtcgactagctcaaacccacacacgtcacacaggaaatgtccttccggagagaaatttaaaggtacatccacaggaaggtatgtttttcggcaatttggacagatatatcccttgttctcttgctcctggattgagtggatatgaaagaaggtttgtagagagaaatggtaagtaatttggtgtatgaactcggatttcctctgaaagaaacccttcaacatactgatcgaagtttcttgtctaatgatttataaagagtgtccatcctccagcggacgacatccgaaaattccttaaactcgatccagtagtacgttctcactaacggacgagcatggggtagcagcggtccttctctgtgttcgtttcgagtgaaactatatccaagattatagattcaaattcccaaaaagaaaccaagattacattcaccctcaagatcaattgttcgttcagataccttctgtcctcttgttcactacaacagaagatgaaatattaagcagaaagaagaagacagacagcacaccttttgattaagcgatgagacagaaggatagctgctagcttggaaagttctttgacggctatcccacacatcgaggcgagctcatcctctctaattctatgattacccaattgaatgagaacagagagaatacaacagaacccctcattgatcagcctctaatctccttcttctggactcctctcccatatcataagatgattatgatcaaatcattttaacaaagagagaagagagaacgaacacttccttcttgatcaattgatctaacaggatgatcaccggtgcatcgtagaacgctctgctgaccgtctgaacaaagatcttcaatgttggcagatcctgatcctgatgtgttgagctcattggaaaaggattcggtgaatcaaggtatctccaatagatccaatcaaaatctaaggggtatgagaaagaaacaaggaataaagagagctcggtatgtaagtaatggagagtgaatgtaggaatgtgaactgagggtgcaggtaattccgttaacatggcttagtacgtaatgcaaggtaatcgtttatcaatgtattcaacacgtgtcacacagtatgtcttgaggacgttcgaaatcctcatatattcttctctcagttttctcgaccattctgaagtcgatggggaacatagcccaagagagaaaaggatcatgcagattcttcctgctcaagatactctctaaacttttccagtctggctttctcctccttctcggtttcttcttcgtccatgatttctccgcccgctcccgttccagagcgcctaaacttggatcggccgtcgtgcagagatgcttcgattcttcgttgagcgaaatatcggcctgagcaagcattgagagtcagtcgcgtagaaagacatgaattgaaaatgagaggggcacaacttaccattaaatttaagaacgcaggctcgagcagcaatgggatccttgaactttacagtcataatgccctcctcctctcgctggtttacatgatgatttggaagagacagactgattagcatgtctcattttttaaattgaatttcaactgagagaagaagagggaacaaacatcgaagagtgtcacactcgtcacctctcccatactctctgcttcctctctaacatcctctttcaagtcaattaatagtgtcgcgtccgcttctagctcgtccagagtgaacatgtgcttgagcacaacaagcctaacgtttggcggaggaagagcctgttgaatccttctctcagactctccgtccgagtccgagtcccaatcagttagtttgctggtgaagagaccaccagacacaagatggaaaaacattagtcatagtaaagcacctgtagcctaagatctgcaagggatcacaagagagattcttcgttataggaagtgacaaacctttccatttttcttatccgcttgcttagctctttcttttctgcttcggtcatcttccgtttctctttcttcttttcccctatttcggcagacgtagccgagccgtccttcttgccatcggtctctccatctccccactctgctcttctaactttcattctgccctgcccttctcccaacctcaattcactgtcgttcaaaacagtgatcgctaggtcgacacttgtctctttgaaatacatcaccaaagcctcgcctttaaagataccggcctcatcggtatacatcttgatctttggctcgtccgatggagtaagcaggatgatgccacatttagaaaacgtctgttggatttcttctttggtcgcgtcgaggggaagattcgtgatgaagactgctgtcgacttgcgcgcgggcttctccggagcaggcgtcgtaccggctgagctggaggctgacgaagaggaggaggaagatgccattaaattgctaggaccaccagaggccgcgtcggaagaggaagaaggatcaggtcgggctcgtttagcagcctttttggtggcagtagcagaagaaggaacggtcgagactgctgtgttagatgtgtaatcaaccactggcttgtcctttcgtttcttgttttctctagctagaacgggagcggccggcgcctgaacaattgatatgaaggtaacctattcagccttgtggaactcacaaagaagggggctagagatgaaatcttgagagtgacacacattttcgtctacaccggctaccgagtaggccgcctgctgagccttgatgatctcttcatccaactgataaaccctcggaccagcgatcagaaaagttcggaaccatcgggctttgatcagcttcgtttccaacgcgtcttgagcggaggagactaatggaactacaaaaaggaacttacgatgggcacccagctattcacaacttcgctccactcgaactcgtttccatcgtcatcctcaaattcccacttacccgaaagtcgactgaaatgaactctcggatcagttgagaaagcagcgttggacgtagctcctgctgatcctgctgccgatgggtcttgttgttggctaggtgtgtttgacatgcgcactgtttcttggtgatggttgaatttggctgtgagtagtgagttatgagcgaatagtaaggacttgattagtcagccgagtaataaccctagtcttaacctctacccagatgctccgtatggaccagcagagccagactgaaaaaaatgctttgatgtccacaaacttggttgatgtggacggttgaatgagacaatgcaggctattagagtaagtatagagagatacgacgaggagatacgtatacagaacggctcactaaagaatatagccagagtacgcgctcgtgcaccatatatcacatcgttctaaaggtttcagtcttctcacatcagcttcgatcacccagctggttcactgtgcgcaaccttaagatgaaacccatacaaagagctgcgatctctgttgaaagaaatcatgttgtagagtatgccatgtaaatatctcatatagagtgcggaatgagtatggatgtaaacgatgatacatcgagtttgagctgtgcatttctctggtttgttactcttttggtcgtttcgttctccatctggatcgtctcctttcctcttttctctctttcgacaaccttcccctctttatcctttctcccttcataaagcatccgcttcattcgaactccctaggtctagaactactgcagctgttcaatcctagaaatcatgtccaacagtcatgcgggttcccgctcagcattatcatctactagtccgggtctctcaatacctacaaccggcaggcataaggttgtcttagacccagccatgattcgagccttagttgggtctatagatcatggggcacactctcagggtgacgagatagagtatgatgcgttcaaatgtgattgtttttcctccttgtcttcttctggccttgttcctccatattagcgtctacaagccatcatgaccaaacctcgctcacaacttcccgatacatataaacatttagataaattcaaaccgtcatccatcttgacttccaagccgggtaccatcaccccgacagcttcaaaggattcttcatcctctctcagtggctcagcaaccgtacatcttcaaggtccgctcgaaggagaggtccatggattcgctgccaaagttgagtcggaaggatccgcccgggcgagcggccggccgggctcgtgtcagaacgatcatctagctgttctgaaatgggacggcaaacaattttcactacttccgatttccaaaacatattctcttgtgcatgacaagtctcttgctctagattctttgccggtggctcatagtccaccacctcagtcggagagggcttacaaacaccagcaaccctcgacaactttgatatcatcctcgactgaaaaacgacaccgaccaacatctcccccctcttcatctgcgccggctacgcgggacgtccatatgtcatcttcagcatcttcatccaggtcatcttcgcctgaacactctgtgcagcccaggccgaccgtacccgcacttccttccgcttctcagccaagacctacgtccaaaccacctttgtcttcatcgtcgataaacccatcgttaccgacccggcctacatcccaaccatcggtcgttaacccagatgttgaaatcctttcttttccgacatcttcaatctcgacttcgtatgctccaatgcctagtgttcccgcacctttaccagcaagaccaatgtacggtggaaaatcgttctctcattcgcctctgatgggatcaccaacgatacctcaccctcaacctccagcagatggatccagtgatgacgacgactccgactcgagtgagagcgaaggagaagatgacgacgatgatttcgctgctcagctcaaacaggagctcgccggtgtcagtgcaggcgggaagaaggcaggaaagggtgcgtttggagttgtcggtggaaaaggtttaggtctaggcttgggaacaggtcatgtacaaggtgctggcaagagaccggtcagcttgaatagtttgatgggttcgttcatattctattctacttatcttgtgtcgctgcttctgcgacaaatctctgtgagctgcgctaaccatttattgtgatcattctcattcgaatcttctctaatctctttgcgggacttcgataggtgtggaggacgacgatttagaacaggagagcccaagtagcgatgaagattaaaatgaggatttctctcacactgcgtccctatgagcaacaactgtcttgtactttcatcatgcaaacttgagagttagtcagtaagaatagtcggatatttatggctgtattctcagaacagatattcgagacagatcacaccgcgactatgctgacctagacgaactgtgttgtgttaactcgtctgatgctcaatgaatatttctggatgaggatctgtcgacgcgcagcatctgtaacgatttcgcatagatagtctgatcaacttaatacatagactgtcatcgaatactcatgtctgttgttgagaccaacatccctcgggcgaagaggggaagttctaatctggattggtccttcggttgtttgtacactatctgtacctgacgagttcatcatacctacggcgaagattcagatggcactcaacagacaggcttattcttatctgatcatcaccatcacgtggttacaccgctttacctaccgatagcttcctctatcactatcacgactaaaccatttcatctctcctgtttcttcaaaccggtcactgtcaccaactcttcatcacctgaactacaaccccgatatatcgaatcggtatatctaaactatttacccctttctgacctcacgctgaattattaccgaggtgtttaggctttctaagggcgatctatatctctccctatcttgagcatcaatcacgatgagacgacaagatccaaggctccggactcctttctttctttatctccggacgtttgcctttcctttggttctctcgatattcttcgtacttcttctctcctcgtactttgtgcttgtccatccagttgctcaacccaagaatcacaagatcggttggcaaaattgggacgtcgtagagctagaatctaaaccggcattatcgacagctggaaatattagccagacaaacggatcgatttctgatcctgaagcggagggagatatagaaggagtagacgaatctctacctttggatgtgtgggacccactgttaatgcacaagaccggattgactgaaatcataggcaagtcaatgattcatgatatttaatagcaggctcgaaataatggttgacacctgttgagaaatctggtctcgatttgaggatgttcagtcaagacttgtatatttcgtaggtctagtacttcttcttcatattgataccgaatgagtggaaacttacgatgatacccgccctaccgtttatgaacttgctgaagctccttggcaagggtttacggattactgtgcgcctgcttctacaccagctcaggattctcgtctcggaaaatgggtgcgagtcgataaagacatcaacaaacgaagtggaatttggtattcctatatatattaccgccggtctcgtcggtttgatggtaggtctctgtcaatctatcccggttctttctattgagattctccttctcaaggtagtctgatgagctcatagcatttcttgcacagttccgtacatcacgtctctcaagatcatcccatctagcggcccacctccaccatcttatactaagtctacaggagacgatttaacttccggttcctggcctgcgctttctggactctctctagcctacaaacttcaagctgttccaggtgcttttgacggattggacgactcgattcaagatgaggctgaatttcaagaagctgatgtcattactgagattgatatcctgtggggagacgccagcgtttgttatgttcctcagacttttctcacttcatatcaagtctatgttcttacaagtcggactgacacacgaagttttatagccttggtgggggttcaagaggatcgagccgcctatcaaagaaggaactaagcgattccctgaaacacaatccttggtcgttcgtatgggtatcaagcgtgagaactaatctgtcttcttcccctaacgaattgctctacgttctcatactcacataacgactaaatccatacttgttcattcttgaactttagctcttcctcctaagcctgagcttcgattccatgcgaatgggacgttcaggatcatgcaagtcgccgacctgcactattctactggagttgggtaggcgccttgtttgatgtttttatacttaattttctggggctcatcagtttgtctgagataactcggtttgtgtacacagggtctgcaaggatacggaaaaaacaccttgcgtcggagatgttgattcagctttgttactagattccgtgttggatgcagaaacacctgacatggtgattttctctggagaccaagtgagagttctaactttggattcctctttgttctcgtggacatatctattaatcggtgaagttctttccataagctaaacggccagcaaaccagttgggactcgatgagtgttctttcgaagtacgtcttgtttctgtccatgttgctctagagatgatcactcattgtttcacaacaatacagattcgcgaagccggtgatcgatcggaaaatgtcagtactttttttcggtcgtacgacatccatgtctcataattgtgcgcattgactgatcttctttagcggatgaagaccatgggcgctggtgtttggaaaccatgacgagtaagcatgtttctcatatatgtggctatacaaatttgattttctactgacccactcccttctcttgggtcgtttcgttcattttgtcctccagtgagaatgatctctcgcgaaaagaattgatgagcgcaatctctcggatgccgtattcagtatccatcgcgggtgataaggatgtcgatggtgtgagtcgtatcagcattcatattctgtttcttgagcatgaagttcatgattcaacccatcatctcttcgttgatgtgggtcattctttcatctaggtcggtaattatctactcaaagtatactctcatgacccgtaagttgagttctagtcagatgtttcagtacgctatcaactgaagtccacacgggatgatggtctttcatactagttcgaagacacatctggcttcgatctacatgattgattcggggtcttatcagaaggcaacaagcgtattccagaaaaccactggatatgactacatcaaggtgagtagctgcgcttgctacatttgtgcaatcaactgtaaccaatattggtatggtattgtcttggttctgtagcaatcccaaatagattggtacttgtccacatcgtcgaaaatagggttgatcgagcgaccatttcaaccagacaccgccagtgacctagaaggcatctggaccaagagaaaaagaggaggacccaagagaacaaggcagataaacactggcgagaggacgctagtcaagccaaatgcgctgtgagtgataattcctacttaaggatcaaatccttcctaacactgacggttcttgatattgggtatatcaaataaacaggatgttctttcatatcccgcttccagaacacattaagtgagcattctctgtttcgctctgcatcttttcaaaccattttctaatccatgaacatatctacgcactctcaagcccggcggacctcgacccagacactggtgttccccttgatactgggctcctcttggacacaggtggatcatctagtgtcaactctggattcttcgagaatggtatcaaacaggctactactggaaagataggaaagaacaaaaaggagatgaatgaggtcagggtaattagcaatggagtgagttaacgctgcccctcgtctcatccgaaagctgatgcatgcacatgagattaatcaatgattcgctatgctccggtgattatcgattcagcatgttcacatcgtaagccatgatttctccatatc

SEQ ID NO: 866 - DNA, 42343 bp, Xanthophyllomyces dendrorhous
cttctgaataagtaactcagccgatatctaacggaattatcgctgccaatacacaggctgagaattgtagaagaattcaagggatttggatgtgttttggaggaggaggatcgtattgtgagtcaggccatttattcaagaaatccataattcctactcatctggatcaatcgtaatttgcctccctcttgttagctgggtacggacggatagggtatgtttgttcagtacgagctctatctcttttgcacatggcttcttacgtgttcctttgtctctgcctcttgtcttcgaattcaccaagatttgaacgaagattccggatttttgatatctccgagtttggtgagcgcatcagcacatacaagcacaccgagagtgggaagattatcgatcagatggatctggtgggcggcgacgctcccgtattgtaatatctgtttgaagaggagagaatgagaaacagaaagagattagtatatacatatgttttatcacgattttaaatgagtgtcattttcttcttgatctggacgcggcttgatatgtgaatgagaattctctgaacgcgtgcttcgccacccggaaattggcatgtaatcctcatcccactttccactcttatccatcgatcatcatcagatcacccatcagtctgcattctctttttgtgacacaacggccatgctacaaaactctcttttcagagcgccatatcggtcgtcaaggagtgtggcttctactcgtcgttcttccaagcgaatgctctcgctctcgacattgaacgttcaatcttctacctgtatccgctcaggaattaccttattgccatcatcagctcccttatccttcgcagcttgttccccatcatcatcatcatgctcatcatcatcttcgttctcttcaagacaattctctcaatcaagccggacatatggaactcaaccctggaaaaacccatcccagcaagcttccacaagcaatgctcaaaaggcatcaccatcgttagcagaaggaattcaagggctgcatttgataaagaacgaaatacagcatacattgtcggatgaacaagcggctctactgaacaagatcgttcggactgggtgagaaatttattcatcttctgattccacaatgtccgaaactcacttaattcttatcgtctatttcccttaatccctgtcctactggtttatacacatactctcgctttgagtcagcatcaatgtgttcttcaccggctcagcaggaactgggaagagttatttgttatctgagatcgtcaaacagctggaggcgaagggaaagagtgtctttgttacttcatctactgggatatctgcttcgaatatcggaggagtaactgtccattcctttgcgggcatcaatttgggacaggaagaagtgcacgtgttagcgaacaacatcaacagaccatctcagaagacggcaaagaagcggtggatggacgccgatgtgttgatcatagacgaaggtgcactcgctcttattcgctcatattagcttgatcattcttcgtctcaatagtgctgtacgcgtgattaactcgcacttttacacattggctaatgttcaatccttacatttcggaatacaaacagtatcgatgatcgatggcaatttgtttgataagctggaagaagttgctcgagtcgtcagaggtgactcccgtgttttcggcggccttcaggtgatcatgtaagaactcggttattttttgtcgctgtagccaaaaatctactcgatctcactaaatactgtccgaacatttctgcacagtactggtgatttttatcagttacctccaattgagggccgagattcatggggaaggaagcgaacggaggtcaaatatgcttttgaggctaagagctgggacaaagtagttgacgaggccgtcaagcttactagagtcttccgacaaaccgatagcgaattaatctcacatctcaacaaactcagagaaggcagatgtgatcctgatactaccgatttctttcagagtttagaacacaaacaatgggaagagtcgaacgtaatgaaattgttcgtgttcagtatttcctaatttttcatcttgctaagagtaaatcatctcagcccactcaaaccgactgttttactgagaataacagacttcctacgagacgtcaggttgaaaaagagaacctgagacgtctaactgaattgaaagacgatctgtatcgctaccaggcagttgacctctcagctgatataggtctcggacgtttcaggttagtggacgtgttagatgcagagagtcatttcaaaacacaagctctgaacaaactagacctcaaggttggaggtcagtcctgattttcgtatacgtgactgttaccaccctacttgcgcttgatttgagactctaagacaccgacgaactatattgacatatacaagtatcaaattcttgatgaagcccaaattatggttatccaggttagtgaaacctgctttctttgtaacctcaagaacctccacacttcctacatgtcctgacctgatgcattatttctatcctctctcattatgactccgccccaaaagaacatgatccctggcagagttgtgaacggaacgctcggaacagtacattctttccttactgtcgccgaggtccaagagatcaactctagagatcggtcgatccatatactaggaaataacaacaaccgaggaacagatgaaactctgcgtcaactcttaccggcatataagatcgacgattcattaagtgatttgcacagagatcggccgaatgttttgcaaatgttagagcccatgttagagcaagacgagtccatgaagtttccggtgatcaacgtagatggtcacctctacttcgttcagccaaggttgttcacattagggaggcggaatacggccgggagcgtggagcctatcgtggctcgataccaggtaagcctttcttatggatgttcagaaaatttatttcaggtctatggagcattgataaaaccgctatctgtctgtatatctagcttcctctgataatcggctacgccttgacgattcacaaagcccaaggacaaaccatcgatagggtccaagtcaactgtgcacagatgtttgccttgggtcagctctctctcgatgtctctccctatcctccaattctttcgggttcatttcataactcaactgtttccttttctgacttcaggtcaagcatatgtcgctatttcaagagccaagtctcttgctggtcttcaagtgataaacttccatccgacctagtaaggcgcttctccgaattatccatccccatgtttctgcgtgcgacccgctgatttgttatttttcggcctcgcacttctctagcgtcacggtgaacaaacgagttcaggagtggatgagcaagataagaccaatggatgtttcggatactgatgaggtcaactcatcagtatctccaatagagtcatgatatgattgatttagtatgattaatatgaacaacacaaattcgtcatatgaatgcgcctgttatttgacgggcaaaaaagctagagatatataggcgttcgtgcgaataccatcgaccgttcatcatcttataacaacctcttgggagcagctgaagagaagaggaggaaaccaagcatcgaaaagggaagctatgatggttcatatcgattcacttcagcttgaagctcatcttctcacaatcgaccttcttcaatcaatgtttcctcttccatcagaacttctcctctctcccgggtcggccgagactcttgccattctacgctctctttcgtcaccgatcgattctttgcccactcctgtacaggatgaaatcagactactccttcgcattggattgattgaagaggacaatacccttgagctggatatcaagttttcactgaggatcgggttgacaagcatatgtgcgaatagagacgagaacaaagtggatgctgatgacgtagcgagagtttctttagaaagagaacacggccaacaatgctttccgttcgccccctcagttaccttgctcgagccatcttggctctctcatgcttccttttcgcaactgtcgagtcgtgttctttctgcagtctacccagaccaattgccaacaacagcaacgtcatctcttggttcaacaggtgtttccagtccgacggtcatcatcgacgaagacgatccgacgagtgtgatcctccaacttgtagaggaaatcaagacactcggtcaagagtatattccaagctcgagaactctcggctctacatcatcttctgaagccaagagggtcgctgacaaaggggaaggactgggaggatcggcggaagatcaggtggagatgtttagagttagagatgctttgatatgtgtttcaaaaatgcaccgttcgttctttccgtcttcttccatgatcataccaagcgttatgtcagcttaagcttacacctatgtgcgaatgagcagatatcgtgaaccaaccaaaacttcgtaaacttaaagcattagcaacatcatcaggagcaagcggctttgtaaaatccggtcgacctgggatactgttgtacgagattgggagtaaagaggatctggcaaagtttttggaaggagttcgagtatgtttttagttctgctactctcttgtttgtagatcttacttatgagaacaagatgctgaatgattgtgtccgacgtgacgctcgatgcagagtctcaaatatctcgaatttcaccatcttacagccgaatctctctatcccccctcctattccccctacatgcacaatagtcaaagcgcatccctgtctgaatcaacctctcaatctatccaatcctcttcccagcctctcaacgagcataaactcttgaatgaggggaaacctggtctgatcgagttggatgaggtcaaggatctattagatattgcggagaaagtcggccggagagaatggtttagagaagcaatagggatgggttcgaccgggaagaagtccaggtaaggcggtagtagtggtgaatggttatcccggcctctgagtttggattgttcgctcttacatataccaacctcgtacaagaatttcattgtaaaagagaaaaagctatctgctgtatcaggagattaagaacggcaagacagacgaatgtgcatatgatctgttaggagcaaggattgtttatataaaggatatatgtacaaggacaatatgtaaagacaactaaagaagtggctttatcgtctcttgccgttttgctgcatggcgaggatctgaaccattcgaatgaaactatgaaagaaggcagaacaaggcccgagtagaggatcagtggcaaaattacatggagacgagctgctgtgaaaaggaacagcatgttcttacatgtttaacgtgtccaactcaagggaaattgactctccgaccgggtcagccctgtgtcgacccatagccgccattctagcgtgggccaaaatcttctgagtatcatacaagatgcatccaccgaacacagcgagccctccgtaaagggaaagcgactcagtgacggccaaagtgcgcaatgccgtcctgggcagaatcatcggagcaagcgaggagagagcgactacagcaataccagccaacagaggtccacctaggtagagatacttgtcttctcttgcggtagctccaacgtaagcaagggaaccaacaacgccaagggtgtaaagtccagctctagcaagaagggcgggactaaagaagaagagtggggcgattgagacagcctgaaaagcttggaaagtactgaagaaagccattttctggacgtgatctagagagaaagatgaccgaatgaggaatcagaacatcaaaccagatagaagatggctcgaggcgtagtgaaaggtataaaacaaagcttactctctggactcgtgctgatgcaagcatacatggaaccaatacctccgacgagacccacgccgagaacgacccatgggttggcctgcatgatcctagtagagattccgtacttgtgtagtgagtaagctcctagggacgtcatcgttaggcccaatccacttagaaaatcagaatgatcggaagacacaaatgccattacttgtcagctaaacagtcggctatatggggcgaatcagacgaggataggagtatgaaactcacgtgtatttgaaagtagagttcaaatgctctcgctcaaagggagtaaaacctcctcgagtttctcgattgagtacaacttgattcaaagatacgatcgaggtaaggaatcatgaatttgacgttggcgaacaataacgaagaaacggcttacagttagttccaaccatagctccagccacgacggctccagcaacagctgctttcttccagtcaaaggcaatggggcctccaggagcagcactaaaaccggcaccggggttgtaagagctccatctcttgccattagggtgtttcggcagagcctgaagctgtctgatcagtggcgaccgaagtgggacggatgttgaattgcaagtggagaacgtgcgggaagctgttgatctgaaaatttgcgaagcaagggggtgtagcttgagcatgttaatgatttttgattgtggttgtgattaagatgaagatggtgttgagggtgatgttgttgttgtcgtcgtcgtcgtcgtcgtcgatgttggtggtggttatggtggttgatgggcagaacggctgaagtggaaaaaaaggccacgtcatggaaacctcgcttagtcagctacggcccaactcatttatacctgctctcattcctcgggctttcccttgacctttccattgatctttgtcctcatctatctttctctctcttcaataaacaccatgctcgctattcttatagtactaggcttattgttggttcctttgggctacttctttggtctctttaggttccttgtcgacaagctgagccttaaattggagaccgacgaagattgggtcattgaggatctgctaattcatcctataaaggtcactgattatactccctactcgaaatcttttccttctctcgagctttcgtctatatgctgaaatcatctccaaatatcataatcatgagtcgacagagctgtagaggaatttttataggagagtctggatactcgtcagaaggtctggatgtatgtactctctgcctctaatacataacgcgcgatccgaatcccacatattcacgttctgttcttgaccatgataccagtacgatagaagatggctcatcgtcgatgcggaaactcataagtttgtcaccgctcgagaacttccatctgtgcgcgcacaaacaacagacgcttccatgcctcatatctgaaatgactcaccttgctcttttgtacgtgattgtcagctcgttttagtaacgccttcgatcgataaagcgtccaacaagcttcatatatcctttcctgaatcggttggcctcgattcattcgatatacctcttgatccaacatctgaagatcttgttgcctgggagctgtaagctgttccaccaaatcctcttctttctgtgtctgctgaccctttgtgcgaaaatcacttgttttatcagcgcatccgacgtgacaatctggaaatcaactactgacgcatatatcatccccgatccattggcgcactctcgactctcgacttatcttgatcggcccgttctccttgtcttcaaagggcctactcgacgaccccttcggcttccctctgacccagaaactttagcaaccttcccacctgacgctcgaacggcgttctcagatggattcccgattctactcgtcaacaaaaggtccatcgaagatgttgagcaaaaggtcatcctgtcggttgaaaacgaagaagaaaccgaatggtcggtgaaacctcgattagaaggtgacatcaaagagaaatggttggctgggaagggagatatcacgagaaggactagaggaaacgtgattgtcggtaagaaaggaggtaaaccctgggtggaagagacttggggagttattcaattcggccaaggtcaggaagcccaaaagatgattgttgcttcaccatgtggaaggtgtcaagttcgtttataataccttttctatcacatgttccgtgccgtttagcttcctacttacctcttgactttgtcttcctcgttgcaagctccctaacgtggatccagaaaccgggatttctaacccatcagtcccatacaaaacaatgacaagatatcgaagagtagatcctcgacagaagtataacccatgttttggaatcaatgtcgttcccacagttggaaaaggggttctgaaagttggcgacaaggtgaaggtgaaaagtttgaacaactggcctcgagtagagtagtattgtgtattattagtttttctgccttctgtacttgtttcaatgttccgttgatcatctacactctgaccctccgacgatcggaacacctctacacaaacatcgtatattatttaaattcttctggccaaatttctctttttctccatccgccatccgaaccaactcgtggattttgctcatacgctattcctttatcgatgggtgttcctagtggtactattgatttgtattccgtttgcattatgagcaagaaaaggagccaaccgaggtttacgggtaggtcagattttgattcacgtaagaggaagaggcggaagagaacaaaaggtattacgcacataaccatttccacgacacatcgcccattattccttcccaattccgtttgtgcccaagaaaccatctgtttccttctctgtaagctgacccccactcggccttccacttttttatgttttccctcttccccctttcagatggcatgttcaagaaacgaccacagatgcgatagaaaatagaggaggtgtgaatgaatgttgtgacgagaagagaagaagaaggctgacagaagaagataaggatgacggacgagttctgaaagtaaccgaaccgagcgctgagcgaaaccgactctcgctccagaaaatcctgacagcagtaagcaaaaagtttagacaataaaaaacaaaaagatttgaagttctcatgagttggacaaacagaaatgattcgagcttctagtgtcgataggttattgtatatcatccatgcatggtttacagcaagtagagccgtaaatattgtgaagatcgttgatctatgctcccgtccgaatttgataacccacccgggtacaacagaagaaggagacatgtcagaattgaggtctagactgtcgtgaaacaaacgagaaaatcatacttacaatacaatgatagagatcagtgtcccgtcatacccgagcccacgaagagagagtgcggtgatgatcagaacatagccggtgaagaccgttgaccagatcgaaaacaccaagaagtgctgaaatttggtgttccagacatgattggtgaagccttagggtaagattgaagcacgcattcatcaatagagtgttatagaactcgccttgtgattctgttgaccgacgcaacctccaacccaagctgtacatgtccctcgatctaaagtgagcaacaaggataaaagtgaaagattgttacaataacaggggcctaccacagtgatgatcaaagtttaggacacaagttccacaaactcgacagctgatagatccaaagaatcagtatgtaaaatttggcttctcacaggcggacaagtaaggactaataaatctaaactgactgatgcgttctaggcggtttcaataactgacaataaccgcaccatcttcctattcgttcaggttccattggcgtcctctccagcagttcctcacgagggttagaagtatttatatcctgagtggcattcatgacttgggccttcctctcctgaaataaaggaggtacgagtgggcatgaagttttctttgtgttcgctgagggctttggaacgggtgggatctgattagttagaaaaggcggaggaccggcttggcggggaggaggagcgggagcaggctggactgatatcggatagggtagcccttcgagcggatccgatgatggttcgataggatcatactgtttgatataatatgaaacaagaatggcaggctttcgtatgttgaggtaaaatcgcttcgcgttatagcacgcgatgcaggaaatgaagaaactgccttgacttacgtctttggctaggcctggaccagtgagtgtgatcttcaaatatgaccaggtgaacataaagaataagaggatgaagatgatgaggaaagagactacgggttctcacaagggaggaattggttcacatcagctcataacggaagaaatacgagagaaaatgaagaacacactgactccccctgcccttactaaacgctcttccttgtatcatccttacaaatatcctcacgacgactacatatatcgtccagcccactatgattatcaatatactgtatgcagtttcaatttataacaaatcatcaattaaacagactcgttagcgaggtctttcactgaactccatggatacaaaagatgcgttctacacgtacggaacagtccccttacgtctcatccatgagtcaggctctccagccgagtcattagccttcttctctgctcgttctatagcatcctcccaaggtgtgaacttcttcttcttttgatttggactggaacttgtgtctggcgaagcgttcgagatatcgccattggggatggctacgagggtttcatctggaaaaggaggaataaaggtagatgcttcgggtagactcgaagtcgagagagacataacggttgatgcagacactcctggttatggatcgtgatagcgttcttgtcgatacttgatgaatgatagttgtgaaagtcttctttggcgttgtctggtcacgacaagaaatacgtcatcgatatgacacgcggccagattagataacgagacgttggtcaccctagattacatctcttcaatggattactcctggagagcagttgttgcaacatcgaaagcaattgagttgtatcagactgtagagctccgtcgatataaacaaaagtttatgatgaagcgaatgcaggcggtcgaccatggaaggtgcagagtaacatacataaagcaagtgttagagcgttgcgggaagggggagagggagagacatcgacagaggagttggaaactctagaatgacaagaaggtcgggtaagagtagctagtggaaatgtagaaatcagagttacgcgcatgcataggtaggttctaggatcgacatacctcctagtgatatatcggattacttgtatcttatctcgataataactcattgcaactagaagcagcggtcaagatgaccgactggcgatgtttagtcgatctcaatctgaatggctcaagaacaaagctattcttggttgataacgggtttacgaatagttgaccattataatagtcaccagtcttgaatacgttgaacctacctcgagatggttcgttgatgtagagaagctaccaggagcagagggagatgggatgagtatgttagaagcagttgacaaagtcaaatccagagaacgtatctctgctactattcgttcgttcttggatattgatataaggctcatagaaagagaagatagagaaattctatcaaaagcgaaaagtcgaaaaggagtggcagttgaggtgaaattattacagacaaaacatgaaacatagccctcgtacaaaatgagatatcaggaagacgttcgatgaacgttggccaaattcgaaatggcagctcatgtagaaatttatttcattatgcgttcatgttagaagagacaacaagatcgctacaatacctctggttttatccccacttatttgtctcaaccctattgcttcgctctgttgaaaggcttcatcaaagtttgaacatacagaacgagtccattcttcagagacacaatctgatacacacatatataaacatacaactatgaggtttcttgtcaagatcaagcatgccactactcgagttttcctcttttgtccacattcattccactcgctcctgcgcatcctccgtgcttgccttccccaccagtcgtttctggtgctggcgttccaccaccagggagagcccagcgattccaggcgccaagccaggcgccaacaccttctgtcggcgccggatagatactttcgacctggtgatgtgtaatcagcgccgtcagcggggagaatgagtagagattgcctgttgctcggaaaaaggtatgccggttgctgcatcagccgcgctggatcaagacaaaacttttgagaatgaaaacatactaattgtccattctctgtccggcccatcgcctccacctaggattccatgttccaccacatccagtggaactcttagcctgcccttcaccttgactctgattctaacctttctatccagtcttgaccggctaatcatggcccactctccatcctgtccttctaccctgacctcacctccattcttactcccatcagttccttcttccgaacaagggatcaccaaaacccgctcgatcttcacccctgggtctttcagtagtatactgagtgatgttcgagcgccggtgaaaaagagactatacattcggagggatgatagatggaagttgaaaagtggaggtgtggtcaagtgaacggacggatggaagagtgtcggcggaaagaccgggggctctgcaaagaagctaggcagggttgtgtgtagatgtgagattgcgagggaaaactgagagacccattgagcgtccgagagtggacggttgtcgtttgaggaggaaggtctgggatcttgaggagacggttgtgagaaaaagaacgtcgacggaagaccagaatgaaacagattgtaagagccaatctgagaagaggaatatgtattcgtcgacactgtccgtttggcaggtcgacatgacgatcggaaagttaaacaagatgttgataagaacctccgctgaaagagtactcgacctccaggacactttgacatcctttcaagagagacaaagcacaagaagagctaggtgtggcaacgatggctgtttgagcgaacttcctcaatgttctgataatttgagaatcctcggcgaacgtgtagtgacaaagtgtggtggccggttattcacctcctcaacttcggcgcacgacgcgtctctccctatcgctgtttctcttaccaccatctactattcgtttccaaatgactggaacatctctctatctggcaggagcgaccggtctcacaggtaggtgttttatgcgcccttttgtctgcgtatagaaaggagagtaatatgaggggactgatggatgcgttggtattgggttcgaatggtgacttgaattttcccctgaaacaggctcacatacactgagagccggtctggcatcccatttagcgaccatcaccaccttctctcggagacccatcaacacgcccaccaccacaccctctactgttgctcatcggtcgattgtccttgattttgaccaccccgagacatggcccgatatcttctcggagccctctggacaacccacgggggaacagaaggggaaggtattcgctagttgcttgggaacaacaagggaagcagctggcactctagagaaccagcgaaagatcgactacgacttgaatttgagtctagcaaaaaaggccaaagaagccggagtggacacggttcgttctgtttccttctcttttcgtttcgtctatttccttctgtgtgagttgatcttgatgccctatcgtctatcccggtttccacttgcagtacattctcgtctcgaccgggatggcttcttcaaagacgcgctttgcgtatttgaggatgaaaggcgagctcgaagatgcagtccgagacctcaacttcaaatcaacatatatcctgcaacctggtcttctttacggacagagagaagagaaacggatggcagaaggttggagccagttcttgttcaatgggttaaaatcagttggtttgccaatgggtagatattccatcgatgccgaggtgtacgtttcatctcttttcatcctgaacctatcgcctacttgattagttaacaatctgacggactttctgtctatctttcccgtcttgtcgcagaattggagaatgtatcactaaattggctcttgctccgaaagacggcgtccagtaagttctctttcaatttgtctttcttcgttgtatggcaaaccaactaacatgtctggtctgtgcctataaaatactcagtgttctttcgaatatggagattcttgcttttgtcaagaagtgaaaggatagctttatctgagtgtgagatattgggaattacgtctgtagactacttctgaaggcagggaatagccatgagatctatatatgaaagtatttcagtcgcactatcctctcttgtccctctgacatttaaaccgactttcctcttcgagcactctcaattgcctcgagaacgaggacaagatctttggtctccctcgtgtcatgcaccctgacaacctggacaacgccactagccacacagcgagctacaaccgctgctgaaccataccctctgtcctttgggtcggttctacccgtgagtgcaccaatgaaaccctttctactggctcctactagaagaggatacccagcgatcgggtttctttccttccctccggacacatttccttcccgaacgagatcttctagacctgccaatagtttccagttttgctccgccgttttggcgaaaccaattcctgggtctaagatgatgttccatcgtttgactccagctttgatcgcctgctctacaacttgagctagctccatcctaacatcttggacgacaccgttcggataatccgtaagggagctcatggtctgactgtcccctcttgaatgcatcaatacaaccggtgcatcagactcagccatgacgtcccacatgccttcagccctgccagcatggacatcgttgatcatactggctcctgcttccatcgctcctctcgctaccgatggtcgataggtgtcaactgagattgggatggtgatcccttctgatcgaagcgcttggatgagagggacaactcggtcaagctcgatctcttccgaaactgcttccgcaccgggacgagtggatagaccgccaatgtcgaggattgtagcaccggactcaatcattgaccgagcggtttctagcgcaaccgaggttgtagggtacgaccccccatcggagaaagaatcaggtgtgaggtttagaattgacatgatttgcgtttgaggacagtcactcgagaggtgggaaggtaagagagagattgggtgatgaaacgggatcactcgattaaggcaaggcggaaatgatggaggcaaggcttgatagagcgccgagatagaaacggaataggacggatgaataaagtctgggatcatactacaagacacgtgttgtcagtaaacaacaatctttctctcttccctatatagagagtattgaaaacatactcgatcaaagggcgcaaaacaaactctcgctctcccagcctagggtgaggaacgatgagccctccctcaggtgtctcaacgtcgatcacctgatcatcgtagaagatgaggtcgagatcaaccactcggggtccatttcggaaagtttgggttcgaccaacgccagactcgatggcttttaggtatgacaacaacttctcagggccgagcagagtttcaatctggaacaggtaaagaatcagatttcagctctctcatgaaacagaaaaaacgggtgtactctctggaaagatctactagaaagacaagagcaagagaaaaagtacatacgatgattgctccattgagaaatctgtcttggtcctcgacgtacatcggctcactctcatacaagaaacttgtatcaacgagcctaaagtttccctcatctctcagcaaccacttgatcgccttgctgatatttcccattcggtctccaatattagaccctacagccaaaacagccgtatgggatttcaaagcgtttccttcatcgtcagtgtgatcgagaacggtggaactagacaaaacagatgatcgctgtcgggtgatctcgacagatgcgtatttggcgaacgtcaccgcgtacggtttagacactcggagtgtcaacgacgggattggagggtatgatggaagagggattgagaacagatgggcagatagtgtctgagagagggattcaatggtctggtatgatgttggttgaacatactgagagaggagtagactatcagcttcccatcatctttgtcacagcaaatattataaacaaggtctcacatcgtgaatagcattggcaaagactcgatgggggaatccggctgatgactgagatgactttccttcatttgacgtcaaggggatctccaagtcaatcactaccgcttgtttctccaacctctcctgtgggttgacgccgatgatacacctgacctcaacttctttgatccagatcttgctctccttctctgaagacttcgcaagtttgctcccacccctaaccatctcgaccccaacttttcctccagcaagatttttcaaacattccagtcggaccttgacttgacctccgttgttcattctgaccaattcatcggcgattccttctgcacatccttcgatcgattcccatgtcttggaatgagcgagcgaaagagcggctttggcagcgtcagagtaggaaagcgtctgagaaacattatctgtcaaggcggacgctatgagaggatgagtgatggtgaaggagagtgagtggggagaaggattcgtcgggcgatgccagtggtcacccgaagcaagaagaagagggaacacaaggtcggtgatgacaatctcgtctggtttatttgtcgacgacatgatgctggtgtaagaaatgaattggtgaggaaaagttcgtccgaacatgaagcatggcagactagaaagatagaaagggagtgaattacggaagatcacgtgcattcgattctcgcatcattccaactctcatctccgaagtcgttagagaaggtggtcaatgagatgatagagacaacacaaatggtacacacggtggtgagcaagttcgtacatgaccatcatatagagaaacggcgtgcggtctctcatcgacatcttgctttctggacagccgttcacgcaattcaaccagcgtagaaattgaccactgtttcgttttgtttcgtttcttcattaatgtctgtttcatctccatgttgaaccttcatcaatgctcaaatcacacttgagttcagcacgccatagaaaactcccgacagccatcaggatagccgaatatcgaggatgcatttgaggactagctattatgtggtggggaatgaatattataaacagcagggcacggagagatgaattaaaaaggttttggtaagaaaagtaggaaggtgattaagtgttgtaagaataagcaagaaaatgatacagtcatgtggaaaactttctgatgcagcgatcgtatcccctctctcttcgacatgaaattgctcttccggctcgacactccctcgacacaatcgttcgatccaccacgagaggaagtaattaattagaacaaaaaaaggaacaaaaagaaaataaaggttgttggactgcgtgcaaggtattgtccagataggacaccgaagactcggaacacttaaacaagagcaccagtgaatcgatctcctcttcgaacagatcggaccaacaaagcgacggcaacggcggtggccacggtcataaggatcctagaatttaagcacaaggtgaaacggttcaaggttagaatcttgtgagaacatgagttaaaccaggtttggaagctcaccagttaacccaggcgaagccctcgagagcgttgagctgaccgcagtgggctccatcgaactcgttacagttcaatccaccaccaagagcgtcggtgatagaggcagcagcggcaagccaaagaatccagctgtagtcaagacaagacaaaaaggattgtggttgagcatcagttgaaggaattccagtggcaatcctcatcgaacaaaggaacgaaactgacgtcaagatgagccagataccgtgggaggcgacagaagtgaggatggaatccttcttgatctggaacaaggcgacaaagatgatcgagctaatttcatttgtttgatcatgaagaacacgtcaggtttcaatcatccgatggatgcatcaagatctaaaaagtcagatggacgaacaagacaagcgtccaccacgaaaggaagcagatgaatcgcgatcggtctcgaatagaaccatcagggtagttgttgtgcctgttgtaggtgttgaccagccaggttgaaatagctccctcaatgatagtgaacacgatcaaaagaccaaagaggactagtaaagaacaaaagacgggaaacaatgcgcgatgagcaacggatgacaggccatggtttacgtgatgcagagtacgtccatcctgtaacgacttactgggatgtcctcggttaacgtgggtatcgacggccatgattgatgtggatgtagatggtcttcttttgggtagatgtggctggtagagatgtgtgtagagctcaatggatgatgggtaggaagaaagagaaggtgggaaaaaaacttaagtctgggttttcttaagaggccgggcgagggattccaagttttcaaacccagtgtccgcgggaggcaggactgacgtcatcgccggggaatggtctcggatatgctggagtaagcctcggccgagactgacatctcggcgggctggtagcttaaatgtctccatggatcgaacgactctgagcatcatcgagttcagtggatggatttgcgtgtgggtgagtatgcgtgtacgtgtgcatagatctaggtgtaggcgtaggcgtgaacgtagaagttgagtggttcaggcgagctaggctttcccgtcgccctaatgtccttggatgacagactcaagctagagatccttagcacatatcagtactgaaaatgctatcacgagggttcatttgactatgtttcatagtcgtcatactattctcccttcttcctttttgcctgatatgtctcgagtcttacttaatccttgctactccaagactttgctagaaatgacatacactccgctcatcctatcgacccactcgttcgttctctttcgtccaaccatcgcctcacctctgtcttttcgctcattcgccaagctcgcgcgcccgttcgttcgtccaatcgctcgtacaacttcaaaatcgtcccacacaccaccaccatgtctttttgatcaacatcgaacagttcccaccatctgtccggtaacgggtggccgatctggtggaccgatagaaagattgttgatgccgccagtgtcgatggtgagaacagcgcaggaagagatgtttgaaggctaccgtggaagaggggaggaaaagcaaacacgtccacacaagacacacttcaattcgtttctctttcctctttctgatcagaaggaaaaacgtacgaatcatttagtaaaccccaagcgttctccacgatgcccttctcttggttcccaacgaggcccaacatctgacagtagctcaccagcgtcccgtacggcaactgcacttggacgttgaaccctaaccgtttaaggacctgcatttctgatatcaccattgcgttcttcagatcataaaatcttgagcttgagtacgccatcgggagataagtgaatttaggaaatgttgtgctagaagaagaggatgaatgctcgagcaggtaatttgatctctgatgtaataaatcatacacgttgaccagatctctctactcagaatataatgaaatacatcagatatgttagaccaaaccgttttactcgtcgaaaggtgttcaacaagaactcactaaacgcataggacattcttctagtttcgttgctaggtaaagcgcgcccattccgatgtcctagacacggacggagacacgtagaccccagaaggcgtgtaatttggatgtcttggatcagttagcacagtacgtgtatgtatataatgatgaagagcaagagcttacccggattccaaactgcttcatagaagatacataccagaacctttggaagaggatctgggcagtcgccatagctacttgtggtctgatagtttcctccatcgttccaaggcagaagtatagaatccggttcagaacgagatacgaacataaacgacaagaggagtgtatcagctatgtagatttgacccaaagagacaaactacgagaaagggagaaagcaagcgagactcacaatttggctagtcggccagcctcttggattaattgagctccatatgttcggaggtcgtcctccaaatcctgaggaattccatcctccctggaaggtgtcaaccggatctgccgaagagatgccagtggactgaatatgatactcattcttgtagtggatggagattagacgagaaaaggcttcttactcaatccagtacagccggccaacaatgtccagttgggttgctatggttaccgtcatatcggccaatcgatcaaccccagcacgatgatacccacatggcgcacccagaacgctcaacagacatccatctgagaacgcttctatctcggaatctctgatcgtacttcatcttttgttcccatatcttcgtgtgcgttttgctgcaaaagtttggtcgtgtcgtcttggattgcttggtggtgttgagtctgacaaacccgcttcttttattatttgccggtcaaacaaacccttgaacaaaccatcacattatgatcaacatctcatcttctgatgaacgtcttcactcgaaccctcacttccactcgtcgacattccttctttcgaatatcctcgctaaataaatctcctttcccaatcgtcctttcgcacagacttattttgaaagacccatatacagttgtttctcgtagagatatgtccatcaaagccccatttggatcttgggattctcccatcagcgccgatttgattactcagagcgctatcagctttggcgagattgcttcttctctcaagtacactgtacgttactctttcggcttctttctttctttctttctcggcataagagaagaaaagaacagagaaccgcgactttctccgtgcaatatatggttgctcgctcggccaactccgtagatgatggaagttgacactcgccatccgattgtggaaaactgaatagtaccacaccgaaggccgagcttcagagggaggaagggaggtcattgttcggactcctctcaaagattcgcttgaagagaaagcagaagatgtttatggccccgaatttaacgctcgttcgtctatatcccatctttgctttggtttattatcttcatatttatctcacaacgactctatcggaactatcatcgtgaataggatcaagagttcatgaatatggtggaggagcatttcatgtaatcaaagaaacggatgaggtattcttcatcaacttttcagacagcagggtttatagcgtcaagcctgggggcagccccactcctatcaccaagggtatgagcatcatttgatcctatctttcaacttgatccgtagactcattctattctgatgtcaaatttcacctgtaagatttgaaaaatactcggtactcgtctcttaagcctcatcctttgttctcgactacccacccttatctactggccatccaagaagttcacgaagacccggtggacgtgtccaaagtctacaatagcctggccttgatcgacgtacgatctggcgaaacgaaggttctccagtctggcgctgacttctattcgtcccccagatgggcgcccgatggggtatctatctgctggatactctggaatcatccgaacatgccttgggaggatacccaactttggaccggtcagatcgaagggcttggcgaggtgggcgccaaggtcatcaactctaagcgaatcacatcgggtgaggaaacagcggtttctcagccgacattctcggaggatggaaaatggttgtacttcgtctgggataaaactggattctctatcctataccgagtcaaagctgggtctgacgagaaaccagaattggcgatggagaaaattaagagcgatattgtttcacccggtgagcccttttgcattcttaattccgcaattgacgctttgtgctccgggcaaatgtactcacaaataggtctctcactgcacctgacagcttggcggcttgactcttctcgctatgtacttctgtctgacaaatacgctctcatcacgccaagcatcaaatctataatggtccctcatctgctcgacctaatcaccaaaacctccacccccattcccagtccttttgttgtcttttctgagattagacggatctcttcgacttctgtccttctggttggtctgtcggctactaagccttccaggttggcaatcctgacgtttccgaccagttacgacgtaccgggagtaaagttcacgacggtcaaatcttctgccgtagtggatgagaaagtcattccaccaggaacattttctgaaggaaaaggtctcgagtttgatattccgggagcgggcaacgacgagggaaagactgtcaacttgaacgtcttgttctatcctcctaagaatgctagatatgctggtggaaacgatggagagaaaccaccagcaatagtcagtattcatggagggccaaccagtcagtctcttcccggtcatcaatggagaattcagtactatacttccagagggttcgcctttgttgatgtcaactatggtggaagttccggatacggaagggactatatcaatcgacttcgaggtaactggggtgtggtcgatgtgtccgatacaatcgaagccgtaaaggcttgtacggctcaagggttgatcgacggaaaacgagtggctatcatcggtggttctgcgggtggtttcactgtgctcgctgccctcacaaagagtgatgtattcgccgtcggaatctcctcttatggtataggtgatataaaattgttggcggacggaacacataagtttgaatcgcagtatctatttaagctggtaggaggtacaccggaggagattcctgagatctatcatgatcgatcgccagcataccatgcacaaaacatcaaggcttcacttcttttgcttcaagggttagacgataaggtcaggatatcgttacatcacgttgcgcccttttcgtctcgtcatcgccatatagaatctaactctctctgtctcttttgtttcttttaggtcgtcccgccagaacaagctcaagatatggccaggagagtggaagcagctggtgggaaagtggaagccgtttactacgaaggagaaggccatggttttaggcaagccaagaacatcaaagattctttggagaggtcattgagtcacatgaggagggcctttctctgatcagtaatgcccatgatcttgattttgattgtgtcttggattcttctcactcccactcctatgaactttttttttttattcgatgtttatatgtgatgcctttttaaccaaccgtggtttgaacctatttgaagcctccatcaaaaaaaattcgaggacttgggtcttatcacactatagatgacagtaagagcaaaataaagaagacaaagcgagaaaagcatatatgtaaggaaaggataggattggaagaaaggtgaggtaaattcggcccaagaacggttagtgagaaaaaaaaagtcaaggtaaaaagcaaagggcaagtgaagggagagaagaaacaacgtgttttaatcaataaatcgaaaaccaaaatgagaatcctccatcaacggatggcgacaaacgaacgacagtctaaagagacagggaaaaggaaaagaaaaacattcgagaggcgaaagggatataaatggataccaacagaaacaactacaaatattgatatagaaaaaagaagggaatgagaagagagatcggtgaaggataccaggctctattattttctcaattttagatcatccggtgcattcttctccaaccactgtctgtcccattcttcacccaccgctacctgataactatcacctctgcttctgccatgattgccatccggttcaacgctctcggcatattgtcttcctattaagccttccgtttcgaaatgttgctgtgcctgagccaacgcgcgggattcttcttcccagctatccgcagagatcattgagaatccagaaagagagttcgcgcaagagttgagatgttcacagttcgatctgtgggcctgctctacagcagtcaaccaaaaaggtcgatctttggaggtgctcctttttgggtcgctggattttctcggtggcgacaacgcttttggagtaggtgctgttgagatggttcttgtcggacggaacgaagacgaggatggagagggtaatgaggatgatgatgaaggaccgtccataaaggtgggcatgttatcactcgacatttgcgcctcaatgtatgacacattcggagaggagtgtgaagagtatatggacgaggatgagcgaacgataggatcgaggactagatttgacggattcccatacacccgcgatggtcggagggacaagttccatctgagagatatgaatctttttacgaacggaattagatagagcaagaagaaaccacagtaagaaaatcatagaacatgcaagtttcaagagaggcgcgtacgtcatcgactaggtcaatgaagagctacttactcgacagcatagttcggagcctgttaatcccatatcaagtaaagaagatagtcagccaaatgtaaaggttgatccgattaaaagcacgacacgtacgttgtgggcgaccaattgctaagttacaatttcaagacagacagacaaaacgttcaaattgtaagcgactatgttaaggagctccggtatgacgaatcgagcgaggaagattcaagctcacctgttcaatcgtatgcaacttgtttgataggctgaccttattgtttatggagagcttgtgttgagcgtagctctcgagaactgcttttgcgtggaacctattgctagctgtttatgaacaagagtaggtatcatgatttgatcagaaatttgaaatcaatttcgaagcaaagaaaaagacaactcggtatgatagccctcgactgaatcacctcgacaggcattgatcagactagaccggtggagaaaagagacaaaactcacgctgaacaagaatatctatcacctcttgtttcgaatgtatcatgagttggtccgggtcgtcatgatcatgggagtacctgaacaatccagagttcggcatacttgctgaaccttacaagggaagaaagagaaagaccaatggctgacaaaggaacagtagcacgcaaaccaaccacttgaaataggatggagaaaggaagaacaagaagcagaagagccaaggtggggcaagaggtgcaagtcaaagaagactcaaaagcggcggtggtgtgaaactgaaacgggtaaattgttacgaaatgtggtatgcgcagcagtcgaccgggccaatctaatcttgtaaaaatgttcccgatagtattcacgtgatccagcacagccacactaactttctacattcatcatcttatactcctcctacaagcttcatcctacctcattcgacaaggttgttcattcccgtttatcccacacactctgaattttacgaggcatcactagatagatgggagcagatcaatccaagcctaaacagtcaggtgtttcaacaaaagaggcagagtccgagcccgacttttatacactactccaaatagagttagctcttccacttagttttcatacttatactttcttccttctcgcgcaccttcgaaactaatacgacaagctcggttggcttgaaaaatcagcgaaggggcaggtgaatcagaaattaaagtgggtccgctaaaatgcacacaagaatggtcaacttgaacttgcttggccttgtgaggctcagcttattcattcgctctttcccttgctttgaacgattagaaagcatttcgcaaacaggctcttatatggcatcctggtacgtttcagatacgccgagatatactgaacagtgttctcattagatcatcttcactcaaccaactatgtgtatattcctcaacaacataaagataagaacgcacacagagtccaagaatctacagctcacttcgcgcgacttcaggaagcgtacgagatcctttccgatccggttgaacgttccttttacgatagacaccgaaatgatagactggccgccgtagaggttactaccgaagatttcgaggatgttcttaagggaaggaaggagccacctagaccgacaaagaagagtagaggtatgggcgtaccagagttgatgaggttcttcgagaagagagtgtacgacaaagttgggatgaccgacacacctggagtgagttgctcttcctctcaaggattggccctatctataaccgtttggctgaccaacccatcttcttgatcctcatcaataaataaaaagggattcttccaagtgtacgagactctattcaagcatctggccgctgaagaatcagctcatgcggagaaatatatggattatccgtcatttggatcatcacaaacaccatggtctcttccgaaacgaaccgatattcaggtgggtttttcccacttccgtcttgcgagtgcgcgcagagacgtttctagagataggcatctgaaaccttatatttcctttcttcgccacaatattttccttctgtgatgaggataggctcgaaatttctatacaatctggtcaacattcgtcaccgagaaaaactttgaatggatcgagatgtgggagactgagcgagcagacggaagacaagtccgaaggttcgcctgtcctccgtaagactgcgggccctgatgtaccgaattaatctcgcttcattttaccgtcgtatctggcgcttagattgatggaaaaggagaacaagaaggctcgggacgatgctcgaagagaatataatgagactgttcgagtaagttaatcccgctttttctctactttcaattcgatcgggtctcctcctcctacttgccgcagactcagatgtccctttgtttcaatcatcaggctctggtagctttcatcaagaaacgagatcctagagcacccaaacccaacactgtccctctcttccagcctactcttcctcgtttatccaactcgaatttaaaatcaaattcccaaagccgatcgaatcttcagccggacggcccggtgtataccccccaggattggcaacgcgttcaacctgggtctggaaccgttctttccgattttgaatcttctgatgaagaagaccatgacgaaggggacgatgaggggggtgaagaggatgaagatgaaccagacggggtgggaagagtagatgcaggtgaatctggggaatgggaatgtgtggtatgtggaaagaccggaaagagcgaaggaagatggagagatcatgaaaggagcaagctgcatagaaaagaagtggagaagctgaagagagagatggtagaggaagattgggatcttgggcttgatggagaggaccttgatgatgaggatctcgaatgcgagcaggatgatgaggaggaagaaggattaaaagaacaagtggatgaactgaatctggcagaggaggaaggatcgataccatcttcaaccaatacacttccaaactcaacccaaccattcgactctcgacactctcaaacccaagaagaacaacacagagacgacgacactgacgatgacgatatctcaccaatcatccaaggatcatccaaaaaagcccggaaaaagaaacaacgagaagagcgagaagccaggaaacgagctgaactggctctagctagttcgactgcctcttcttcaaagggcgcgcgcccgaatgttgcccctatcaagaacccagggcaggaaatagatactgttggggtaacaagtggtctagaagaagagaagaagggagatgaggataaagataaagacgaaaaggaagaggaagaggaggaaacaggaggaaagacagagatgagcaagaaggacaagcgaagggaacgtgaacgaaagaaaaaggaagctctccagggtggaaatacttcgagcaaagaatcaggagaacaaacaatcgtcaacggatcagaagtgtgttggtttttcttgttttcagttttctttttatatttgacatcaactcagccttcctgtcctcactatttttatcgaaatagaaatgtacgatttgtaaatctaccttcccatcacgcacgaaactatttgcccatatctcgaaaactggtcacgcagccctcaagaacactggctcggccggaggtggtggaaatagaagattactagagggaagtgatgatgaagcagattcaggctcggggaggggtgggaaaggaaaacgaaagggcaagaaatgacactgtcttttcctgtcccacctctctggagtagatgaactatgtcattcttcatccataagaatttgacgaaagtatccgtcaagcacatccaatgataacatatgttcatacaattttcaaacttgtaaggctaacactccaggaaataggatgatcggcaaaggccttgtacatataatgataggcagatattcaaaatcatgcttgttgttgctgccggttgaccatccgttcttctagaaatggaatccagatactatcaaaacaaacagaaccagaaaaatcaaccattcagcatctcgtgattatttcaaccaagagacgagtagctaaagcgaaaaaggagaatttacttactctccatccagatcgaagtcgcttttaaatgtgaccgctgccggtaacacgataccccatggtctgtttgaccgcgatctccgtagaacagctatagattgtcgaggatcgacccctcgagtagaatgtttgggtgacacatagtttgttggtgtttgtacaagatggtcaaatggagttggaagaggggcagcaggtgcgttagaatcgaaaggtgctccttctgttattgcgaggcctattataggcgttggtgcagatgtggtcatagtctttgtatctgctgtgggcgtgaatatcgatgtttgtgtcggtgtgagagttgacagcgaaggaatggaaggagatgtagatgcagcaggtgacggtagggaagcggaagcgggccattttgattggacgatggggagatgtttcagagcctcacgaataaggagacaagggcctgaaggaacgggtggtacgttcgaatgagccgtaagcttgatccttgagggcgctgtagtcaatttcctaagcggcgatttgtctatcgagccgccatttgctgaaaccagtccggtgttctctatctctacatctccactcatctcgtgatgtaagccgtctactatgttggtctctccattatgctctgagcctgaccgcttcagagagagactcgatcgttttctgaccggccctgtgggatcccttggcagaaactttcctttctctcctctagcaggctgaacacccccgaaaccaggtaaaaatctccctgattcatcccgaccaggtaaatcctctccctccatattctgcaattggcccaacgtagagccaacgtctgctagaaacgaattattgatagagtcattggtcgaatggtgaccggagaatttccgtcgaggccgtggtttgggcgtgatgacaggtttatggccaacatctaatccaacagtatactctagaccaaggtctctgacatatgctttggaaggtcgtatgttgttggcggcggcagtagaagcatgatggggtacgatgataagagaaggttcgtccgaatcaacagaaacagaagagtatcgtctctttcggctggtcgatggtttgaacggaagaggcgaagcgggtgaagtaggttgaccggctggagaagtcgaagcggttgatgacggggtagaaggtcgatgtttaatagataaaacagcggaaggaccatcagtatgtcgcagactagacactctggatggcaaaagagtggtggaagtcgaagctggtaagacaagaatgtcggtaggcccttcctcagaatggtcagcccgtcttggttttctgagcatcaaaacggagaaaggaccaaaaggcatacatgcagaacaaacggtcagaattcaaccaaggagttgagggtagaatcccaaagaagaagagatgcaggagtaagagcaaaaacacatacgaatgatcccgagctggaagaagaaggtcgtatcgtttgagaacaacttcagcttcttctaatagcttttctctcagtgcctcagggtcaacctctcttctgggtctcccgactacggacgttttctcagctatagcattgactagagcagagaaactaggaagaacacgggaacaaagagagggtcaatgtttatagtcttgaggaggttcaacgccgatagcaacaacatggtactatgacttgaacgataacgcagaagtagagaaaataatctcttaccttttggcttccatacttttgatcaattcgattctcttcttaagattatacctttcgtgcgcccatttctctttctccagtcgtttttgcttcttttcgaatgtctcgtattttcgatgaagttttgtgtaatattcatccgaggtgtcctgttggcctgtcgtctgcttgtaccaattcaagataaagaagtcagtcatactcgggcaggattcaagcacagtatgatcccactctgcccttcctatctaagttgatacgaacagtgctttcctttcgtcgacgtagtctccccccacccacgatggcttctgtttcttcatcaaggattttccaagactgggtcggtagcttcttcaccgaagtaggcgcggctgatacagagcttttactatcccacgatgacctgggtccagcttctggtatcggcggaaatcctgagcggtctatcttcgtattcgaggaagaggtaagggcaggtgctttgggttgatcgactcggaagtaccctgactgctcgggagcgctcaagaggaacttgattggggggaacgtatcttccagagctggaacggggtcttgtactattcagacaggcgttcaagaagcgagatgtgatgtaagcttccgctcaactcttcaatgtcctttggacatgaaaacagaagatgatagggaagaaacgcacccattctttccctgcattcttcaacaatttcctcaatctcttttctctccatgaagctaaggcctccaagacctgtagcactggccgatacagatgatcttttcgcccttacaggaacttgcctcggagcaggtgctatttgacgtcctctgtccgtagatatttttctagatttcatggttgatgatgaagctgcttctaagtgaatagttgactttggcttgagagcggtgatagtcgacattctctctggccaacgggaggtgtcatcttcattgtcgtcggctgcactgcttaatggcgaagaagactgagccctagcctttcctttctggattggtgttaaggagtctgtggtgggaggagaaggatgactctcgaacatggggacccgagacgatgaaggcaaagacgaagagtttgaggggaacgcgggtatatagccattgacagatttactggcaaccttaggcttaccagatatcaacggatttctgtcgagtatgttcatccaaacaaaaatgtgagcacgtaaattcaagacgagttctgtcctgtcggtttcgagaaggataagggagggatggcgacaaagtagacttacgcgttcaaggacgcgtcgtttctttcttcctctacctccggattcagcagacgatggagcatcatcttttggtcagaaaagatgctccaatcgagtacaagagaatcgtgaggaatctctggatggcagagtaaagatgagcggagtgcgggatagttggcaggggggatgcaacgaaggctcagagaagatgatcaagaattgtccgaaaatatattaagaaacttttacagcttttgtaatggacgcggtcgcacaacctcaatatcaccacccacttctcttcccctcaagatgaacggccagccccagacttcaacatctccaacaggaccactccatattcctcctccagactacgtgtaaggccgagacataccttctagccgttcgatcggttttcagcgcactcctaggctccaagagctcacaggttgacacacgcttctactcacctgttgttgaaattgaacgatggtaaacagacctacaggaaatgaaggagtcgatcgactcgcattcttccacatcttggagcggctcaaggtcattctctctttctagaccaacttactctgtttgagcgatcttgagtagagtttcaatagatcattgtcggctgaatccgaagcatgctcttttgttccgtttctcggagggacacagactcaaaagagagctggctgggtgagagaaggtgtaagtctgatcttgtctctcttcattcgatcaccgactttctctgcttctgcccacgctccattcgttcggagggaaccccagagaaaggacggcatcgaagtaactgactgaaagaacccctgaagctgatcaataacaacctgcgcgtttgttgacctactacaggtaaaacaaccagagagcatcagcgtcagtatgcaaaacccgacagactctggcgatagtaaccaactctttatactatctgaactcttccctgtacttgtcttgcacgtctgaatataaattctcaggaccacatgtatcgaatgggcgtgcttgcattatgttgcccaaacgaaggggcggaaagaccgttggacatcgggaaatgcgtcatggtttgttgcgatcttctcttgcctttctgaaaggatgtcttcagagattatttctgatgggcttatttcttaatttttatttttattattaaaaaaaacttatcttttcagatggccatcgtgtgagttatcacgaaaaacagctcatctagttcaaaaggaagcatattcgttgacaatactcgttttcgtttattgatcgttcaattctggcgcgtcttaaatgacataaagacatgacttggcagaagcccagtgagtgtcgcatctaagtcaagcaacgaaaacgttctgtgttgtaaccgtcacttatcaatgcgcgcggccgactgtcgatcgaccacagtgttggtgatatcacccctgtggacggtgtttctaaggaagaaaagcaccgacgagaaagagtgagttctgaatttcctttacggtttgatccctctttatcttggaaatttttcgctttcattctgatattggctatccagtatactgaatcataatcctctgattgagggcttggatctaataggaggctatgcgttcgttccttgaggatatgctgcatggaggcgaagccgcccgtcggattggggctctttgggacgtacgctcaatatcaattttaagcctgctttctccattaacagcatccattttcccgttgatttattcgccgtctctttcatgttttttatgttgactaatgtgtgatgagtaggaatacgaagatgggatcacaccagaagcgaagttcgtcaaagatcttgaccggttggagcttactcttcaagcaatagagtacgagcgaggtttgttcttcttaatcctctctatccttgtccaacggggttacattcatgtacctcatatctcatgttttttaacctaaaatgcgttgatccgtttgtttgtgttgtgaaccgatagctcagggaacgaaaacaataggaaccttcgtagccgacacggttcggcgaatcgttcgttgtttttctttcctacatattcttccttcctcctgtctcaactcgttcatagtttcgatcaaatctgcacaagatcttcagctgatgtcgttctcctctctttctctccagcgccaccccgctgtccaagattgggctcgagacgcccttgttgaacgtactcagctgtatgaagaacgtggggatcaagccgaattgtggcagggagtagatgtagagaaactgggtgaacctgtagttggagattgggtcgccaagaagaattagataaacggtcacccttcattgttttgcttctcgtcttaatgtactttcaactggtcaaaagtgacgaggaagagaacccagtccagatactaagaactggtagaataccatcgatacaacggatagaacattcgactcaataacccttccctctgtgaaaatcactcatctctatgaagaatcctcctaagaaacttctctccattgagaatctttccggctattcacataaacatcgccttctttgcccggaggagcccatgcacccttttggccgggagcgaggttcgagacctgtgaaagagaaaatgtacaaaagaagtattggttagatttttaactcttgttagagagagatagggacaaagtagcaatcaatcaagatgaaagacgaaagaaggacgaacaaggtaccgtttgccttcgatcagcccttcatctccgaaagataaagcgtcccaaagagttaattgaccatttcggagagctggttgatttgactgaaagtctctaaactttatcactctgaacgagcggacttctcggggcgggcatctagactgtgtatgtcagaaacagaaaattggtgtatgttttttttccttccagtgagtcagcaatcagctctaacagttttgacaaaagatgggattaaaacagatgactgagggacagacatcaatttcatctaagatatcctgtccaatcttcgacccgtcctcctgatatttccgtttcataaatgatgccaactcagccaactggccaggttcaatcgttcggagaaacgctgcttgatcggtagcgttctcgagatcatcgaagagatcttctgcacctgcgccgcctgtcccagaaattgcaaacgaacaagaagcgcaaagaacgcacgaggtaaatatcaagattatatatcacttctttgagaaacggaagtagacagaaaagggcattaccgtcttctttagctttgaatcctcgagacaagcgttcgattttatcaatcaagcccaaaagatcttctaatttctgggtcagctcgctagcaatcttttgtttttcggcttcttgtcggtcctgtcatatagcccaatattaagtgttcccagagtacgagtacaaggaagatgagtgcccattctcttcctaattcttccagattaagagagaagatggaaagattaacatacattccatttatcctgtagagctctttcctctttctcaccccttggaaatccaggcggcgcacccgaagcgaggtctaccgcatcgacgtaccctattggaaaacatttcaagatgacgatgtccatagtaggaattaatccaccgtccggtgagagcgaggttaggcaagcgatgaaaggacgaggttggaatcctaacttggcgtcccatcgagcgagagatgttgtattacccgtgagggtgagataggtcgaactgaaactgagtagtgggggagctccgccttcttttgcttcgagctatagaacaacaaagaaagggggacgattgattcgtcaatattctcatgaagtgatctgacctctgcctcgtgcctaggcaatcctcgacgcactaagaaagaaaagggagttcactcacacgaactccgttcatcccaactttacacccaactcttagtttacctctcttcacagccctcgtcaagcagtcatcgacgttagccttaatcttgtaccacccatctgtcagctctaaaatgggcacaggctggtcccccgtctggtttggagcatgtccaggttcaggaggagcgggtttaccccatgtgatttgagagatacacagaataagagatgaagcgggggagacgacttgttcgtgaatcaactttagagacgatcgatgaccttgattgtattctctttcgtatctggtttcccgattcaatcaacagatatcgaggtaagctcggccgcgcccaaccttgaatgcctcaattaagaagtctgcgtaaattggtctatacctgtatctgatctgccttcctaattcttcccagctaaactttccttcggcaaataatgcaggccggcctcttacaatacatgccagtttccaaaggatctgggaccagtgattctctacccagtctctagtcgccccaacacacccttctcgaatcaactccgatcgcaccaaatctaagtccaaagcacgagactcatcagatggatcgatgaaagagtagaaaggcgcgttgagaagattaagcttccagatgtcttcaggactagatatagcatgggtaattttgaaaaaaaaaaaaaatgagttaaagaacctgaaggaagaaaaaaaaacactagtaaaaaaatagagcgcgacttacacgcccatctctctaagctcttctatgctgttgaattcaggcctgatgtaagcttccgccatcgtctttctaccttctaccgctacattccatgataggaggtcagttgtctttgacaccggcagtaacgcaagcaagaatacaaccaaagcaactatggaagagaaatagacggacgtgacaaatcaaaaactctcttcctcgatacactttgagaaactacgcccacttctccgtttgcctttgttttttctcttctgactcctgatcctatcatccctccagtggtatttaagattccttctctgctttcgcgcctcgaagcttcaccggccagtatggtttctgctgtaacccctgctttgaaaggcgtgctgaaccctgttcgcttggcgcctcgacctccacgccgagcgccttcgccagtaacagaattggcagaccgaggagtcaatcccaagccaccactcacgcctatcctgcgtaaaggtgtgctcgaaactgagttactccctccgatcgaagatgttatatttgaggaactagctggggagccagttgtgtttacaaacgaaggaggtctgttcaggggagatctaaacggaggccgggaggaggtctgtagatgtccggtcaaaaaaggtttccgaatgggcgtgcctgaagaagtcgtggtcgttgagatagaaagaggtaccgaaggtatacgaaacgttgtcggtcgaaccggcgtggacgatgaagggggtattgatgagggattcgtagatgatgaagagggttgtatggaagaaggggctgaagagggtggttctgagagagtgtctgatgggggtactggctgaatcgaccgattggaagaagagagggaagtcatcgtcggccggtgtatgggtcttgaacttgtcgtagaggaagacgaagaaaccagagtggtcgttggaagttgagccggtcgaagtcctgtaggtcggataggctgtgaagaggattctcctctcgagactagtcccaacatcttctgaatatcagtatctaagtcgctctcgatcaatttggcagcagcaagaagagctgcctgcgagggcgctttgaacgctttccctcctccagtttggaacccaacaaatgctgaggcaggtacgtctaccggatctgtcggatgctgcgtcaggtccagtcctaatgcctcttcatcttcctcttctatatgatactcttcgtcaacctttcgtctcttgctctcactcaagtcccctatatgcgaatctttgttctgggcttctccctccttactccagtttccctccaacgacacccgtttgccctttccttttggctcaattacttctagaagttgagatcgctcgttgggctgggatgaaggtagaggctcatctgtttcaaagtcgtccatgtcaatacctgctaataaggctgagaaatcgtgcgcaggtgcagtcctgtccgaaaaggtgcgaggctccttgacgggcgaggagggaattagctcatcagaatctatatccatgttgattccgtgtacaagagccgaatagtcggatggtattggtatattttctgttgccagagtactactcggtgaagcattacttgagcacggaatgatcggaggaacaaattggtgtgtcgacgcaggtagagtacctatcagtggagagtttgactttgggaaagaagagagtagagagtgctcgttgtcgagaggaagagatgatggctgcgactcagaggggctgtctattgtagcgtgtgcgagaagattgggtaggacagaaactcgtgttgggttgggtggtcgggtagatagagcgccttcgtggtttgtagtcgtttgaagaacaggtacaaaagctaaccagagaaagatcaaccatgttgagctgacaattcatttgaaggagagattagatgacttactgggactgctagatgattcaagctgcttctcggccgcatatatcccatcagctaagctctcgctctgcgcttgtttgccagcatccggtttaggtgaacggtcttttggactgttttgaggactaggatgatctgttgccggaatcaactccagatcgacttgagctagatcaggtaggtcatcgcagtccgtcaacggagatgatgttgaagaggatggtggagagggagatagaaaagttggatcctcctgagtcgtggccaaacccactgacggtgacagggctaggtttggtaaggttgtttgaccgggtgaaagggccgagccagacatgcagcagaaaggcagatagaggggtatctcaaacacttatctatgatctctatgttctccctatcgcctttgcctgctggaaagagggatatatctgacgtgacgagcgagattgaagtgagaggtgagggtaagacgtatggtgagttgatgaagaggacgatcgaatagagagcatgcgatgtcatcgcttaggtaatcagtaacgttgattacttgcggttataacatatggttactgtagatcttaggatatatcggttctctcgatcttctagatcccgcatcttgatatctgacatccaacatccaacgtcccactcacacaggcaaacaagcagtcatgtccacgtcagctcaacgaccttcatactcctactctggctggggagcgtccaacactctcactcgtactctcgcccgtcgatcgccttttgccaccagaactattcctctcgcggcccttcaagcacaagctcaggcccacgcggccggagctgccgccgccaatcacaacggaaatgccgttgataacgctcagcaacaacgacagcaaacgttatttgggccgatcatcgggggagaggatgacatggatgataatggtctgtttgatgacaaacctcaagcaggaggacgagttcgtgagtctgtaggggttgacgtcgtcaaaggttgggtggataaaagcaagacagagcaggtcagttcttggcgtttttctttcttgctcatttcgtctgaattctatcttgttctcgtttcctgtatgtttgtctcttctgcccgaatcacaccgtttgataccgagtgtgatggaatggcctttataaaaagaaggtggagctggaaattgagcgatcttgcgatctgaagtgccaaccaaaaggctcgcactacggccggcagacacaggcttttcgtgcatttatgcgctttctctttccgcgcgagacggcggcgtttgtcatcatatgtacccgtcctctcttgaactaacatctgctttatatctcgtacataaacgtccttgcctttaacgaactaggctcctcatccgacaacgactcttcaatctctggtaaatctaaagcgaccaactctgctcctccaaccactacaatcttccctcccggttgattcatcctctccacacgctctccatcttatcaaatttacgtacgatgcctcgacctcaaccacgctcatcaccctcacgctttatactccaactcctacgcaagccaacccactgaatgtggttcagcagattgttcatcactccactcatccgggcggctttggtcggttattcgagcttaccgaggccgaggcgattgatctggctacggcaaagctgatggcagacgaggcctggggaaagtacgagcgtcacattgaaaacttggaggcagcccgacagaagaacattgtcgataacgagggaaagggatctgtccaggcaactggagaatcccgggcggccgctgctggacatgcaagatctggatcgaggtttaatatatttggcaggggctctcgaggttctgccgagcgggatgttgaggcacaagtggatgttccgatggcttcgctcaaccttaacaagactgacggagaagagatccagaagattacaaggagggatatgcgaatcgttgtcaggcttgaagctcgtggcgaacgaggtacgtgtttgttgcttcggtcttttagaccagctgagcggcccaacggcataccaaagttctaaccttacttatcctctgtctcctctatcatacaggcgagcctctgccttcgttgaatgctcaacgaacacacgtcgagctcatgcttcaatcggaagctcaaacgaccgaccgggttccttcagccgaagaacctgttgtggaatttacgcagaatgaaggggaagtagaccttacatctgttccgctggggttggaagaaactagtggatcccggggtggacattggagtgccaaagttgtcaagcgggaagccctgattggatctcacaccttccatctccgcgagatctttggtctcacctcgtcttctgcttcctctaacgacccggtcgccccttcgaacgcgctttcttcgaaccaatcggccgaagactccaccttgaacgactgtatcgtctgcctcgtctcccctaaggatgtggtcctacttccatgccgacatctggttgtgtgcaaagaatgtgcggtcgggatggtcgaattcggagctggaggaaaggttatgagacgggaagaagcagcagatggactgaccggaactggcgaaggcactgctggtgaaggaaccggagccggacagggcgcagaggggacgactgagggacaagcccaggagaccgtattgacgcctgcacaggagaggagaaggaagaagaaggtcaaaggatggttctgcccagtgtgccgacaaccatacacgtctcttcttcgaatcgctctgccttcgaccaagcccggtctccaacagactgtggatgggcatattcacgcttcccatgttgatcacgcggatcctatccctcgtgcgcctagtcctgtgcctactctcccaggtcgagcggcctctgtgctctaccctgcagaggatgaacaacggttctttgccaacgacgatgacgaagaggaggaagagtccgaagggcagaggcgagagagagaacaacatgaggccaacctgttggaggctcaacgaccgacgttcgtgttgggggatgagctggaggatgagaatgagaggacgaggagagcggcttggggatcggtctgatgggctggctttattctctcgttttcttgtccccctttgttgtttggttcgacgatacgatctccccttcctgatcgcctatcttcgctcttgatctcctctcgctcggttttctgtattccaattgatcacgtcttctcttgcctttggttttttttcttcttctttgtcttggtttccggattggtttgtctcttgtatcttgatacgctctttcttctctacgttttgtgcttctggtcgtaaactatcgttttgatccttgttctcgatgtctgctctattctccgttattcttttgacttttctttttcttatgttgtgtagtttgtatcgaatctaacattctcctccttctcccttctgtcgttgttcttaatatatgacacttttttccctttcataatgaaaacctcctcgctttcacagcggcctgatatgcactgatacatgttgaattgctcggtaatcattcaattacatatagatcttacatatatatatg

SEQ ID NO: 867 - DNA, 4147 bp, Xanthophyllomyces dendrorhous
aaagataaagataaagtcggagttgatcgcattcagctcgagttcggtttcccaccctgcgtagccgcggaaggagagggtgaggatgaggatgaggcggacgaaaagacggagaagaaagcgtcgaggaaacctgttcgttgggacatgtccttcttggacgcttctctcgatttctcgtcctggtttgtgtcgaccgacgaggcgagaagcaaataaagaaagaaaatcagatgagcgaggagaactgtttagatacaagtggattaggacttacgactccgtctttacagtccctgtatgcttgaactgtatgtacgtgcgcgatcggaagggaagagaatcatgacgggtcagagggatatatcacacgtgtagaattgatttcagtccggtgaggggaaaatgacgaacagtaatcggtacactgtcaagataggcatgaaggagacctatttagctactgatacatctcgaacggtgaaacgaaagggaaagggaaaccagatgaactttttccttgtcaaactggttttgctccatgcaaagcatcgactgctgggctgcttctgcgcacgggctaaaacaccgaaaggtggaaacgatccgatgaccagcaagatagtagataggttagaccacggacgatatttcctcaaagggtagagcctctacacagcgcagagctcgagagataaaagtgaagagaaagtaaagagaggaagtcgacttgctcttgaaatttggagacgacgtttcgtttctgtttgtaacccccaaggttttaaagaacacataagccttccgtttatttctagcctcgtctctcctgatcctctgatctcccactacattctttctccacaaacatatacacacatatgctacaaacgaaaccacagttgaccgacctgcatctccttccaagtcaatcccgactttctcgacccaggggtcatgttggcctctctttctctgtagttcttcatcggttcctcatccgtcggtttagaatgtgtgcccgctgggaaaggaggaaccggattcggcttgtttgttgatgaagacgatgacattgtagtccttctctctccttttctttgctgatggtgatggtgatggtgatggtgatggtgagttggctaggtgagtttcgggcaggatcggatcgatctctcgtgatcatcttcaaaagaagcgtatttgaaactgtggatttcataaattctcagataagggtcctctaggctcgtctgacgcgttcgtccgtcggtcggactatgtttatacatccaaacacccagtccttctacaacagcagatcaaccctcagagaaatgtcctccagagctcgacagtccgtccgggttgagggatctagatccgggtctggatctaggcctggacttgctaagagtagatctgaatctgaagccgaagctgaagctcaggaaggtccgtcccagtcatcttggcgtacacggcgtcttgtctgatcagaccacgcttaccttcctccttctatcgctcccctgtttcgactcctcatgatcgtcctacggaaacgaacggtggttaatacgttactctgtgatgcaatcgctcacgttcattcgtggtttgcccaagcgctctacaagatctctcagttgatggaaacggggctggataggacgagtctgaggatatgtgtatcgatgatcgatcaaggtgtcccgccagagactctagccgtgagtctatttttctttaaaaaaaaaaaaaaagagtccttttcctatcacgcacatacatgcaccacatgcgcgcgttgttgtttgactcgtttgtgagtttgggtatggaatacctggtccatcgttccttcctctttcctcgtttgccttccttccgggtttcggatctttgggttcgccgtatgaagacggccgtgaaggaactaatggccgaagcagcagcagcagcagccgctgctaccaaacggtgaactcggtcgaaccgttgtcgtcggaaaccaaacaagctgggcgggtcgaggaggaaagagctatcagcaacttggatacccggcctataatcttctgttctttgtctttgtccttcttttttttttcttttttttttacctttctccttatatatatatatgtaaatacaaaacacagacgcgcatacaggcgtataccctgatcttgattctttgttctttccgtgtcgtcttcatgtctctttcacaacggacgcgaagatggagtgagccaggacggaaaaggacagcgcgcgcgatggtcaaacagagttcataagatcgttgataccttgatagagagagagagatataagattatatatatgtgtgtgtactagaaagttcttgtgaaaacacaacacgacagcaaaccggatacgctcgtgggggacaaggaaaccgtccgcccggaaagaaggagcgaggtcagatccgtctgatgaacaactcgtatccctccttgccactggccttgacgacgcccgtgccgagctctacgtccttccaccggaccgagacctcgacggtccagttgccaagccctgccagtttcttcctggcgtccgattggacgggaaacggtaatctgtacgccaggttgggtctcggtgtgtagcccgattcgtccggtgggatcgtcagcggtggcgggacgtgtggggaggtcgcatcggccattgccgtgggcggtggcggcaacggcggcggtgtcggaggaagcggaaccgggttcagtgggacggcattgatcaagacttgcagcgcatacgtcttcttaatcgtgccctccttgttttccccgtcggctcgttcgcccggctcggtctggccgatcccgttgggccgtggaccagaactgggaccgggggagagaacgaggtcgaggtccaacccgacgacgtcttctaggaacgcgacgctgtgcgacctgatccctcttccgttcgaaagtctcatcggtcgggaatctttggattggaccggtcgaagttcaaacgcggagaggatcgggcgggggattcttagcctttgcttcactttctgccccggcagttgggactggggttggggctggggctgaggttggaattgagactgggactgagattggaggtgtgggtgaacctgagaagacgatcggggatagttggacggaagagataatggagaagccggtcgagaatttatactcgataccccgtcttgagtcgtctttttcggcgtaccagccacagcagcggcagcagccgaggcggcggcggtggtggtggcggtggtggtgatattactaacagtagtagaaggaggatacgtcggatatgccgatgtcgaaccggcccctagggaagaagaagacgaagaagacgaattggtcgacaggcccggtcttccctgcgcgtgatacgagggaggggccagatccatcgttgttgttgttgttgttgtcgtcgtcgtcgtcgacggcggcggcggcaatggcggcgggtgtaaagaaccggctttcttgacggacgactttgtgttttttccatattcggtctggccgggatcaaggttgggattcgaactgggactggaataagaggttgggatggaaggctcagaggggttcggatgggccggacggattcttcctggtggatcgatcggtacaggctcgtaggccgttgtgtgatctgtggactgagcatccctcgatcgtttcgatcccggtgctgctgctgctgccgccgaggtcaaggtcgaggcggatggagaagaagacgacagaggttgggctggctcgtcttttggtttcctgttcacgatcaactttatcggaggaattagggacccaggactagctgttgactcggtatcttctggttttcgtttaacgatgatcttcgggacgtgggccgaggattcgtctgtcgcgcttccggtgggcggattgatggatggatgaccgagggaggacgaggaatgttcggcgatgactggatctacgagagaatgaaagtaggtctgtgaaggaagaaggaaacaaccaagagaccgagatgtaagtataaccgaagtggtgcgggtaggacatagaaagaggaggatgagaagaagaaggagaaggagaaggag

SEQ ID NO: 868 - DNA, 2407 bp, Xanthophyllomyces dendrorhous
aggagaaggagaaggagaagaagaacagactttaagctcgacggcatctaacgcgctattcatttcgaatcacacgcgaaaaggagagagagagagagagagagagagaaagagaagggtttgtttctgcgcctgctgaaaagaggtagaagaaaaaagagaaagaagactgacatctgactgtcgtccaggttgaactcgagggcattagaaaagatgtattcgacatcttccaaaaaatcatcgactagatcgtattcagacctcttcagtttggtctgttcggggtggacaaacatctgtgagtgggtgtcggggaagacaagaggaggaagaggagggaatggaaacgaacgaaaacggtgttgaaggctctgggtcgtttgatggtctcgtaataatcagggtacattgcttttttgggaagatccatgaattctgtcgccagtgtccgtccactgaaaatggaggggaggattggaccgagagcgaacgacgcgggttaggagaaagaaaagaacggagaagacgatacatctctgacagagaatcactaacgtcttgtcttttttcgcgacaactttttccagccggttcttcagcaacttccacacgttgacctttttcggttttttcccaccggaaccttcggtctcgatgtgcgcgtctgggaggacgcgcttttgtttatgaatgcctggtgcggcaagcagtttgagatggacgggcaggcctctctttggtttcgagcttgtcgacgcgattggttgagtgtcgttgttggtattgttgtcgtcctcgtcttcttggtcctcgtcatgttctagctcggtggagactgtaggaggtgggttcggagatgtgagagcggcataagtctgtttcgcgagtttctgttgatgccaaaaggagaagaagggtagggggaaggggagcgagacgggtgagtgaagagtgggtgcgtatgaagaatggagagaggtatgttctggctcacgtgaaggtattttgcgtcttgaaagataggagagcccgtcatgttgactggttggtttgatggatgagagacatgagatcttgtcagataggagtatcaacaggaagagcgaaaaggaagaaaccggggtacatttcttcgcgttccagaatacgcgttcgatctctgctctgatggtgtctagattgggatatgaagagttttcgatttttgcctgtggataaagattgattagaataaggtgtgagaggttggaagacggaagatgaggacgaggacgagagagagagagagagagagagagcgagatggaggagggacgggaaagataattggtgatgagccggaaggagggaaggagggaaggaacaagctggagggaaatgtgaagaacaggaggaacggacctcaatctcttccagacagactggatgtttgatgacatcgtagtagcttgggtactgtctcttgtttggcagtctgagaaagtctgtggcgatgagtctcgcgctaagggatggaaaggaggaaggacaagaagaagaagaggcagcgaaaggaaggaaggaagaaaggaagaggacgagataggattagtgggggagacaactagaggacaagccacgaaatccgcacgtaccctggctctttcccctctgtggccgacttgacgacgttcagcagctttcttcctttctccatcacatcctccgggtcatcccacacgtcctggtggtgtttcgaatggggctttgagggctgtgcatcgtggtcgtcccgtctcttcttcaaccttggctcggagatgatcaacgacgggtcgagtcctgccactcgtttcggtcggtgtgggatattttccgtgatggccagaggttctgtgggtatgtgggtggttggatctggctgtctgatctgattcgaagccatctgtgtgtgtgtgagtgtgtgtgatgtgcgtgctagcacgagtgaacgagatgtactgggtatgcttgttggcagtatggtgatcgctccaaggacgaggaggaggacaaggagaggggagacacgacagacacgcgcgtcaccttaaggtaaggatgtggtgtgggttatttgaatttaaccatgaaagagataatcaaataattaactaagtcgtcgctctcttcgaagacactaccaagtcccaccccgatgagacaagcgacgaggcttccttggttctttgcgctctttcctttcttttcttttctctttgatttttgtgcactagacgcgaacgtacagaagatgattccagagaagacgtgtgtgtgtgcgtgtgtgtgtgtgtgcgtgtgtgcgtgtgtgcgtgtgcgtgcgtgtacgcaagaaaagagagcaggaaccagcctgcctcgatcgaccatctccccccccccc

SEQ ID NO: 869 - DNA, 4070 bp, Xanthophyllomyces dendrorhous
cccccccccccggcgggcgcaggcagaggcgtaatcttatcggacgaatgggctggctgggaaattataaccctaacacggctaaaaattccctcgtcctttttttccccctcggataagattcgatagcgagtgtgttctctgttgcctatcgaccagcacacacaccgagcggtctatcagagagcaagcacgaagcatgtcgtccagccagagctcggccacgaggtatcatattccggaagccagtccgtacgcgtccagttcgtttgacgagttggatcaccgacgttagttctttgtattttttttttattactatcattccttttccttcttttcttcttgggggcgggggcaggcggttttttttttctctctcttgttcttctcttgttgggttctctgtcctgtggttctcttccgttttcttcggcgttcttcgagtggtctgatctttttgtgctctgtgcgagcttggatggccatctgatgaacgaactcgaggtgatatgtgtgtgagtgtgtgtgtgtcctatcgatcgcacacactcacacactcacacacgccgaccactcgagggaagaagaggggaacaaagaaaaacgagaaattcggcctatcgtatctaaatcttatcggctcgcttttctcttgcgacccggcacacacaccgccggcaggacgtgtgtgttcttggtgttcatcgtctttcctctttcgtgtgtgtctctttcgtacgcacacacacacacacgcacacacacacacacgcacacacacacacacacgcacacacactctctggcacaaggctcaagagagaaaagagaatagaatcattcatccattcatccatcctggtgtcgtctgtctgtgctcccccccctctctctcttggtcagcaccgccttgttccctggggtgctatcttttttcatcctcattctctttatctcttcccttctatcgatcggttccaaccgttctctctgttggtcgctctgttggtcgtgttgctgtgtcctggtgttctctctcactcactctcacacgtaccatcctaactgatcaaccctcgctctctccctctctctctctctcgcacaccgctcgctaatctcctttaaaaaaaaacacccacacccacactttcaaatcttatctctcccatcaaatcccgctcggtctcttccggctttcttttctcttctctcctcgctatcatccatccattcgttcgttcgttcatccactcatcctttccccaccatgttcgccatcgatctcgcacgacgtcatctactaccatcagtcaacccacagtcatccctcgcagtccatcatccatccatggtcgaccactcgccacccaggtccgcacacaccgtctttcccagacctctcgacagatcaaaccacagagaccatccatccgctaccggcaccatcaacggtacgcccccccttcgtcctcctcctcctccgccgcctgccgccgccaccgatgacgacagcaaacacatcgctagcgtcaccaccaccccaacaaactctccgcctaccaacacctcgctcggtccatacccgcacgggccgatcgaatcaaaatcacccgtgaacgcgaacgtgaacccgaactcgaactcaaacttaaaccctgtccgttcaccgaaacctgtggtgtccccccgaccggcccaatcccgtccgtccgccggaacatgcccgggagatggtcactgcaacggcaccggcggcaaggccggttgtaccggttgtccctctctcaacaacaacccggccggcggagagccagacggaggagcctgccggtcaacctcacctctcgtctcggcgatcaaccaagcggccggtcaggccgtcaacatcccaggcatcacctgtatcaactgtggtaccagtaccaccccgctctggagaagagacgccgaaggaaacacgacctgtaatgcctgtggtcagtgcttcctctcgtatctttcatatcttttctttcaatccccccttcactcgttcactcacctcctctttctacatacgccgtcctcccttcgcgttctccaggcctctactttaaattacacaaccaggccaggccggtcaccatgaaaaagacagtgatcaaaaggcggaaaagggtgcctgccgctgctgccgtcgtcggtatccccatcggaagagacgacaccatcgttagtctttcctcttcctcttctcctctctctctctctctctctttgtctctcttcctaccttctctcccatcttcccctacgtcttgttcctccatccgacatctgaacactttcttctttacttcttcctccctcttctcagcacaaggacgacgactcccaacagcaggacgcggccgaggcgttaatctcggtctctcggtcccagtcctcccaacactaccaacctcaatccggaccgacccccccaccgccgtcatcggcccacccctcgatccaacacgcttcctccttcacctcggccacgcccagctcgaacggccgagggacaacatcgaacgccagaggtcgaaaacgaaagtctcaagcgatgctcgacccagattctacccaacctgctgccgccgcctccgccgtcgacgatgacgactacgacatgctcagcgacacagaagattccattcattccgccgctcatcctccgcccaacactcggccgacccctccgccctctcttccttctagggacagggattcccaaacgggtggccgacagagaaggctctctggtggaaacacgcttgaacttccacccctgatcggcggcggcgatagaggttcgttggccgggcgagagcccagtccgttcggcgggccaggcggacacgaaggtggtccccagtcgagagcaaacatgaactcctcagggatgagcgccaggctacctcctccttcgaccttgcttcgatcgcccagacgtcatcagaacggtccgctaccttcgctgagcggtggtggcggaggaggaggagcaggtgccggtggcaccggtggtactggcgcatcaagatctagcacacctcccatgctcgatcttcaccaccggcatcatcaacagcaacagcatcggcattctccaccgccgatccttccatcgccttccgaaggatatcgctcgttcaactctagtcactactccaacaataactccaacccgaacgcccctgggtcttcatcctcaataggctacgacagaggtcctgccgacctgtccagacatcacgttcactctgatctcaccaggcaggatctcgaatcgttcagggatgaactccgtcaaggtctagattcactcgagaacctcctcggccggacgagccgaacgttaagagctgtcgagctcgagctcgaacggtccgtcaaaagcggcggcggcggcggggccagcataggcaaagatctcgccggtggccaggacgactcgtacgagggtcccgggaccaaccgatcaaaagacctagggaacggcgcgatgctcatccagattcagagaaaacgagggcagaccttcggtccggccggcacaggtggaccaatctgggggatcagtccggtgtctgaggctcttgaaggtgcttaactctcgagtttcttcatcttctctctcttttcttctctcgctctctctctctctcttcctccctctcttcagccgcgaaattctcctcctttcctctctctttgcttactggttctgtatgtatctatctatgtatgtctgtctgtctctgcgcgggggtgtgcgtgcgagtgtgtgtggtgtggggttcgtttcgttctagaacaatttctttttataaatctttttctctttaatctaaatccaagagggcaaccctatacctcctttatcaatgtatcggctctcttcctcctcctcctcctcctcctcctcctttctttccgttcccttcctgctttatggagtcttagaaagaaacgtttgtttgcttcctcccaaccttttgatctggtttcccccggagaggtcctccctctctccttccggt

SEQ ID NO: 870 - DNA, 323 bp, Xanthophyllomyces dendrorhous
cttttctttcttcccttctttctctttctcttgttctctctctctcttttccttgtctccttcttcgggatgtctatccgtctatctgtctgtcagacttttacctcgattcgattcgattcgattcgattcgactccgagctttttaatatacgaccgtttcagcttccgaaacaccgccatcactaccgcgagcaaagagagaacgagcacggaagaacgagcacgaaaaatgagaaggaaaccttgaaaataaaaataaaaataaaaataaaaagtctttcaataggaaggattacatcaaggtttgctcgttggattat

SEQ ID NO: 871 - DNA, 33388 bp, Xanthophyllomyces dendrorhous
gaggtaacccaaaattcgaattcacatgtcagaaccggcgaaagagcggtcaaaagaaagaaaaagaaaaggaagggcagaagagaaactcggagggggaggaggacgaacctgccgatctcgagcatcatccttcgtcgtaagtacggcgcatctgttcgtgaccgacccaaaggaccaaaaagaagaaaacgaaacggataccccaacacggtcagccttcgtcactcttttcaaaaaaaaaaacaacgaacgtaaagcaaacaagggacggactcttttgagaaaactcccagatgccatgtcctaaacctctcgaacaggattccatgatctgacaagcaaacaccccacagtcatacccgtttctctgttgcggcgtgatcttttggtatcgttcgttttcgaatttcaacaaggaagcagacatcatgggaagaggcaaaaaagatcaggatgagacggtgaaacgggaaggaaaaaagaaaagaaaaagaaaactgtaaagagaaaaaagggcgcacatcatggtttgtatagtcgacccaaccggtaaaatcaaagtcgaccttccttttctccatcgattcctgctgaaggtaatctctcaacagctagatgccacgaaaacagtaaacacttgatctacatctcaaacggggcagaaagaagaaaaaaacagatcaaggaaaccagacaaacccgaaacactcgtcgagcgatgccttcacccatcgaatcataagcctctattcgtttgtgccttagattgacaaccgcgcatgtccaatgggagtttccgatgtttatcggtacgagaatcatatccttttccaaaatattgatctatttcaagccaggactggtcagagaagaagaagaaaaagaaaagaaaagaaaagaagaggatagaaaacaacacaaaaactagacaaaccttcttggtccatcgagcgagtctagctttcacataccccaactcttcaagttttgcaaagaagaacgtgttaaagtaatgaacgtcgtagccctcccaaccgtcctgtcctcctttcccctttccctttcccttcccgttcgtgcctgcttcccgggcgatttcccttcttgcatcagcagcatccacaatcaatcgcccgtaaaaattgatgacctcgtcgttaagccaacactgaggtttcaacctcaacagatcgtcgtatctgacttgttcaggaccacacctcgatgtatgggtcttgttactgagaaggttttcgacctcgagcgtttgagagggtgtaagttctttaggaagttggacctgtgtattttcgggattgcgcatttcagtcagttccaaaatgtgagaaaaaaaagcgtccagtgggatctcagaaaagaaacaaaaaagagaacggaagggacaaacccgtttggcagcatcagctcgctcgagtcgagctttgatcttcgcatccgagtcttcgtcctccactttcagatcctcaaacgatggcaagaacggaactgaatcagtcgtcctccttcgattttttttaaacacccccgcgcgcacagccaaatgccaccaagaatgatagacaacagaaccacggtgagaaaacgctaagcatgattgagcggagagaagaggacatacgaagcggcagaccgagcttcattcaacctcaatctctctaaaaagttgagatatgtcgattgactcgagggctttccatcgtcacaagataaacgtgtcaagccaatacgggtaaggaagccaattcgagtagtttctgtagaacaagagcgaaaaatagacccacatcggttcgtcggatctgctccttaatcccaccagagataaacctatccctgttagacgtatctcccaaagctcgcctcatgctgttctctaatgtaaataaaacaccgcgtcgtactgttaggcagaaggactcgaacaacaacataacagagaagatagatcaagggctcgactaaccggctaccagattcttcagagcctctagcgacgcgtcatccaccggattatattcacctttatctgccaaccattcaacccatagcctttccttttttcagaactacctcctatatcgaacatatagaaaaacaaccagataaaggtcttaccgtcggcttcatctcgtgctaaaacgctccgaaccaaagcccttaccaactctgccttccttcctccgcctgagcctccaccaactggcgtactgtctaaacgtgcaagatccccatagagctgtctacccgcgtccaacttccttcctgccaaccctaaggatttcttcttgttcgactttgtcagaccaccattgaggacagttcgtctggtcggcgtggagcccccagagctgatgaggtcagatccgggtctcagcttagacggcttggattgaatgtcccctaaccatggacgggatcgtggaggtgtcggcggaatgtcgtcatgaagtgaactatcgtgtaaacgccgagctgagaagggaaaggagacagaggtggctgatgtcggtggtgtggatgatattgaggagtcagatgtgcttctcagatgggatgctggtatctttgttgtcatcgatgatgacgacgacgatgcggacgaaggataaaaagacgggcgggatagtgctacactctccattgtggaacgtgacgacggtttaggtggagagtgagcggcagaaggcgagggttgaataatctctgcgagtttgtcccagacggacgagaatgattgggcccaagtagcctggtgtctgggttccttgttgtaccggtagagcgccgtaggagaggaggggcctcggacagagaggtgggaggacaaggattctaacgtggacgggcctgggagaacgtcttgccccgagtgagggtgtgtatgtaagtatgcaggcaacgggtgataaggacgagaggagagcgggagatgaataaacattggccttccaaccctctcttgaccaacgggagcatgagactaaacagaggtcgacttaccagttggatccagaaaggttgtagagagcgagacgcgaccatttgaaggtgaaagagcggccagctgccgtctcttataggaagaggtaccttgtggtgtattataagaaggcaattcgtccgatgtaggcatatgttttctcttgaacgggttcaggatggacattagatcgggagggactggtagcggtcggtgttgatggtgatggtgatggtgatggacggacaagggaactcatagtatagacgcgtaaggagcatgttagatagaacggatacgtcttatgtagatatttgaatatttcatctataattatcggtctttgccgtacccactcttcctcagacctaccgtccaccgacactgatcattgttgcccaaatcttgctcattcatacagctggcaatgaggctaatcggttgggagacagtgatcggtctggagcttcatatccagttcagatcatcgaaaaagctgtttagtggtgggtctttctgttcgacaagcttcttcttcgtcacgcgctcgctcaatcgtttcaatctccctctctcctacattccagcctccaagactgtatgggactcaagcccaaacacaaatgtctccgtgttggaccttggatatcctggaactctgccagtaggtttagttgagaatctaccgctgcagtatgttttaggaacaatgcgcctctagttacagcgctcaaatctttctgtcgaacacgtccatgggactcacagatactctcgcccgggccggtagagctcgcgctccagacggctcttgctctaggatgcactattgtaggctgttgatctatctgatctgagaaaatatttcgtccttatgttgactcgaagtctgaacgacgattgatatgccgtcactcacttagcctcctaggtcgatgtttgatagaaaacattatcattaccacgatcaaccgttaggctatcagatcacccagcattatcgtttgtctaccgctcttcataacaatcaacctggctgaccactcgatgctgacatagatttgttcgacgacatgttgggatcagacccccttgcgctccgcggatcattggcgattccgacaaaaccacctaaagagattcggatccagcagatccaacttgaacaggacacggcaaagactctaggctcactcacgaaccccaaccattcacttatcgacttcaacagagcaggtgttggcctgatggaggttgttacagaacctgacttgagatcggctgaagacgccggagcattcgtcaagacaatcagaggtgtactgagaaggattggggccagcgacgctgacatggaaaaggtgtgtcaatcagtatcctatacgtttttttcctcctgattcatgcatctgcaacttacactcgcattcaaaacaaaacagggctctctcagagtagactgcaatgtatcgatcaatagaattggcgaaccccccggaactagagttgagatcaaaaacctcgcctccgtccaaaaattaactcttgctgtagaatcagagattaaaagacatcgagccttattagaatcagggaataaagtccttcaggaaacgagaggttgggatgaaggcgttcagggaacggtagcgttgagagggaaggagtcattgaaggactacagatatatgcccgatgggaatctgcctgttcttcaaatcgatcctgtgggtctgtttctttctagacatccaattctttccatttttttgatatcgcgctgacatatctcaccaaaggcctacatccaatctctacaagagactctccctgttcttcctcttcagctacttgcgaaactccgagaagaatatccgactgtcccgttatcggatctagagactcttcttggtctagatcccgaattttactctggcgtcacatacttcaaagaccttgtcaagaagcgctcatgcatagattctgatgcaaaaacaaaagacaacagtgagcataagcaaggagaggggagagacccgaagacatgttcgaattggatcatcaatgagctgctcggggagatgagatctcaagggaaggaatggccgtccggttcagatttggagccgagtatgagtgcaggagtaagtgtagaagagatggggaagttgattgacttgttgggtgaacgaaaactctctggtttgtctaaatctctctttcgtgatgtctttcgacctcttattgatgatgctggatcttattttctttctgcattctattctggaatccctgtagccccctctgcaaagactctcctgcaccacctcgtaaaatcgcctccatctccgtctcgggtctccgtcctcatccaaaaacacgacctcatttcccccgttcttacacccgcctctattcgcttggctctgagcgctttaatatcctcccatccagacttagccgaaaccattaaaagtagacaaaagccagcggtgctgatgaaactcgttgggctggcaagagaagcttttggaggcaaagttgggttggacggtgtcaaggaagagctggaggacttgctagacgttaaaggtgtactggaaaggtttttagaggaaaagaagaagcgaaaggaaagctcaggaaaaagaaagcgaggtggaggtgcagagtaagaatttggctcaattctatgtatcttctttctacgttacaaatcagcgcgcaactgaataattctgcacaatcatctccattcatcttcttcaatgttcatctgtttcaatcaaacttgctttcttcggataagtgcttaaatctactaattccaatcctgtttctgatttcatctttatcttgttcttggatccttaagctcaaccgacaaagcggtacatggctgatccaatatagtactattgatttccatgggaaaagaagcgacgagttgacatcgcgattgatgcatatcagcatataggtcaggtcatatgcaggacaaaggaaacgagaagagtagcacaacaaactttgagcccagcaccttcaacgctactatcaggcagcaacaagaaactagcgtgaaacgcccttggtaacctctccacgtcatccggcgtctttggtttcttgtactctgtcacgttctgaggaggcaagtttctggtcgcttccaacaaagaagaagcattgggtgtaggcgtagaggaaggggtggagggaaagaagtagaggacagaaccggtagtggtcacttggagtggagcgggagctacgaagcaccgcaattcaagaaattaggagaaatcaatcaatcacaagacaatccgctgtagaccatagacaggagaatgagacttgagaagcagaacatactggttcccaagacgggatgaacgtcgatacattgaatatcatgtcttgactctgggagtttcccaaaaaagtcggcaagcagttcaggcgcgagcggtgtgccgttccatgtagttatcgagcttggtcggtgtaatcttgggagaagctttatgttgccaagtcaaagatctaaacggctgagaacgtgagagtgatacgaggatatgatcgagaagagaatatatgttctaacctgagaacgagcctccgagtcgagcgatataaagtaagtgcgaacaaagctagtcggttcatataattcaaagaggacggtcaggattgagcgtcaacctggctgaatatcgagcaaggaaggcgttcaaactttgcttattgactcactctctggctcctctgcatgcgatatcaactgttgccacgtccgtcatggtgtcaggtaagtgtatatgtaagtatatgtgtacagaggcagcagactgaagaaggtgtggcctacaaacgacacttaggcagtgctgacgatacttaagccagatcattcaaatatactggatgacgaccttccggcactctaactctcaactctcaaaccttcgttaagaggaaggctcttaacgatctccctctccatctccatacatctcgctcctactcctcactaattcagatggatccacagacagatccttcatctccgacccagtcgcctgtacttccaaaggaaggactcagtcttcgtacgacaaggtcaaaatcatccctggttgagttcggatcgtcatccatcagtggactcagggacaatatctcgacagggatcaacacactctccactggtctcaagacccaagttgagaagagacggaaagatctcccaaaaggaattgaaataaagtacgtaaattttcttttctatcccgagcatgcttctccctctagcttcctattgccttgacatggacggaaacagcgatgtccgcccgatgtgcatagtttattgtttgaccacaaagaaaggaacgttatgtgggacactcaacgctgacaaccatctcaaccaaatttcctcattgctgtgttgtatcgtatggttattctttccaatctataggtttgcgcccctcaaaggcatgtaccatacctattaacctgccccccctctccttcatgcatcgaccgatgttaatcttctctttcttttatcaacacacgcgcttcctctgtgcgcaatctcgatggtccaaatcgcgaccccaattttagtcccaagaaaccgttggtttgacgtccttgccttgacttatgtttgtttttgccgagaaatacacttgcttgatgctgatccacagttgtatggggcttttgccaatcgccgaacaggccgtttacaaacaggcgctggtcagtaacctttctttgcttttcctcagtctaaggactccgtgtcgtctgatacagatattcaactcttcaacaacgatcatctgtatttcagtggctctctggtcaacccttcttccgtaagtattgctactcaaatggtcaaacgaagttcgaaattgaacaatctcctttgatttatcaacccatcaggatatgcacttctatctttctctggatgtggttcgttggatgaatacttgttgtatcttccgcaaacaagacaataattccttatactgatcactcaaacactcagctctatcccgagactgtggcctctcttgattccttatcttatctgggtgttctacatcgaccgcgcgcccgtactcggcggcagacccaaacgatggctcagaaggatgggcatctggaagtgagttttggcttggctttgctggtacgaattatctcaataacagattctgatcattaacttcatttctacctggcccgaccagacactttgccaattattatcctgtctctctagtacaagttggacttcttcgcttaccgctctcgtacaacgcacagtagttgactcatcattttgcggtccgcctgtgcactcttcaggaggcttccctgcctttagacaggaagtacatctttggatatcacccgcacggttagttattagctctgcgcttgaatcgctttgcttcatgttctgatagctgagatgcttgttgaacgttgaaacttatctgatataggtgtcatcgggatgggagctttcgccaagtttgtcaagtcttactttcttatctttttcaatggttattcccaacaaaaattttctttcccttcaatcttacaccacagctttgctacagaaggtaagaggtcactgatatcgatcctttcaagcatgtgtgattcatgctgacaatccccctttacctctctcaatgttctgttttataggcactaacttctcgaagatatttcctgggattgaaccccaccttttaacactcgctcctagtatgtcatatcttcttcttcattgacttgacagcaaattgagtgcctggttttcatgttgacgtcacagattttaagataccacgtatgtcgtctatgtgttgatggctctctctggttcacatgtcatgaagacgacctgatgatcaaatctccgaattgacatgctgcctctctcagtgtatcgggacttgcttcttcttctaggaatgtgctctggtacgcgtctctctccttctcacaccttctggttccgatgcaacaagctgatatcaatatatacactcttggttctttcaatattcaagtttcaaaacgatcatgttcctccatccttcgtaaaggaccccctggtacagccatcgtgatcgttgttggaggcgctactgaatcgcttcgggcccacccgggaacagccgacttgacactcaagagtagaatgggtttcatcaaaattgccataaatgaggggttcgttgtggatacaacatctcaatccatactggtccagttgagaatctatcgcgctcatatacataggaagctaacgtgtatttcttctatcttttcatttcggtgtcttatagcgttgacttggtaccggtgttttcgtttggcgaaaacgatatctatgatcagctgtaggtctctcaataggatttctggatttgacttcgtattttttctgtgcttacctagtaactggtgcgacgaacgattgatctggtttagagcgaatgagagagggacacagatctacaaactacagaaaagattccaaagcatctttgggtttactttgcccttgttccacggaagagggtttgtccatcgacgtctgctagaatactctatcttcttctgcgaattgggctgaatttttatttaatcttgcgatctgaaaatctaggttattcaattgtttgttcagtttcttcttagagtgactaaagaacgatctttttgaaaaatttctattaattgctctgttttttttttcaccacgaaacgtccagattcggttggtctgatgccatataggcaacccattgtttctgtagtatgtctgcacaaattttctttcttgagttttctcgttcaatgattgccgcatctcacgtttgccacttgtctgtattcacatcaggccggaaggccgatccgagttgtccagtgtaacaacccgacatcggagcagttgcaggagacacaaggacggtacatcgaggagcttttacggatctgggatacatataaggtaagcttcccctctcgtttgagttgttctaggcgatgatatagggtttgattgatcagcctttctgaatatgtctttggtggaaacaggacgtgtatgctaggaacagaacaaaagagttgacgcttgtggactgaactcttcaatggtctctaccttctaggttcaatatgcagattcggatcatccatagtcccattgccctttctaatccactcatccactctctgttttgctgaggcattcatgtaggcctcatcctgcgcactttgtcttgctattctctgtgctgtaccatatatcaattcgtttgacctctatctcacgcttttgcttcgtatccatattcacacacatatatagcatgtattgcatcagctggttttgtgtttctctctttcaaagagatagaagggacctagagctttgaccagccgagatctcgtctgttcctctggaagaaggacgaaatccatctgaagaaccaatcgacccaactccaagccccaccttctctcactctctccatcccgcgtctaccgacagattccccttcccgatgaatagctcgaagatcatgaactctgaagtcaaatggaccttgttgttttccaaaatcagatcgacacatcaaactgattgaagagatcgaacttgggtctagaggtttagcgtctggcggtgttcgacctctataacttggtttgaacgagtcgaaaggaatgaacactggtttggtcgtttgttccttctcggaagaagacaaggaggatgaagggatgtataagatgttgaaagaagggaggtgaagttgagcttcataagagacggtagaagatagacgaccatcaggcctttgtgtcgcttcttgggttttcagtacgagtgtaagcgtctgaggtatctcctctgaggagggtgaagcgggcgagatggaagaggatgatggggtgggagaaagagagaccgagaggccagagtagatctcgatgggtagttgcaacgggtcggaagagggaaagatgtacgtttgtgaggcgaagcctgctccgcctagagtattgatatctgttcgacaatccgtgtttgccataagaaactaggatagatgaatgaggagaagaccgaagacgaaccaagggttccatagaatctgacacccgaaccaacactcgtgatataggattgcgatgatccacctcgaactcggtcgtcgactgctttccagtgatcgagttcaaaaggaaagttattgagagcatttgctggagatttctctggcgggtagaaagtggatcgcatgttgattgtgatggtttgatgtcaaagacgatgaaacctcctctgacctcttgcatccatcatctctccagcattctaccccattctcctacatttgctattgcctcgtgagtgtattacgtatcaagcgtgagcgtttctctgtgtctcagatgaatctgtacagaaactcgctaagtatggctcgatgttgaaatgttcggttctcgcagctgaccgagaacatcatcaacacgacgggtcctcaccaccatcggatctagtcatctcatccgtgagaacatagtgatcaacctctttcaactcaccagacctcggtcgattatttgaggagatatgagtgaaccggagacgtttcaaatccatcggctacagattagtcctactcagattccattaccatcttcaccggaagaaccataccaggtccgggctctgtctccaatgattccctcatccgagtttcctccttctccttctccacttcaatctcctttcccgtttagcaacgcaattagaactaaacgtccgacttatgaaagaaaagattcttcaaaagtctggagggacccaaacgacacattcaatcaacaattggccattactgtcaaagctccggtcggatcaatgtcgatttctccggctcatagagagtacgttctatgccatgtataactccgtctattgtttctacattgctctacttctagaacgttagaactaacgaacaaacaacttatgtgattattttttggtgtgtcatttcgtagcgttgtgttggccgcaagacagggattgtacatcatcgatctggaggccaccgccagggtccctcgatttcttcctcaagggggccttcgtgttccagccgatgtacaatggcacgtactgtttatttgaattgaactggagtatgttgctcaatctgatcagaggtgtatctttctctcaaatttgtcctgctcgaaatcgtgatccataggtctccgcattcaagcatggcccattctatcgtttcaacatccgcccagaaactgttagtctggaatctcggtctaccaagcgagaaaggtattgagagagaggtggaagcacatacaagagcggtgtcggatgttaattgggccgttttccatcctcaagtggtcgcgacggctggtatcgacggatgggtcaagacttgggatatccggaccacaatgagaagagattcggggagagtcagcgcttggggttggggatgtgagtctgagtcttccatgcttggtaagaggagtgaatgagaagatggctaaaatacactctcctttttgcgggtcgaataaaaagctgtcgcaacacaggcacgttcttttggcggaccatggccctcgactttgtactgatcgcctcactcctttcccgctcaggtccgatggaacagaaagaaggagcatatatttgccagcagtcacgacaacaaggtccttatctgggatcaaagagtaagtcttatcattcacccgcatagctcgtttgaatacgaagctgtttgtcgattaaatctcgggctgtcattccgcctctctagatggggtctattcctgtgacaaggttatacgcgcattcatccaaaatctatggaatcgattggtcaagagagaatgggcatgagatggtcacttgctcattgggtcagtctttttcactcttggcccagtccaagtttgctatatatacacattcacagccactgagacatccatcaaatgtgttctccatatattttagacaagacggtcaaagtatggaacatacactccttgaatgaatctgccactacgcccggcacagatacgttcgaaccacctatctacgcaccaacacctttgatgtccggcacatcctggctgtccccccactctaacgacatcaagaccgatctcgtcgaaccagatcgaacgatccggaccaatgctccagtatttagagcaaggttcttgccatttggaagaggaatcttgagtcttcctcaggcaggagagacaagcttggagatgagaagattgttggatcatactcttgagggtcaagagagagaaaaagtgatcactcggttcgaagggcacacaggttggttaaattgtttccatcactctcactctgcctcctgcatcatattgttcttttgattgaattctgtttttggatctttatcacaacagataaagtaaaagaatttgtgtggagaattcgaggaggcgagaacagcgatgacgacgatcggtctttccaactcatcacctggggtacggatcatcagcttcggttctggcctatatccgaaagtgttctgctagtgtgtccgctcttatgattttcttctgaacatcatctgatattttggctaactccactcgcttccgtgttcctcccttcaggatgctggccacaaaccacattcgcctatcaaagtgatcatgacccgtcgaggcgctccttcaaagtcttacattgatgaacccgaccttatcttaactcccccctcgacacccatcgattcattcttcagcccccttttaacatcctcctccggggcgccatcagttgacggatcctctttcaatctccgcccgatgcctcatgtctcggccccccttcgaggaatgaacataatcaacacccttcgaacaggaaacaatcatcagtctcaacaccatcagcttcataagagacaacagttgcaaaggcctaggttgcatcatgtcaactccgggctgagaaatccgatggaccactctgtcgatgcagatgagacagagccgagcgaggaagggggctcccaactcataatcgagaggagcgaagacgatgagcatgggagtaaaagtatgccggaaggcttagagatcgaacagagagagaaggagagcagactgcagaagaagagaagtagagcagacaacctgagcagttcaggaccaacggctagaacggtagtgccgatgactagggggacaacatttaggggaccaattcaagagccggatggagctaaagctgcaatgaactggaacaagtgcgtcatactcttttctcatctctgtcttcttttcttaccattcctaccggttcatgcttatcattcggtctcgttacaatagcaatatcgaggcgagttttagttattgctcatcgaaaaaaaaggaaacatgagacgaggtttgacaacgataagatctgacctattatgcatccgtgttgactaaaaacagtacttccaaagtaaatcattgaagacatccggcaaacgccgtaaaaactcttcccgatcttcttcccttgaaaaatcaagatcaggcagtcgatcgaaatctaatagtgtccaaaatatctccagaggctcagggttcatcgatgaagacagtccctaccaatctgaagacgacgaagtgatggtcagacttgagacagagtgagttgcaacttgatcacgagcatcgttggcaagatactaaacattatctgcggaacgatgttttgatctactttcagactcaaggaagttatacccatctataagagagaaatcaaggtagaaacgtttgacctggccggacgaaagctagtcatgtctctacaaggtccttggggtgcgccaacactagccaagattcctacacccactttcatccgaatcgggtttacctttcctaccaactatcctaaatcttcttcgagacctttcattgacacgttcgaaatgaaggaaacgatacccgcgaaagataaagcccggctcaaaggtcgagttaaattgctttgtgacacatcgtcaggaaattgcatgtataaagtcatgagtttcttactcggctacgatctggaggatgaaactagaggaaggaggagggacaagagactcgaaatgcaactgagggaggagagttcggattcatcagatgatgacgacgattctgtagcgattttgacatctctctctaaacaggatctccaaaggccttgtggagctacttttgggcccaacggtaagtcttcctttgtacagtctgtcaaatgttcgctcattctattattttatgaatctgtaggtgaattggtcaccttctttggagccaatccaacgcttcgaagtcgattggtaagccaaagcagaatggcttctaagtcgccttctcaatcgaagacttcgtactccgcccgatcaacatctacgtcaggtgctggtattgatcggcctctatctcatctgagcgaagccatgctgcggttgtcgatgacgatcaactcggaggacggacgtaaggcagcgccaatgatgctggatagcttgccttcctctcgccctcgaaacgtaattacttcatgattcattcttactctgattcaacattcgtccaggattcttaaataagaaactgacttgctaactgcaaacgtcttttctttgacttccttcacagaatcgccttcagattcgagaactcccaatgcagccctcctctcggtctcactctcgaacgcgcaaacttttttccatccaaatacacgatgcatcctccctgacgatctcctcgaagaagctggctgagcggtattggctgtctaagcgtccggcgcatgttctttgtcagaagaataagtcgattgcacgctctcacggaagaaaagatcatgaggttgcctggaaggtgctggaagagttgctcactccttttgctgaatataggaagaataaaaatgtacatgggatcaagtggacgcaactcgcgagagatgacattcaacgggaggatcttttaggtatgcaggccactcaagatcaagttgagctttggttagcaccccttttgtcttaagaaaaggttcccagtcatgtttccaatccaagaaagctgctctgaccctgactctcctcaaaatctcaacacgtcataggctaaagcatttttcagcccatggagattttcagatgctcgctactatgctatgtgtcttgcgccaatacatcccccccataccaggtatgtcacataattctgagattgtatgttttcgacagtcagagagaacatttcgagactaatctaccattcctacagatgtatatctcgcagaaaaatcgatcgatccacagcccccctcgcctgactacttcactatatttcgtccggctcctcctgtacctgctcgatatctgtctaggaatcttttatccgacgcgcctacaggtcgagaacgtgcaggatctccacaatgtcaaacactcgattctccctgtataggacagaactcttctaagccccctgcaaacaaagataccaatagttccagctggtcaattctgaatcttaatagcggattcaatatgcttggcagctatggatctggtagtgtagcaaattcatccggtacatcccccttccagatgagcggatcaggaatggtttctggaggattaggagaaggaagaagagaaagtgtagagagctcatccagatctccacatcgatctagtattcctgaactctctcaattatccacctccaacgagaaggactgtaagaggaattcaagccggtttctcagtcctggcgttaatagtacgtcaccgcggattcagtctgcaagtcttcacaacggaagtgggatcaacacacggccaaaggtggccttctctaaggaagatttgagacatccggtctcggtaagcacataccctcccttgaaaggagtagaagaaggaatgagaaaagagagagagaaacccaaagttggagtccgaattcgttttgagccatccttgtacgtgtctgatttaccctttgattctggccatgtgctgattcatgaaaagtcttttgatgagataactaacgctatccttataaatatatgtatcacacaattttagcacccgccgacccgctccgatatcgcatttgtcatcccgttggttatcgtttgccgtcgtctgccagagagcgtatgccgatcttctcctacgctggggtttgatctaccatcgaacagaattgttgaaggttacattccacatagatcatcttgttcctgtcgatccctccaaacgattagagggtgctgaagcaactgaatttggggatgggcttggtgagttcactgatcacatgttgaaagaagtagactgccgcctatctgtgctcttgatctgacgtaagtgaatatatattacttattccttgcgcttctttcaacagggtttgcttttgttccaccagacggagaagtcaagatactgaaatggcgaaataagaatttcaagccagagaagctacaaaaaatgcccacatcgtgtgcttattgtggcatcttatctcatggtacgtcttcctgcatcttcctcttgaaataaccatttcctaaatcaaatagctccggaattgacatgttttcatgtcatgtatggggaatcttggtaggagtcctccatccctgccttcgatgtggtcacgttctccatcttcagtgtgctagagactacttcctctcttctccatctgcatcagatttagcttcggatcattcacgaatttcagacgagaaagaatgccctgccgggtgcggatgcatttgctacgagaaagtgtccaacttggatgagcttatagaatcgagggtggttggttgatatcctgattctgtcaaggttgctatatgatatctatgtgcgtgttcaacaagacagttcgtaatatcatgctcaagcgtctcgataacgtcaccagacacctcatcgacttaagaacggaaagagaatatcataaatatacgcatcactctggactttgtccgatcactttactcctgacccactcccttcggatccaacttccgatctcgcctccagtacacatgactcttccactcaacctttccataatgcccgtctccacgccatccgggttttgctcagttttcacacccaagctcattgctacacgccagattgcttcaaccgttgcagaccaggcctcgcccgatttaataccgccaggaaccaaaattttctctgacgtccaaagctctccttcttcacctttggctgtaacagttgaaggcttgccggcgagcccggcctcgaccaaatgaagctttgagaatagctccttattcaccttagaaactgtggggttcgatggctgacttgcaggtagtagtgacaaccgaagaaggacctgagatgccacaaagagcgcctgaggtgaagatgatgagccgatcaacttgaagattagagcaagaacttcgcctctccacgatgcttttgggagcttcctttgctcttccgatgacgaagatgaggcaactgctcgagcgacgtcatcttctcccattcgttgaacgacattcaccagcaatcttaaccaaatttcctccatctgcaaggtggttccgttgtcttcatctaaaccttcgaccttctgaactagctttttcgcccgaccattcgcacctgcagcatgagatgataagatgtcctggtgcatgagtgtgaaaccaagttggatatgtacccaggcaaggaaaccttctcgcttgacaagggaaacacaagcggtcgggttatgagtcatgttggcaaagacttcaagaatcgttcgacgagaggggatgtcgtgagtagactggaagagagaagcaagaagcgaaaatgttcgtcttcgttgaaggattctccagtcctgagcaatcagatatagacagacacaatcggatcgtgagttacattgagtcatgtgccattttagtaacaagagaagccaatacggaagctcacctcagctgatctcataccatctctaataaacctaaggatccaagtcctctcttgcttccattcttcgtcgcccgaatagagcattccgtaaagcaatggaacatcctttgtgtccaactgagatctttggaggagaaaccgactggccaacgggtagaggaacgaagaggggttacctatcgatctcaaagtatgcgcaaagaacagactgatcaaaggaggtgatcgatggggaattcggttttcaagttcaggggctcgggaagaatgctgaaggatatgaagagtgtaaagaatttgggattgttcttggaatggagtagtctttgtgacatgatgacaaacaagagacgataacaagttcagcagtcatttcctctacatagaaaacacgagtctttaggttcagcgaaacacatacatggatgtaggagcaagcctttgagatcaagaacgaggcaaatgatctcatgtcgtccattctcgaggatagggcacaaacggccagacctaggatgttactcctaaggatttctacccattccaatccagttaattcattcccagatcctagttcgctctggtgaagcaaaacggcaaagatcgacaacaggtacagcggatcatacaactccgggtcaacttgcttggaaggatgcgatgcagcaggttgaaggtcaaacgttctcctcattgggaaagaagaacacgttttgagcactcgatttgggtccagagcaagaatgatatcaagtgatcgtctgatcgagcctgcagcaagaggtccatcaggggaccagcaggtgagcagagaagcaaccgaaacccttcgatgtcgttcgaacaagtggaagatagagaggatagtctcatctgatcggtccattgttcctcggtagagagccatcaaaggctcgatatgagctggctgacaacaagtggcaggagacatatcaaagagtgctcggatgacggctatgactgcgattcggagttcagcgggcgtttcagaaaggtgaagagagttgaacgatcgattcgcgagaagaatctggagatgtcggaccacgattgcgggctattcgattgagacagaacaaggggtaagcttcgcatcctgatgaaacacgagatcggatgatgaaaccaaccttcatgttagttctcgaagtgcaaactcgaaccagttcaagaacctctttggtatccatgcaatcttggagcgctacagtaaagaagggctcaagcaaatgacctttgagcgagttacctttgggctggagcgtaacaagttcagctaagggcaacagtgaacaatgagttgtcagcattgcaatggcggtagactctgaagattcgagaacttactgaaggaagtcacaaaagataatccggcagaagaatgttcattatctccagaaagctgtcgaactagtcgttcaaagccagaatcgatatatgcagcgacgatagactcgaggtgagggagacgaagcttcgcaaaccgaactattagctcacacacggatgaggtgaatgaagccgggttattgagcatggaagagaaggtggcggcgaccgcgggttgagcttctttgctgcaagctgcgagcaagtagatacactctgtgagagcgagtcgactattagcagagatggccgctccagcgaaggaagagataaccaagaacgtagagatcagccgaggaagactctcctcacacgctttccagccggcaaaggatgtatagttctcctcggctgatgatatatccaagaaggccgcaatcggagcagcaagaacgggaagagaaagagctggaagcgctttgagattttgagcaagccaggcggaaaatccttctcgagctgagcccgcctggtagagcaaaggagtgatcagttcggccttctcgctcgaaatgcctccgacgaacaacttgagatccatgggaattcttgaagccgacgtctctaaagctgagaaggattgaggtgcagccgcatcaacggccagggcataatcccggatagacatagaatcgttggcactagcaacttcaaatccggggagtagcgacgtcttcaagagaactgcaactgaatcgaccaatccgagaggaagcagaataggaaggcttcgttgagccatagcatgaaccgtcgctgaaggcggatatcgcttgagagcagtgaaaataacattgaggagtaaggcagactcggggttaagtttaccgctacttttgatggtaccaagaatccgatcggcaatggccacaagggcatcagcctctaaaaatcggatccaaggagcagtagcgacagaccacttgtttctaatgtcttcactagagtttaatagcaacgtagcccaacctaggtaggaggaggcgatttttctatccgcctcagacgcaggattgagggaagaagcaatgaggatggcaagcgcttgtcgagtggtaccgggcaagaatccagatacaaacagctccttcattgcctcgtcggtgataacctccagcttgagcgcatcgtaagctgtcttgtcgttcctatcacattttgataaaaggtgtttgaggatgttcacgcagcctgcgagagcgatacccattctttcagaaacgacaaccgccttagggtcgttatctggggatcggaggactcctttgactcggtgaagaactaatcgacaggctctacgaattaatggaacagaagcgtgtgatggaaggaatcgaagcgctcgagctgtcttggcaggatcggaaagaaggtcgaacggaagatgcaggaacacaacggggaaggtggtacccgcagggagcgcagcttggggcggaagattagaccatatgttgccatggaagggatccaagttcatgggatgtgtggcaaagactattaatggaagaaagtcatgattaatgaagtttcttaactaagtgatgcaaaataacacaactcactagcttctgtgctcagcttcttctgctcctgttgctcggctatgtaatggaagattccggcagtgctcaaaaacgtcaattgcttcttgagcaatccaacctcggcattcttttcctctccttctaaatctctcaaacaagtatctagtctgtaagaggtctcgttagaccaatccaaatcaccctgctttccgatcatcaagaacgcgagccgtctgatataaccacctatgatgaccgcctctgagctagatagaatcttaacatttatctttgctttgagctgctccagtacagtcatgaacagcggtgagggtgcctcggacagcttcctatctttggggggttggtttctgtccgccataggaacatgaatgaactccaacgagtcctcgatgtatttgtagggcgttttgagacatcgacgaatcgaatcatccaagaaagtaagaagagttgcttgcgcctcggacagactggtaggatttaaagatgccgatcgagagacgccttgcatagctttcagccagacttcgacttctgagggatcgtgctcgaagagaacagacgaggacaatagtcgagtgatcagtatcgaggtgtatgcccgggttgttttgtgtggagtcgagaggtatagagcaagaaggtggtagatgtatgtgtgtggagaggaacctgtagtgggagggaggttgagcaaggtgaaatcgaaccagacatatcttgaagaagacgaacataccagccttgctaccccatgctagatctcctccttctctaagcaatcttagcacatgcaactgacttaatgcctcgaccccaaaaacttcacttctcgcaaatccccaaccctcgatctccttgtcgtcgtcaccctcaccttcaccctttcctttaccctttccaccatccccagagacaagaagtttccctacatcgaattttccctcagcaatcaacccaggtagtgtaatctgataaagactgagcaatcttagaatagcttctgtcaagatagatgctcgagtagactcttcggatccctgagcttcaccgctcgttcgagtggcggctacagcacaacctacaacagtagccacatccggaactctctttctgatttctctctcgagctccttccttcgagcagtccacaagccgttgacaccctcttctaaagaagcctcaatctccttgaagacattgaaaacgttctgaagtttagtaagacatctagagagagtcaccacggtagtttgttgaacaagcgggtgagaagagacaagacctttggcggagaattgtttggggaaaatagaggggagaatattctcgactatagagttgaggggaggaggaatagatcggtagggaggctgagtgctggcagaagtagatggagtggatgaagaagacactggcgcgaggaatgtctccacagggataggaagagagatgatggtcgatagatgggcgcttgagatcaaatatttggaagatagtcggggatccaaggtaataccagagccagaccagtagcttatatttcacagaagatgaagcgatcagtctcactgccataccatgggacacagatatgaaaggacacgactaacccagcaaccaactccggacaactagtcagaatccttctaaccaactcttcagcttcgctatcctccccaactaagcccaatccaccagcaactcgcaagatctccttgatcgccttgttgtgaactccacctccgtttctcctttcgccaccggcctcttcgaaatcgtccaaggtagcatccatgttgaagttccgagggtaccatcctttgtccttgaaacaaagcccggcacctggaagcgtcaagattgaaatcaagaagtgatgagccagataccgggaagagtagttctgttcgccgttgaccgaaggaggagagggagaagtttcgtagagctttaaaatttctcctacaacatcgaccccaaaggcagacgccttggttcccctcgagattctcttttctaaaaaccagacctcccaccaaccctgtaagagacgctgaacgaccagggggtgatcttccgcgattggtttgaacatcgagtgtatgaccgaactctgattaaggatagcgagcttggtgggcaagtgagaagatactagacaagaaaggaggaagttgatggaaagcgttcggatgtctggtttgaccaaagggttactggcacccgctccgccaggcagacttctcccgtgttctaccagaggagctttcctcttcatcccgaggagtttcccccaaactttggagttgattcctcctgcattggccaaggcttcccagactttcgcggcccatcggtcggcgaccttgacagtctctcctaaggctcgaagggcggtgatgatgagatcggctctagtgccagcagtatattgagcaatcgctctcatgatcgtgctagacaaaattttgttcaggataggagtcaaggctgaatggaagaacgataacggagatagaagtgcaattatggcggtcaaagtcgagagcgggagaggaagaaggagaggggtgtttgtctgaaagcaaaagatgtggatgctcgccgtgagtatctaatgcatgaaatacacagttcatcaagaggaagggcttacggaaatagccaagtcccaagcgccgaaaacctcaggtgctccagggctcttttcgagatactcgtgagctagcttcactctagaatctgtagcagtgacaacctcgtcataccgaacggtaatttgatttcggaagccgtacagaactacagtgatgaacagaaccgagagtaaacaaaacagacgtcattgaaaaccgtccagaggatcaaatatatgcaagttgtatacgcctagaaaaagctacatactgtctttggtcgcttctggggaagacgcatctctaagagcgtctctaaactcggaagcgttggagaacttcatagctggcgcctctgtgacgacaggagcagttgccccaggtcttttcctcttcaaattgtgagccattgaggaggtttgatttagtttcgtttgtgttgcttgatcgtcgccaatcagatgaggaggtcctgtaagagtcagaaaccccgaaagcccaagggtgatgctggacgggttgaactggattgaagaaatgaagtttccaaaagattaagtcgaaaaactatagggcgtgactgtggttacagcactgctttgagtttcgcgtaaccctgataagagtagataagacattatagtgatgtccaaaggagctctcaactggatacattgacaaagtgttcatcaagaatactgacggaagtcaaatatcaatcgttgagaggatttgaacgaaaagcgaccgtactgaggtctgagctttagcaagaaagggacagcaacaaattgtacggggagggtagtttgaatgagaaaaattcgaggggaaataaacaactagagatctcctccaaaattattctataacgacgctgaaccaattaatcccgacgagcctgcctccctttagggattgagcgacaaacttctcaatatcaaagtttcgtctgccttcaggctttgagtttcgcaagggatgatcgctggggaagcaggagacttcattggaaggctgctccaaaagaatgaaaactggcagaagggtcgggtatgatatcagactttcactttctgaatattcagtattaaagaaagcagggataaagagaacaaggctcaccatatcgatggataccagttcctttgccaggagcgggtgcaagccaaggcatcaggtcatccttaggaacttctacacaagaagttgttgtgctaggatcatcctctcctgattgagcaagttgcaagagaatctctggatcgattgtcttcaaattaggtttgatccagtgtagaaaagatcgtgaagtaggggatgttggggaaggagcgtctgcgcgagatggcgggcatagccgttcgtcagatctttgtacgtcaaacatcctcttgaaacgaatagatgcccacaaacctggatcctgcatcacgagcgtgtatagcttgtcaggttctcccataaactcgacatgagtaggtggttcctgcacaacacttgattcgaacttgttcccgtacgcgacaacctcatttctaaatgagatctgtaagtgaataggaagttcttcctcaggagcgagactcgagctggggaacaaggcatcagttagagatgggttcgattgtctcagagctgcaagtggggacggattaaaaagaggcattgtatggagagtgcgaaagatggtgatggatgagtgtacgaaacaagaagagaagaaagagataacgacctatctagaatcaggataatttaacctcaccgacgtcatcgcgtgagtatcagccagtaaggaaacataacagtagaactcgagaagatctcgatattctttctgaaccagctgtcaacccaaaatgagccgttttcctggttgtttgcataaatattcattatctaccactaaaattcttccatcttgttcccttgacgagtacaacttcagacccgtcctccaccgcctcatcgatccgttctcgagattctaatatctttactgggctcgagaaatcaagcggaatatacaacaagtaaatatactatgccgaatgagtgaaaaggagtctgtggtcaggatggaactaagtatcaaatcaactctacaatgacactcactgtctctggacttccagcaagggggttgtatacaatcgaatgtttgttgacgagtgtctgaacgatctgcccaattgtcgtgtcctggcgatgttcgagtgcagagactcctcgagattagaagtttggactaaactaacaattgagaacagagtgagacgcactctttcgtaatataatccatccctcttcacgcctctgacatcaagtcctcctaagtctataccgaccttcaaatgccatctttttgctctatctctgatttctgttcttcctggcttggctgtctgtttcagcttcataagttctaaagctggcgaaacctttttgcgagcagatgtcgacttcgtgcttaaggatgtcgaaattggagagaaggaggcttgaataagagacctagtctgagctttgtcaatctcagctttgcttaaaggtggagcgcatgcatgtgctgatgagctccgatggctagagtcgagattacagcgagagtcaaacgctgtatagattggtttgaagacagaaacaaatcaaaagagcgactaacgatagacagagtgcctgcttgcatccttcacaaagcacatccgtcccttcaccctggtcagcttcatctgatacattccaagttctcatccgcggatcctcacactcatcgaccatacatttctccactattctcgctcgtttgaggtcagcgagatgaactccattgtccgatcgagtacatgaatgagtggtgaaagaaatatgatgtctgcaaaatacctaaagtcctcaggacaagattcagccgttacttctgtcgtcaggaagagaatagcaaggtttgaaacggatacccgtacctgagcacatccaggacaagctataggtagaaaatccaatgtttgacaatgcttgcaatgagctccgataggtgcgagatccatgctgaacgtgtgaggtgacgtttatcgaaggtcatatatcgagttctataatattctagggttatgttcgctctcgatctaatcttagtccttccatttacacaggagagcaacgtcaaaccctttgttgttgtacagaatacggagaacaacaacaagaggttatgatagcagaacaagatacctatacaacagtcaaaaaatacatccgacttggtctcaatcgtatgcatatacgtatgtttatgcgtatgtatgtatgctcctctgcttttaagtaagtgtcttgcattgggaggcgttgtgagtgtgttgccccgcagtcacttgtcgttggttacaatcaccgtaacctcttcacagaacattagtagaattctcagaaaaaacctatagagttttatgaagaactatagttttgactgaaatttccttcccaggaccgctttccctcgacgtcaatcctctctttctatcaccatccaggttcctttccatccttttcgccttctcctccttttcgtgccttcatctgttcattccttcttgtatcaagcttgatcaaaagaggagaaagactcacacctgtttgaatcttgggttagaacacccggtcgacatccaaatcgaccagtctatctcctctcggcattatcccgatgatcctcaaggatgactccccggttggggtcctcacccgacaagtctcttgccaagagctcccctcgacatccctaccctcatcaacgttcctgctgtatcctccttcatcctcatcagcatcctttcactcagatcaaacttcccgcgaacggatcccttcttatcatccgccaacgtttcccccggccgctcatatggcagtcgccgatcctaccccatggtctaggtatccgcctcctaagtacaagttcaagactcgaatgagcagattcatccctgttcttctcgtcgtaggcaacagtgctattgtgcttggagcgagtgtgactttcatggtcgagtctgtcatccgaatcgctaccacacgttagtcttcgttgtttttatcctttcgtctttcttgtttaagcctgacgttctttatctttctttcctgacgattacttctgttcgtctcttcgtcttccaatttcgttctaaatacgaaacaaaaacaaaatacgaataaaacagacatcaaacttcagatgtttgcagtctttagaaacatcgtcatcccttcgaatattctgatcgctgcttcggtgtcttctctcatactttgcccgattcatcatctactaccccttccgagtcctgctagacaatccttcttcaaagccgaattctcgtacaaattactcaccattctccgcgcattgattcctatcatcaccacactcttataccttatcggaggttgctggttctttactgtcgctctcaccaaagatgtcgatgaagacaaggacgactcttcggtaccagtcgggaatggtgtcatcatccatccagaccagaattatccgtccgatggcaagttctgggaaccttggttcttctccgatccaaacgtcaagttcatcgtgttctccactcttttcgcagtgctcacatcaatcgtgtttttattgaacgcgttcgaacacaacattgttcatcgagtgttcactgggacgccaccgaagaagatcggagagcttgaacaaagagtcaagagattcttcttaggttcagaaatgtgcgaggaggaacttagtgcactcgaagtgatgcttcagactcaagatggggacatcgatggtgagggtggatcaagttctggatctgaatctagactagaatccatcgaatcaaccgagaagaggcgacgtaggagagagcgactggcaagaatgggcattcgtttcggcaccagagcagaagaggaagaaagtgagatgggtaccggtacttactctaggagatcgaggagcgatgatagggcgaacaatatgaagcagaatttggtctcgtggtggaagaccaagaagggaaagcagcgggaaggtccactgtcaatctgagagtcgttattccttttttcctcttcttcttttctttgtttattatccgcttcttcattttcattttgtacccttcacggacatatctctgttctcttatcttgtttttgaatcaatcttgttttctcttcctcatgtttttttttcttcccctacacatgacctttttatccttattcatcttcaatttcttttcatgtatcttctggttggccgtgcatacattcttcgcctctttcctcctgtcctcactcttcactttactctccttctcatcagctatccctgacttctttcttcttctttcgattgtaatgtttgctctctcttctcatcttattccattctctacttcttcctcctcaaaagcatgcagtcggaagaaggaaaatttggcccaagtcttctttattgaatgtatactacacggatgtggtgcctttcctcttggttgactcatctagaaccaacagctacagacattgaaccatgaatcgtaatcgatgaagatgtttatgaagagaccagctcttatcgggagtgagaaacgaagatctgtcaagattggagcctaaggtgggagaacaaaacaaagcaactgatgaagcgaaagataaaagagagatgaggaacctggaatacctagtatgcctatggttactaggaagacaatttaacaactggcacaagttacgccttccacgttgtccttgaattcgcccaagtaattgccaggtgggttgtaagagcatacatctattgaagataggatttaggaagaaaaacgagcagtcaaagttagaaacagaggtcagagcaccagcagaagtaagaggaaaaatgtgaggacttgcagaacgtcgcttccccactgttggcaccgaatgcatcaagatctgtgcatttagaggccgaacaaccaacggcggtggtgctcttccagacgacttgagtgaaatgatcatattcacccgaagactaaatccgttgggttataaccgacatggagcgagacaggatgagtcaaaatgatacggtattagtccggtggctttgtcgttcagataccaaaggaggacgcacaaagtcgtatgtgttagcttcatccgtccatgctttgacggccgatgcgatgggatagttgcccgtcccggccgctaaatctgatattatcatcgtcaacatccagagatcaaaatcagtcgacgatcttgatgcacagcagcatggatgtttgaaagtagaaaagcacgtactctctccatactgtccgccagaatgtttgaaagaacatttatcaccccacgcctgggcatatgctgccaatttagcatcccaagtcagagcgcgtgcgttgtattttgatcggaaatcgttatgcgctttcaagtatgcagtgatatcagcctctgtagctccagatggggaagcgggagcactagaactttgagaagcggtagcagtagtagtagaagactcagtaggaatagaggcggcggcggcggcgacgacggcggtaatcgaagttggagtgatatgcgcttgggaggaactcggcgccaactgagcagcgctggtagtgatcgaagcagcactagattgagcagcagcagcagaatccgaagaaggcaaggcggtagcggttgaggaaaaagcagaagaaacaagttctcactcatcttcctcgtcacagaaaggaatctcctcctcttcagcgatagtctggtttgcactgcccatggttgcttcagctggagcagaagagtaggcagccgaaggaataggagccgaatagatggacttaacagttcatttggacaaggtgaaacaaaaaagagaaaaggcgaaaattagcttcacagcctactcgcagagaagatcaaaggaaggatgcctacttcggatgagttggttgcacaaagagactctagaagagtggcattcatggagccaccaaaagtgtcatttccaactagacgagtatcattagcacagattgtatcgactaaagtcccattcacgagaatggtttcattggtggctgatccggatagtccaatagaggcgagctgcgtggcattgactccatgaagtcgatagatccgatcggaatgagtgtgtttgtgatggtggcgatacctatcctctcttcggaccctgatcatatcggcctggacagaggtggcgacaaggagggtggtggcaagagtgaggaaagggacgaacatcgtaagtgagaagaaacgtatagtataggccgagatttcgagtgcccgaaggagaagatatataatagccgagatcggaaagagtgaggaaagcgcaaagctacgaccagcgcggattctttcgtgagcttagtagacgagaatgagaagaagcaggaggagagttggcgaaagaaaggaggatgataacgagaaccagaacgaaaacaaggataggagaagagaagaaaaaaaagagaagaaaagttggtgtccatgatggaatgattccccttaaattctttctcgttataggggtacccgtttcgatgttttcttccacttgaaaatggactgtttattaaacaggcgattcaatggatcgatttcatttcgaaattcgaacgtagtcgagactggcgtttcaacatttgaaacagatattggtgtgccaagagaaaaggggtaagctaaacgcggattgtaagccataggcttggtgcgaacaatcctaaccggtgatggttgatacatggcttcatcggacttgggcgccctcagactacaaaaacccaaattcccattggtcatgggtttaattcgtaccagcctcaacctcatcctcaacagtcatggcagtatcaacatcagcctcactagcaacggcgtcaaactccggcatcctcgccctctgattctttctccggtggagggctagctgcagcatgttgcgcaacacgttcacatctctatgtaagggcggaaaagcccggcaaccgatatatcgcaagtaagtgttatggttaacgttttgtgtacggtttgctcaggcttagatgtgaagctgttccgatgggttagaaggctcaggctcaggctctagaggaattgtggaagtgccaaagacataggcgaaggcatagtgagagatgggacgaaatgtgtttcgaacgaagatgaaagaattcaaacttgagagaaaagagaaaaggggaagataactatagaaaaaacaaagaaacgaagtacttgtatctcttcgtcttccgagcatggatacaagatggaaaggatgcatacacgtatcgaaaacgcgagaggtacgaaacacatattgtctggatggtatgcaaatatatacaaggaaaaagcgtccgataaccgaaggctctgcagtccacagacagacagacataaacatgcagagacctaggaatacagggacagaagacacagagaccatgaaacacagagatagagagatag

SEQ ID NO: 872 - DNA, 29533 bp, Xanthophyllomyces dendrorhous
agaaatagagaaatagagaaatagagaaatagagaaatagagaaatagagaaatagagaaatagagaaatagagaaatagagaaatagagaaatagagagatgagatagaaagttcatcttagctggcttgatcgttggtctcggggtagacttattctgcgctcgaaaagatagtagtcaccactgatattgattatgatatttacttgactcgacactcctaaacttttgttgaaatttcctatatattctttgctctctccgatcaaacaaactatacacatcaatataccatgactaccgcacccccaccttatcaacccaatggaggggctgtcactccagatgactacatcaagtatcaaccttcaattcagcttcctttaggggatcacaggcacgtcgggttgcttgcttgccaacgtaggttttttattctcttcattcatcagcagatcttccggcgtctcctgacatgagtcatcttctgccacctcatcactctcgataccacgttcaccgtatcgatttttgatcttgtcaaccaggcgaccctcttctacagaggctgtctaccgagatcttctcgtccaaccttttcgtactccctccgccgacaaaaggtacaaagtcggcaaagactcgaaaggcagcaaccgaaactccttctctctcgcctacctccgacacaaagatctacgagattgaatgtctcgatacttgcttgtttcccgagggtggaggtcagccttcagactcgggagtcatgattgttgagaatggactggaactcaaggtggctcatgtgttgagaaaagggcgaaaggcgattcatttcgtggaagttccagaggggaagcagttgttgattggagctggcagcaaggtcgagctcagagttgattggcagcggaggatggatcttgtgcgtgatctcctgcttattttgcgtgcacactcagttctcctaatcgtcacttcatctatgaacgttacagatgaccacccatacgtctcagcaccttctgtcttcattgctcgacgccatatccattcctacactctcttggtcattgactccataccccaacccgtgctacatcgagattcctcgagcacccaccttagaggaaatcactcagattgaactcagggcgaatgaactcatcagggaggccactaaggtatgggtagaggtggaagatcagaaccaaaagcaggagacagaggaagcgagaaagagtagcaagtcgatgcccaaggactatgaaggaggtgtcgtccggacggttgtaatcgatggggtcgatcgaaacccgttcgtctatctctcttccctctctgatcttgaagataacctcttggttgtctgaacataggaatcaagctgacagaatgggtgtctgtctagttgttgtggaacgcacgttccatatctgtcgctccttcaatctctacacatcatcccaactgtaagtgggcttcactggaagcctttgacattcaaccagataaattacaaacaagcttatagtacgctctgaccaccatctcacaccaatatagacgacgcctcattcgtcgaccactcgtcggctgtactttctcacttccgctcggttaaccctatacattcagaaatcgactcttcttctctcatctctctcgacagtcctaggaggagcttcggccgagactttacctgctcgcgtcgaggctcttgttgagtctagtaaatcaacagacaaagcgctgaaatcaataaaaaatgagttggccgggctgatcgccaaggatatcaaggctgatcgaaagggggaaggagagtggataaaagtcgttcatagagaagctaatgaggggacgacagggcttgacttcttgggagccgtctccacagcgatttgggatgatctgacgaaaggagagaagggattgttgatccttagcgctatgccgacgcctttcgttgttcgtttttgttgttttttctctctttttttcttcaattgttcgagctgagcctgacctcgttcattgatctccaccaataccgttatgatcaccacaggctacttctacatcaacccttcatctctcaggcacaccagaactggtgtctgcttttggagaagccatcaagcaggtcgatattttcaagggtaggatcaaaggaggaggcgcaaaaggtcgatggcaagccaaggttgaaggaaaactaggggaagaagaggtcgctgtattgaacaacgcagcgctgagtttgagaaaatagatcacctatgtagagcggatttcgtcttgtatcggtttctccgtcacgctcttatcatcgttgtatagtttgcctccatttttcttttcgtagctttgttctcctccgaattagtatgatcgacgattctcggctcgtcgccgttttcaactttcgggattttatattcttacggtttgctatagaaatagaggcaagatttgaaacgtggaagagtacacacaattccccgtgagaagaaagcttcaatttggagccgagagtcaaataaagcatgccgatcacatccaactataggaactggaatagatcagaatcacaaattcaacttgtctccttctcaattcactctcttccgaatgagtttttccgaatgtcgatttctccggttcagacaaaagtaatttaagaaatagagaaagaagactatgagcacaggaaatatttataactgattgcatgctaccgtacggtccgcgccttatccggttcgtgacgatgtagaaaatcccggaccgtgggagaacggagggaaagaaacaagtgttgaaagggaccaaggcgcgtgttagaattatcttgatgtgatcggctaatgcggactatctttcaatccattattgtcctcaaaatttatacagagcaacaatggagacaacagcgacaagggcgcatgcatttacttgagtgattcttaggaaaacagaagagatctgaccagtatggcacattcaatcgagacagtaaggtaccaagatcacagaaggatcaacggcaaaacctcggacttgaggatcaatcgcgcagtcgccttgaatcctgctgacctcacagatcacgtccggtaagtatcagacatgagcttctaccaaaagatgcttgattcaccagatcgttcgtttcaagtctattcggccattgcgatcctttctggagagccggtaaaatgatcaacacctccaagttctatatagagcgatcgttctctccctctggcatttcctcttcctatttcccctgtatttgcaagaccctttccgtcctatcacagtatacgtcaggccttcttgacttcatttcgtcttgctactaccactgctgttattatcaacaccattacccccgctgatcctatcctatcgcaaggatgtcgatgaatcaacggccagtatatacccttgaatccaaaacagggagtgaagaggtcaaacaagagatttctcacgaggaatatagttcggatcaacaagagcctcagctagactttggtacattcaaagatgccaaagtggtcgaagtctgtgagttcatagaccttcatctttccatctaaagatggatggaaatacgtcggaagggaaggatttgtgcgagtcggagacacccgaaactgatcgcgtcccgctgcttttttcggatgaaaagttaatgcacaattcgctgctgcaatgaaagctgagaggatcaatccccgatccagggaatcgttcatgctttattttgtgtgcgccgtgtgttgtatgttactttctctgcctggccctcttatttgatcgactactttgagcgcactaagtttacatgaccatcttggctttctcctcacgtcctcgtctggccgatatgtttcccagtcctttgcgcttgtacgaatggttatgatggctgtgagtatcaatcccggccatcctcttgaatttaatcgcgcagaacccttctaacgtattttggttcttcaattagcgttgatgaccgctattcaagccatgccatactacaaaagccagtgagtatacagttcttatcaagagtctttgttccgctcggctgatatctgagcgtgatcggtggggtttttaaaatcagattcaatctggcaacgactggaagctccactggtctcgtcttctcaatctataccatcgggtccatggtcggagcttttacagctggtaagggccatctgtttctttctcgtcgtctgatattcgtcgttggatgctgatatattctcgtatcattcttgttattggttgactatccattgccaggacccatctctgatcgattcggccgaagagtcggcatgttctgtggtgggctcgttatctgcattggaatggctgtcgttagttctgctcaccagatgggacagttgattgctggaagattcatccttggttggggttagttcattctcttctctagtccggtcagctttgatgctaattatatccattcatcggactatgcaggtgtctcaatcatgacggtcgccgctccagctatgtgtgtcgaagttgctcctcctcagtgagtgcctcgtatcttcatcctcatgttgtgaacatcattgaccagatttgatcatcatggcgctcagatggcgaggacgaatgggttagttgacagactctggtgcatgaggttgatttttgcgccttgaatttgacatttcgattattgttttaaagttggaatctataattgtggatggtgagagagaatactgtcacttttgtatgagacgatggtcggatgctcactgttcctggctatttctgcttttatcttccatcaggttcggaggaagtgtacccgttcgttttcagtaaaactgcagtcaagtttctcgaggtgtgcaccatacgaataacattttttcttccttcttctcctactttgtggattaggccgctgccattacttttggcacaaacaacatcgcaagcaacatgtcctggagattgcctttgatcttccaaggagccccttgcttcatagtcatgatatgtgttttctttatccgtgagtcttccctgttctcgaaaagatagtgcacatatcgtttctcattcggagttggttcttctcgtcgattcaatagcggagagtcctcggtggttaatgcaggtaaccagttgagctgatacttcaaacacgtatttccgagccaacgagattcttctctttgacgttgatcatcagaacggcagaaacgaggaggccctagcgttcttggttaagtaccatggagggaacaatcgagacagtaaacttgtagagctcgagtggaaaggttggtctcgattcttttcgccatcattgaatattcagaaaatgacaccaacctgtgtcttttgaatcgtctctcgtcttcgatataaaacagagtttcaagagaatatcgcgctagatgcttcagataaacgatggtgggattacaggccattgatcgtcacttcgaacggtcgatggaggatgatgtgtgtgctcttgatctcggtatttggacaattcagtgggaatgggttgggttattgtaagttcatcgatttgagcagtcatcatcatcgataccgctctacaaggttcaatgagagttgaccatcgatataccatttttatacaaatagtcaacactgtcatctatagtacgtcatcctgtctattttcctaaagttcttttttctgattttccctaatccgtgccctgtttctgtgtaaagacaatttgggatatacttcaccttcgatacagctcggtttgaacttgtcaaaccaagtcgtttctgctttctgcgctgtgaccgctgcttgtttgagcgataggatgcctaggtaagctttcgttctttacatttcatggctcttcccctatctcttcagcgtgatatctaaccttctgacatatttttgcttatgatcataatcgttgatagacgaccagtcttgatctatggaaccttcggtgccgcatgtgagtatgacgtccaatcaagctccggccttcagatatgatttgagagttatcaaactatcatcttctgaatactcgtaaatctacttctaatcttatcaggccttcttgctatcaatggatccctctcctataaatgggcccagcgtatgtctttctagctaatgactcttcccttctatacacgataagctgattaaattcgtcactgatgtcggattttgatagagcctaccgacgccgaaggaaatgttattgaccccaacttaccgtaagcacaaaaatagcctattagaaatgccgagccagcccttttgttgatttttatctctatgacctggcactttacagaatcgggcaaggagctctcgctgcatacttcctgttcaacgctctcttctcattcacatacactcctctccaaggagcttaccctgcaggtatgagcaagttatcttctacttttctcgctgtctatttgatcttcactaggtttctgatcttgacatttgatggtgtctttttccgacatatggtagagtgtctggagtcgacagcgcgggcgaaagggatggcgctttctggagtcatcgtatctgccatgtaggtgtttctgagctgatctttttagtccttagatatcagaaactgataaaaccggttcttgttatttttgtagtggcttcatcaacatgttctgcggaccaatcgcgttgggcaatataaaaaacaactatgtctttgtatttgtacgtgcgacccagtccacttggtctttttctgtatctacgtcgtgatatgcttgagctgacctgtgacgcattggacttttaaggtcggatgggatgtggtcgagacgatcatatggtatttctgctgtgtcgagactcaaggtcgaacattggaggtctgtacctccttctcctctgtttcgtccctcctttctgcgtcgtgccatttattctgatctacgaacattgttatcaatcacaggagctggattggatcttcagtcagaagaacccagtgaaagctagtaagaagcgcgataagattgctatctcgcatgacaaagtagtcgttgtcgatgaagcctgaatgggaattctttttaagcacggacaggatctctttcgtcatgtatcttcttgtattactttagtcgttgtagttttaatattttctgctttgccaggtttcttccttagtttcctgtttgatctactgtgaatttgacttttgctgccagagagcgaccctaaccgacggtgatcgatacaagatctgtaaggactggaatgtccccagaccgcaaaccaccaaggtgccagggatgtgagctggatgttacatgtttgtaacctacgaattgtagatcccctgccgccagtcctcttgcaatgcatcagcttccaagtatatactcgtacaacgcatgtgctcatagcacactctatgatctgttcttgcctgaaattcttttgtgcagtatatcattttaacataccgcctgtatacagtgcctttgtactctgagaatcagatacaagacggaccttctttgccatccatagcatagtatcctaagcctgtatccttcttcagttcccctatcgtccttatcctcactttctgttatccctgttctcaacctctgtactttcaatcttattttctcgcgcctctgttctctctggtctcagtctcagagtctgaacttccacttctgcgctcattcccgtatcgattatacctcctgcaacacacacacaaacacttcctttttcttccttactacctgcacagctttatatcatagcacaactgaacccattacccatgagactttggcagtttgtggtctgaagacactcaagtccagaagaatcatacatcgaccaccattggttgaggctgctttcaccaaatctaaggcttatgagctatggaaactacaaagtcctctcattttccatctatctaccaggaagttcataactcctcattccaagcgcacaaagcatcatcgtgaacccaacgatggaggcgaacacgaagacggcgtctatggaagttaaataagccaacactgcctctttgtgaacatctgttggaagagtaggaaatattacagagggccgcttaatgatcttttttgtattgaatcagttggccgggcgaaaagagatagttgtcagatcgaagaaacttttgatggggtggcggtatatggagagagactgacctctggaattcgactatcatgtcctaaccgattccccaagctccaggataaaatcccctgttgtaaggctcttgttaatgtgacaccgaggacctgaccaagacttctgaacatgtatgaggcggagatcgatatcgccatgttttctttgtcaaccgaggcaataagagcggtaaggaaggtcgtgatgactactccgcctgttacatcgataagtttccgtagccagagttttgagcggacccttcagttggtccatgttcaaacaggaggagacagtaaatgctaaacagttaaaagcaaaaagaactagcctccccaagaggcgatggccgtctcaatccacatccgatggatattcgtatctaccccccacgttaagaaggataaactggcgtaaaggggtagaagacaagaccaaatgttgagggatcggtacgatccggtatggcgcatgtaccttagttcagtgtgggagagattcatattagcctttgatcatagagatttagagaaagaagttaggacataccatcctgcaaagagggagccagcagatccggtgatggaagagggaagcaatatgagacctgagatgattcaaaaagcggtgagaacgttgatgaagtgagtcggcgctgattaaggtagttcagttgtgcatccgaaagacgtaccagtctgagagccattgtaaccacggacaatatgcagatacatgggtatcatgaataacttttgtttgataacatgcacacaagattatacatacgattcagcctatgtataagcatcgttggaatagaaagaggatcaaacaggacgaacccgggcaaacgtgctcatagtaagcaacataaatgccagcaagactaatcctggtgtcttcatcttcaacagactcagtgagataagcggctcttcagccacgtgaccctctacataccagaatattgcggtagagatggcaaacacgataagtagcgaataaacggctggatgagaccagggcagactggatgaagtatgtagagatagcgagaccatcaaacttgtgatctaatgatattacacattcttgataatcagttagtctatgtaatcatctggaactcggtacaatttaggagaaactatactgaccgaagtcagaatcgagacgaaaccgtaccaatcgattcgtttcaggagctgaagagaagtttcgttggtagactttacagggaccctgactttccataagatgagaaggaaagaaactgatagaggaacgatttgcattccgaaagcccatctttgtttcaggaagcataatagaaaagaacgcgatagattttcaaccctgttcaagtgataattattcgcgtaaacaagacaaacctccagccaaacttgtctgccaccgatccacctagaacggcacctgtagctgagcccgcgccgaacaagagatttacatatcctgtaacaagaaatcagaatcagaatgaatcggataagtcattgggttagaagagcattaatcatgtgatagaaggacggattgaccttgatataggcctcgggattttaaagaaaccaggtcagatatgatgatagcggtgatggttaacagcctgttatcattcgcccacaacaaacgaaattcaattctacacactagaagacgagattgaattcatgcaaatcagacaaaaataaggtacataccccccaccaccacatccggcgagtagtcttgcgcccaaaataaaagacatcgaaggagcaattgcacatcccaaagtacctgttgtgaacagtagcatggcacagatgatagccgaccgacgaccaatgatatccgagagtcttccccataaggctattgaatcgaaggccgtgttcaatttttgagtcttctgtttcttgatactgaatatttgatgtgaaatacgacttaaaggaagaacgtacgcgtcagagccgcaactccgagaagataagaaccacccaaccatgaagccagatggcctgctttgctactcgataaacatcacgtctggtgtgttagttttgcggtcaagagttaagcatggtatgtccgttaatcttacaaatatgatacgatatcaacctgaaggttggctgtaatactagcattcaaggccgagcaaaacacgctgataattgatcggacggagcaagatcagcttcatatactgaagaagaacgagacacatcataaggaaccgacctggtccaaaggccggagcaaagaagtgcaatctccctaaaaggcttgtccttttctatagttggttggctttttactatcgatgggtctatcaaccgcgcttcgatatcagtagcacaacgatcgtctgacactgtggttccatagtttggagtagcagatatgttcttggcctgctgggtcgcacctaaaagaggagtagttactgaagaggacatgtgcgtttgggaatcagtcgttcaacctgtacacctgcaacccgctttacaatgatgtaagatgttgtctgaagaaaagaaaaggaaagaagaaggaaaagaaaaagaggaaaggaggaaaggaggaaacataaaagaaaaagatgaaatcaaccaaaggcgctagattggcatggcggacaaagccgacggattaggccgataggatcacagcttacgaccgagctgtaactctggttacttccctggcaggaaggagcagtctcaacacgtgattcaggggatctcggtcgtttgtggtccggggacactccagttcacaggggtttgtcacgatcactatcggctagggttggtttcgcgcggccaaggccatagagttttgcaactgtgaaactgtgaattacggaggtccgtgcggccatcaccctttgcacatctcgtctcctgctttcaacgcccatcatgagtgactttacccaatgcatgctagacagatacgtaggtacaccaggcaatcggcgatcagatatacacaggttagttgatcttgtctttttctcaaactccaaaacaggccaaggatgtcaaacttgcgaccacggctccgttcttggagaaatgtggaaaacacgagatttcgaccgaggttctatctgactatctaactcaagacaagtacgttctcattttcccgttcctttctgaatcaaactgtggctatcatgctgatcttctctcttttgtctattgttcttcaggatctacgccttcgagggatgtcagttcccattgatcactttatgtccaatccagatgtcacagtagatcctgatcaattggaatctcttctgttgctctacaatgtagacccaaagttcattggtaagcttttatcgctcgaaacttacaatcactgtcttactgtcggactcagctgaccatttcttatcatttccctgcagcccaactcatcactcggcttcctctttcttctccgtcttctcgggaaaacttgaccctattctcgtttgctcttcaaaatgtcgttagagagaccggctttttcgattctctgggcgaccgttttggactcaacgttcatcaacctgtcagccatcttcgaacgaagaatagtcaaaagaaggatgatgcagaatctgtggctggatcaagattgaatgaaaacacaaaagcttatgtggactttttgatcgctacgggtgctgagggtaatctagacgaagggattgttctcctatgggcaatggagcgcgtgagtcgtcttgtatcccttatgacctgctggtttaatctagctatctgcgctaatgttttacacgaatacatacacttgaacagctttattttatggcatggactcatgcaggcgaacaaacacctttcgatgcgccttccgcttcatcatcatcagaacctatcaaagtagcactgacggaattgattaacaactggacgtgcgacgaattcgaaatttttgtgtctgactgtgagaaagcggtcggtcgacttaatttgaaagagggaagtgaagaatggaagaggtgtgaagaggtctgttcttttttgagtttttgctgcatatgtcttttctactactcagcacttaaatacgttcatttctttctttatctcgcttcgatcatgatcaagaccttcaaaagagtcgtgtacctagagaaacggttctggccatccatttgattctcacaagagaattagcttcaatttgatatgaaatcgcagtcattgaagatcatcatgcatagatattcaattaaaggaataaaattgcgtgaacattcgtaattgcaagcataagatcaacaaacaataagatagatcaagtccatgtctcaattccaccttcaaaatcttcgtcatatcacacgttctaccaagctccaccattcgagttctgaccgtatccagagtcataattctgatgagggggtggaccgccttggtagatttgctgctggtacgactggtgttgctggtgcggatcatgatgaggttgcccatgaccggcgtagcctccatggagcggaggcggacctccaaattgagattctcctccacctccactgtaaggcggttgttgatactgaaacgaattctgatgagacgcaaacgacggaggcgcgccatattgatcgcctcctccaaacgaaggttgctgttgatatgactgctggtgatattgttgagcgccagggtatccagagtcattctgataagatggatgtgggggacccgaggtatgaatgttctgatcaaaaggcccatctctaaacacaacggggttagttgattggaaaccagtcaccgaggacataaaggccgttccttggttcaggtaggtcgctccggggacatgaacgttgtgcgtagcaagaacacctgtcaaggggtttcgcaagtcatgaatcgcgtcagtcgtccatgtgttcgggactctcgttagaagaccgcacaactgatatttctgagaactaaccttgcaaaccttgcgaagggacccctccctaaggatcattatccaagacgtgacaatcgataaaagataattagctcttcaacagtcaacaagaataaatttgggataaagctcaagcccttacgtgatcgtgagagttgttacttccgctggtatcgccgatccgtcggttattgttcgatcggacactagccttcgtcaacctgtttagtatctcctgctttttgggctgagtatcgatccctaagtagtcgtccatacgaaacaacgaagaatctataaattgttggatcgatctgacagaggtttgagaagtttactaacactgtttcatatactagggtggaaaagacttggtaattgtcagtctactaccggtcaaatagaaggtcgtatacctggaaggatcacgaaccgccatcatctcgctttgaatttgagatcggctgtcatagaacatcgggtggaagaccgactcccaggccttctccccaacgcctaatcgatcatcaaagaaagtgatcaaccaaggaaaagaaactagtcggattgatcttcaacagagcacgtacctcgagcatcgatgttcgtatcgtcccaggctgtatacaaagatatataagaataagcaaaaccttgacgcgtatcaaaagagtgaaggaacgattgatgatagatggaatacatgccttcaacaatgagtttgacggcatgtgtgatgttgatctgattgaaaaggtgccgaaattagcatctgcttgctcagctgacagtcaatagatcatctacgtactcgagccaagttgccagcaggctcgttcaagattaggcctgagaacgcgtagtggaggaatcacatagccatcatgtcagatgatgtttctcaggagggcttaagaggactggttggatctaattgacgaaccgaagtggtccttagataggaacgagtgcgtgggatcatccgaattagggttgtcgaaaacctatacatcgctcacaaattgctaagttttagcctcaagattgatacacaatgaggtttgatgagatgaatacctacagcgaactgatctattgtaaacaaagatcatatcatcttgtcatttaagagttgttaaccggaaaccctgaggaaaagtacgaaccaggatcattgatcacctgctgggatagactagagagacccgaggtggaacttttcagaataggacccaagaaaggctcgatggctatcggtaagaacgagaacgaaggacaaaatatcagtaatctcagtgcaccgccctagtttctgtatagagtacgaatctaactgactggtaaaaacgaaaacgttgagcgagtttgtgatcttctccacaagagaattaagacccggaatcttctcgatagtaaccgaaattcctttggagactttgtctctgaaagccaatattttccaaagtgtcgcatgaagctgaaaacctcaaaattaagtcagcgcgccgtactaaagcccataattagaacgagggagagtcccgccagattagagatagtaagcaaagggacaaacttgctgaggagacatgttattgggatctcccgaagatccgtttcggatagaatcaacatctcgactcagcgcctggccttctccgcctggcatttgtagtaaaaggtttcgaagcccagaatccgaattggcagggtcggatcgagccttgttgatagatcggttgaggtctgagatcgaagcctcgcttaggtgatccccggcttctccaagctaagatagttgtgatgcacaaattatgccaatttaagttgtagaaaacaccacgacaatgcgaacaagcgagacaactcttactaatgagtgaatgaagtccgaacctccaaacgttctgtacaagatcatatatcaatatgagcttgtctcaactctgttgtgcaaaacaccatccggcttacccagtaaccaaagggggaaccatctgtccattgggtgccttaatgatcgcattttgtccaacgtgaggaaagacgtcatggtaacctaaggagattaaagctagctcgcagaagtttgaatgctatgggaataattgataaatttaggatgaaactcaagagtatcagtcaaataagacaaaaatagaaacgcgtaataaatgtgtatatgagcttacggcagtaaagtcctccagggtatgcatagcttgtcctaaaagcctataagcttcgtattcgtcgtcgtcgtttcctatcgatcaaaacgaatagagtgcaagttctgttggctggcctctccttgacttttacaaaaaaaaactcgtaactagttgtacctcgtgctcggctcattcgtccatgatgaatacactgctcaatcgtccttcggactagagctttagatgtatcccagtttccgttctcattggcgatgtagttcttcattcctgttctgggtagaaagtgagcttcgcgcggttgtcagcttgaatcctaggtcgatattagatcaccaacgaactcaccggggatcaatttgaagctcttcaggattgacaggtggtcgtagtcgaggatcgtactgcatttcaagaggatatgtatcaattatgattatacagtaccaagatcaaataggaatatacctgtcgggcgtcttctccctgaatcattagaaatagcagcagataagcagcaaattagtatatcttcaggcagacaacctgacaaagaaggtatacctcagcatagcctttagggtctacaaatgatgagggacatcctagatcagtttgtatctacccatttgtaggatgggacgagattagatactaactatcaatgtgttccacctgatacaaggtccgaaaaagaagatcgcgatgtcagacaaatgctttcggtatcgagatatacatctcatacaaagtggcgtcgtgatgatgatacgcacaggcagatagactcccagacgctctttggtaatctcgaactcctcggtcgcatatcccatggccatgaagcccaaagccatcaacaagttgataatcgtctgtacattcgtcttcttcaaggcagcaacatcgatggcctgactatagtcccgaagccctatataattccaatcaagaggttaggatcagacacacaaaaggaaagaaaaatcagataatcgaaggaacgggcagataaaggagggaagagtgatcttacagttcccgaagtaaacccttttgacatccagaccagtaaacttcgctgctcctcctagccctagaaatccacctcgaccagatttcttggctagatccaccagaacatcctcaatatcgccatgtctaaaggctttaccttccaggaaggcgaatctgtaaggatgttaaataagagattaagatcacagattggctgtcttacgcgagcgcttgtgcacaattgatgaacgaaaagaagattgggacgtacgagggaatatttcctgctccaaatgctctagcgctatttccaaagcaaagaagacctagaatggctaggatgattatgtacgttgctctcgacatcagagatatatcgtgattacctcgggatagtgtggtggtgaagtggtagtgatggtggcagtgatgatgtcgacgaagaagaacgatactttatgtacgaaggaacgccaagtgatggctgtgcgttcaaagctgactgtaaccatatccctgacacaaaccatgtaacaatctaatctaatctctttctctgtttctttgtatgtccatgtctgtgtctgtaaactaaaaagccatcactggtgatacgcctcaagacagcgtctcgagtactcgtcgttctctccaatttctctgcttggtcttagattcaatggagcaaggatataaacgcgtctggcaataaactcttcttagctcttcacctggaagagaacatggagacaaaaatactggtgtttgacagggcttccgccgctgttctgactgcttacgctgccactaaaattgaagctgccacatcgatgagagcagattagacccaagacctatgggggtttattagtctgaggtctaacgaggcccgagtctaacagagccatgcatcgaccaccatcagttgaggtcactctcaccatgctttttgcactaggtatcatatatgtaaaggatgattaggcagtcttgaaaaagagaggtagagagagtgcttggtatacagtgtgatgatgacgaaagcaggactagatccaaagcaaaagagagtacagatgtggagttttacatgaagaggatggccttaatcttaccattgtatccagagccatccatcatctggatcatcattcttccgctttttcaaggtcagagtagagatgtattccatggctcttccatatcgcgcctctatatctgataagttccattgaggccttgttgggattggagggcatgccttcgtgatacagatctcttcaggctcccttggtgtctctggatcagataaaaaaggtcgatccaaatggttaagaggaagagggagagctattgcccgccgtatctgatcatcgaccacgatacagtcgcccgtcgaagacaagcgtggctgaagttgtctaggacgagatattctgcaagggtgattcggacaagggggatcgattgcgcggttgtgatctctcaagaagatcagaggaatcgtgaggcgttcacatcttctgagagtagagattcttcgcgagccaggagtcgacaaatctgtatgcaagagaacagatcgtggaagctctttgatccttgacacaagatctgggttcgttcgttgatcggatattgtgacatgcgcataatgcgccctgatgggtcttcctgaacgggatagtcgacaggatgattgaggtacccttcgaagttgtctagcgaagcgatctattctgtcagactcatacaatatgttttcgagctcatctgaacgaatcaagagtaattttagtatgtgtagcgaagtactcaaagtcaatcttcatttgggacctgaacgaactggttggaggaatatgagtgactgtgattgatatggaacaaggatgggtgtgagcgagtgaagaggtagagtggcactgacccatgagaagtcgtcgttacaacgataactagatgagcagggcaaagaaagaggaagagagtgaggtgataatggtcgatggatttggttgatcatatctctatctatttgtctctgtctgtggactgtacagcattcactaaattgttcactatgaccgatggcaagttaaagcgaccaaaggggggttcctagcaaacaaggaggcataaatctcaacagctgagaagacacaaagaaagccaaggtgacgtagacactcgtcagtggtgctggtgtttgtcactactgattctactgttccgtcaaagagggcaaaccaggctcatgccccatgagatctggactgtttatggtctgagggcaccctagtccaaaaggaccatgtatcgaccaccatcggctgaggtaactctcaccatgctttttgcacaagctgccacactgacactgtagactgccatagtaacctcggtgtgatatcgtagctgcttgcttcggcttcttcgttcagatcagccagtctcgtcggtctctgcgctgttctcgactcgcatcccgagtctcaaccctggctcctactgttctttgctgcctggcgctgaaaagtctttgctggggtgcgcacatcagtgggggacaagcgtaccacgagctagcaccccgtcagtcgtaaggatatcatctattctacaatattccagcctacgaatttgtcttgtttattatagaagcgagaaagcattgccacgtctttggtaattccagtggcagagaggtgttctttgtggtttgatcgacatcgtataatcgataatatatacataaatcgtgtttagaagtgaatacttggacaactgtccatacatatatgaagcgaatcgtcacgttctcgtttacagacggtgcgctatgagagagatgcctagttgcttgtttaaaagagaacaaatgaatgatttgtgaaaggtatggaatagaaagtatggttgtttaagcccgctctcctcgcagccgtcgggcaagctgcaggtccttcggctggatcgtcacccgtttcgcatggatggcagccaggttggtgtcctcgaagagagagacaaggtaagcctcggaggcctcctgaagagccatgacggccgacgactggaatcggagatcagtcttgaaatcctgggcgatctctcggacgagccgctggaagggcagctttcggattaggagctcggtcgacttctggtatcgtcggatctctcgaagagcgaccgttccgggtctgtagaggagcaccgcagaggcatgtcagtctgaggttactctgagcagaagagcagaagagcaaaagaccaacctgtatctgtggggcttcttgacacctccggcagcgggagcagtctttcgggcagccttggtagcgagctgctttcggggagcctttcctccggtcgactttcgggcggtttgcttagttcgggccattgtgttctaaggttaataggtataggttggttggatagtagtgtgtggctgagtgcttggtgagtgcttggtgaaggtagctaaggtgatgacggtgagtagtaagaaggaacaaagtcagcatacacccccacacatgcccactctttatgtctcagctcggtcgaatccagttctcgtcccgatcggctgctcactcagacagacgcgtcgtgaggatggcgagcgagcaggaaggaggcgggaagcgagacggacacggacacggacacggacgcggaatataatgatccatacggaatataaaataatggtgtcgaatataattgacgcgtcctcgtgtttagcgtgagacgcgagtcgaccaggtgactacacgatcactacgcgacgactgtagtctggctctagcttgattaggaaagcgactaggaaagtgactaggaggctagctaggagagcagcaccagcccgtcgacgcgtccggccgacgcgtccagacactcagacgcacgtcgcgaccatagagaccacgtctccccgagtcgcgtcggcctgggtgcctgtctcatccgtcgcgctcgcctcacgcgtcagtcgaccacgcggccggctgggcgcgtcagccggacgaccgaccggatggtcttaaagccagccaattcttcgtcccttttcccattctcttctcttcccctcatccaagccttcatactcagccaagcaaccagccagccaacacccacccaccccactcaccaacaacaaacagccatgtccggacgaggaaaaggaggaaaggtacgtgtcttcacctgtgtctctgtcgatcggctgtctctgtctgtctgtattctctgatcctgacatgtatcctccattcgcccgttcttctgatctgccttctcgatctgctctaccctcacccacagggactcggaaagggaggagccaagcgacaccgaaagatccttcgagacaacatccagggtatcaccaagcctgccatccgacgacttgcgcgacgaggtggagtcaagcgaatctccggtctcatctacgaggagacccgaggtgtcctcaagctgttcctcgagagtgagtctccttgtcgatcctgcatcgatcttctgtctctgtcgcttgatccatctactgatcgctggcttatcgcacgtgttcttttctccccagatgtcatccgagactctgtcacctacaccgagcactcgaagcgaaagaccgtgacggctctcgatgtcgtgtatgctctcaagcgacagggtcgaacactctatggtttcggaaactagacaaaagtttcttgaaagaaaggattaaataggccacctggaagaactgttcagctggtcttgattcttgcttttactgccttgtctggtggtcctttctttgcttctcaaaccattcctcctcgctttataatgtcccgatagctttgttctactcaggagatcagtcgggcgtcttgacagtcacctgacattttgaacctgccattttatactttcgttttttgctcttttttgctaccatgcacatctccctctaaaagttgatgattatttatgtttacttctaccaagaaaacaccttgaaggaaaggaataagtcatgaaaataatgataaaaaattccataggaacataagagcgagacaagaagcacagaagaaacttaagattcagaagagtaaagagatgttacgggaagaaatgaatcagtctttggtatagagaacaagagaagatatccatacggagttacctatttctgagtggtcttgacaatgggaactgaaagatgaacgaaaccatggtaaattttagtaatcataatcttgagagggttatagaagatctggtggtttttgaatgaataaaaagagaaagaagactaaccgacaatgatgacactatataaactcgaaaagacatatctacgatcagcaaccgtctgtttgaaaaataatttctcaccagatgaagacagtgcgtacatcaagatgacaattccacagccaatactgatcaatcacagagatattatgaaacatgaaaagctatcaatcgactgaggactgctatacatgtcaaagaggaaagattgactcacatgatcttcatcttggtatccttccaccacctaatagaattggaaaattaggagaagtccattcagccatcatagtttacctctgctcttgaacaagagcagactcgtgagacgaacacaaaagaaggcgaacatacattgcttttcgcactttgttagctccccttcggaaaccctgggcggatacggctaagttgtcgctttttaaaagattaacgttttaaaaataagagccattcagaagttgaccaaacggatgttcagctatccactctttgctataagacgactcgcttttacccgggaagaataatgaagacagaagatcagaagcacgtgtctcatcactcacgtcttatcctgtaaagcatccaaccgttcacctcgctcggcaactcgttgaatattctctctcatcacatcctgggtctcatcgatttgtttctggatagccgccgtctgtcaatgatggtgttcaaacaaaatgatgtatggccagaacggtaaaagtctgattcagttgagtcttttaaaaaggtgttgcggaaacaaacaagttcttcgtggaagatgaaacgatacagaagacacaaaccttggcattcccctggtagccagtggcgccagaagggttggaagaagatccaccttgggggatgtaagggtcgtactatgattacaaccgcgtcccatgaaagaaacccaatttatgagaacaaacaaaagttccataggcaaaaacaacgcaactcatttgagcttgattaaagagggaaggggaaatgatgatgaaaagaggggaaagagtcgtacaggggcagacctgaaaatgagagaacaagaaaccaaggaaacagaaaggtaagcattccatgaaacagtctcttcttctgaccgaacaacccatcaatcccatccatatatgcagatatctgaaagaggagatcttccgggacaatagaacatcacaatggatatgtaccgattgtggaagtagagcactggtccaaacgaggagatctgtaatctcaaagtatccacctgttctacccgattttctctcaagccgatctacttgatattgctcttttcctaacaatacatgttctctttataggtcatatccgttctctagtcaacaggtggtgagtcgagacgtgcacttacatatttctggaagtatatcaaatataagaagacgaatgggacgagggtgaacgtagaacggaaagaagtccaggggtgagaggaagtaacacggcccgactaattgtgggctgtgcgtgcgtttggacattcttctccgcatagccgagccggatgacgcacacgaatacaaaactgctcttgcacacatatcattgactgcaagcttgtaccacaaagatgcacaaatcacatggaatagcaatcatcataaatgcagagatagcaaaagatagcaatgatttagttctctccgtcctctcctctctgagagaacaaagggagaaggtctagggtttgggtatgatgtttgattggaagaaacgaaagactgggatcagatggaaagagtgcatataggctagccaggtcaggccggtctatagaggggcgataggtgggaatggatcgattccttccaacttcaaaggtttgtcattcaaaggagggctcgtactttgaagtggaggataccttgatatggaaaccaagaaatgatttgagctccacaagatctataacaccagaattagaacacaaagagaaacgaaccggcaccacttgtcctcgatcattgtaaccttccaagttccctcagaagaagcgtacattgagtatgtgttctccaagatattggtgacagtctgtgttcacatgcgtttatcagtcagctgatcacacctataaacatcaaaagaatgaggaggcgcaagggaagggggggaggaggggggacatacatgctcttcgagcacctgtccagctcgaccaagcgaagcaggctcggaacgagtataagtaaatgagaacggagcttctccctcaaacgaaaacactatttctgcttgttcgcctgagaaaaggggagaggaaggatatactcagtataccaactctgctcaaacagacagaaaaggacaggagacagaggacaaaccttcttcgatgaacgtatcgcccgcactgatcctagcagatgggagtccatggatctccctcgatatatcgttcacctcaactttacatgggttcttctcatgcgcgattgagacgatggcgaaacgtccgggctgatcgcctaacagagaaaacttctgatgtttatgagtcaccgtctttggagttccattccagtcgtatctgtttcgtccgttttgatttgtccaagaagagtgtggcccggtagatcgtcaacgatttaggacaataagaaaggagagcaggacaaaagacctttcgggaactcacgttagcttccaaggtgaagacccttgaagcaagaagtccaacgtctgccctacacaaacatcctccgatctgcctatgggcacgaccgaagccgtctccgccacttcaaccttcaactttgccagctcaggatcgatcatatcctgctcgcaccctgatgaatccctaacagcatcgatggtgattatgtgtgctccgacacgatcgaacacgacgtcagggatgtccaaagtccattccctggaagggatattcttgattcgtctgatgatcggttgagccactttggcagattgaattgaaagatcaagctcaaacggcgcttttccataaaggatgactcggcctcgattcaaaggattcgcttgcgggctaagaacagcgttagaacaaagagaaattggactattcgactcaaaaaccgcgttgggtcgaccatagatcacttgttcaaccgtgagctcattagaacctggaggatggctgatgcctttgggcaaaggtacatagttggcgtccccaatcttgtggaatttatatatatatgttccgggggaaccggtctcaagatggagaatcgtggagggttgaatagcgccgagagtgcgtaggtgagaggtggatcgagtgtccttaccttcaggctggaacgctgtcgtgtaatcgatgtggaacggagcttgacctgagagaattaaagaagcaaccgttctcgtatcagcttgttctatgtccattcaaaaagtgaagacgctggaagagaacgaactagggacttaccttgcattttcaaagctatttgatcatcatcccctacgcaaactccctgacgtatgtatataccctttcgggtctcgaatcggccaagctctgaagtaagacttaacgttggtctagggatatgttcaactgtaaaaacgtcttctccaggatggataactccttcgcaatgttgacttcggacctgttccatagcagagaaagaaccacgcggtgccacatttcttgaatatagtcaggcacaagcggcgcaagaacataagagacaagtacagacagacctcgagaagtcggtaagtgccagcttcgttcactttgatctctgcattgatcgacttcaggtcaatagacaacggcttcggatggttcgaatttgcgtacttgacagtccatggctgtgtggcagaataggtcagaagaaagaacagcgaccgacttcagctagacctgaaagttatgaacttaacaagagagggacgtacaccttcaccaaagagcctaagagggatcttcacgtcggcaccagctggaacaaccttgcgtctatcacccgtctgggagtatatcttggctgacggctgtttgccacaaaaacttcaaaaatcagaaatcagatgaatagaaaagcgaaaggacaagaaaggacgaaccctccccctccggagctcaatctcaactcctttctcactcaaccgtctcgtgcacccatttccatcagtcacttcaccgagactaacagagaacggaccaacgtcggctaaccagtcctttggaatttgcagcttgacccgctcgagtgggccggtgaggttcgttaaggttcgggtgattactgatttgggcgaggcagtgagaacggtgagggtgaacggtgctttaccctggaaagagagttgattttatttttttgatttaaaaaacaagattgagagggcaaagcaagatgtatcaaaattcgaggttcacgatgaagatttgggaaggaagaggttcataccttgagctcgatatcgatatcaacatccccaccctggcactcatagacgactttcttctcgcctcttcctctaagtcttgcttgcgccagcggatgaacgaccatctccacgcttcccaactttctttctccagtcagagagatcccatcggtgtagattgaatcggcaagggatatccattcatagatgtacgtgccttcttcttctggttgaaatggtcgaatctcgtgtacggaatggaagacttcagtgaatgatttctgtcgagaatgggaggatgaaggagatctgaactctcgggtatatgagagtttgaaaggaggactccctcggaaggagaatgaagcctcaaatccctgttctccggcgctatgtttcagagaggaatcacgtatgaagaacatagatgatgtaaggaagaaagaacgtgtaggcacacaaatagaaagagaaagagagagaagctggaacagaccattcatccttcaatcgtttcacatctagtccgacttccggcactggaataatctctgctctacattcactcggttctcttacctctcctagacatcttcctccagtaacggactccaaaaaatacgttccttccgagccagtctctatctggaccaatgtctctttgctgttcatcttgatctcttttttccaacctgcggtagatcccgaggttgattctgaggcgctcgatccaagagtggaccggagcgggatgtatttcaacttggcgacgaacggatttccgtctgccggtccttgctgagcgatgagctggagaaccggtggtgaataacgacttggagcaaatcgtgaatctaacaacttcagcggtctcgaaggcgaacaggctgaagaaaaggaaattgagggtgatggtaagatatcaaaggtgagtttggtagctccctcgataggatggatggcgattggcttgatgtgtggagaggaaagagcagtgagggtgtaggttttggagccagtgtttgggaagctaacaggaaacggaactatgtaggatccaggaacggacgcagtagaagaggaggaagagggattctgttcaagaagcaaagcagccacctcgtcttcttcaccgataccttccaaccagccgtcctctttgttcccaacggagtctatgctgatccaaccaagcctcaatccagtatgaccggcagtactgattttgatatctaagaatcccttctcgccggcacacctaagcgtactaggaggaagggaggccgatgatgaagagtgtgcgctcagggagactgaagacggagtgagaggaggcaaaaatgtaaccttgggacaggcccagatctgaatcttctctgaatcggatcgagacagccggaaaggagtgcccgtctgagaccacacccgtgatagtctcaaagtggctggctgatcgattggaaggagaagggtgagcaactttgcgttagcactggctttcgagttggtagagacagccgtctcaggccgttgaacattcgccttcttatcggcaaccgctacagttttctctgcagatatcctctcgtcgtttacgtcgagtgtatctatctcgtcctcgtcttcctcatcacccatgtcctcaattgaactgtccagggcgtctattccggtcaggtggcgccgatgacgttttgttggcttgagctcctcaagcatggaggctgtggcattaaatatcaaggtctcgcccgtggagggtagggtgagcgtgtactcgatgatttcaggtcgagtggtgttgaaggtgataggtatattgattatcgggtttcgagcggacaagcaaggcagaggatgggacaatggaatctgaggcagtcgcgccgtgctaagattgatatgaagagttgagaagaacgatgtctgaataaagatgctaggaagagtgaaagttactaaagagatgggcatacgagtaaggggtcacatgaagggtgtactgtccaagaagatgttttccaggctggacaacatctctgacgcgtgctcttgtagacgagatcgtgggatagtaagtcaatgcggccgtcagactggaaggtacaagtgaagaaaatggaatctgaaaaggagtgaatcgacaaacagaaacattgtaagcaaagattgtgacaacgattcagagagataagaaagaaacagccttacggatctccaaccacctagtagcaaccagtcgaagaggagcaggagggctataatggcccacctcgtccgtttgtcatacatcaatctggggatccgcaggagtggaacggcgtacacgaagattgtctgagcaagcagcagaggagctattgtaccatgtgacgacgatgatgatgtagaggtggaggaaggcaattgtgcgatcacatagagcttgtaggcttggaggagggtgaaggcagagagggcgtagagcctttgttcggtctggtgaaagtatcttgtggggatgactggtgaaaggggagatgacgatcctggtggctggaccgacatgacttctgaagagatacgctcggatcttattattcgctcttgtcgtgtccagcagacttgccttgttatatggatggagagcagagcggacgaagtgaccagaatgagaatatgaaggtgaagagaaaaagtcggcgaaaatcgtcatcgatcggaagcattagggagattttggaaagcattagatgaattctgtaatcaaccattgagaaaagaagacgagcgctccagatgattacttcttctctcaatgtcacttattgtagccttaccacgaagttaaccagtcaacacggagtacagaaagttgttcgtacgtcagacgcaagatgttctcacacaagcatcagctgaatctgtcgtcgatagcttcaacgaactcaattagtattgtcagacccatactgatctggtttaacctcgaaccgcttgctcctctgattgtcgactaaaaagagtaattaaggtggatctgtctgttcgcttcgttccttcattcgtctttctatccagttgtgcatctgccaaaccaacacgaaccatttgacttccgatcgaatttgatcctctagtctgctgtttaggaagtatgttgccgaggtttgggtgactaaccatcaacaattaaccctaactgctttgagaataatttcaagtctgcacaccttcagctttactcaaccaggtcccagccaaaatcttaacttccacacgagctcttgccctgataatcatggtcagtgtatactctaacttgctagtatacgaagacgagaagtgtac

SEQ ID NO: 873 - DNA, 2945 bp, Xanthophyllomyces dendrorhous
cctactgactgaaaaatattttctttgtttattttgaaaaaaaaataaaaattgatagaaaatcaacgttatcaatcgttcactagatacccaccttcctactacagctggtgcgtccgctcccgttcaccgaaacctcgaccccgccctccatccgttttcaaagcaaagagagtacaccagagccgtcaatgcggccaagattgaccggtaggtctcttgtttccacattattctttgcttccgtttatatatctgtactggccggctaaaccttcctttgataacaattcggctgctttccgttttcccgcctccaccccttactagtatgttcgccaaaccattcgttgcagcgttggagggtcataccgacggagtttatacccttggtagagatcctcgacgaacggatgttgttgctggtggaggtggcgacggtggtgagtggctaaacaatctcaatgtacgcgtcgttaatgagaaacttacgtccatcttcgtcctggtcattcgctcttacttaaccttaccacagaaatcatccttcattcactttctggaagaaaaccaattgtgaggattccggacgcacaccgaggtcaagtcactgggctgtgtttctccgcgtgagtttttcgtgtcatggggggtcatgtctcacttcatccctttccactcatacttccttccctttcggatgatctttttacagcgataacaacgtagccgaacgacgtctgatctcttgtggtcgagaccaaacaatcaaaatctggtcttccccttcactcactcagactggaatctctgaggaacagcctgccgcgtcttcgtcgatcggccgacccccatcaccaacaccggggattaccaccgacgactttgatccaaactttctctcttcagttaaccttccccctccccctcctcctctcttcacttattcttccaaatatgccttccaatctatctcccaccatagatctgacccggtatttgctacggcctctaattgcgttcagatctgggacgaaacaaagagttccccgttgagcacgttaaagttcggagcaactatggagagcgtgttgggtgtcagattcaaccagagtgagcgaagtgtcttggctagtgtaggaagtgagagaaccatgtgtttgtatgatatcaggacgggtaaggccgagaggcaagttagaatgacggttagttctacaatgctttcctttgtgtaattaagtctgatttgcgcgttactcaaaacgatccctcactttttctaccttttctgttccattgcttcaagatgaaatcaaactcgctctcgtggtgtccaacactgcccactgtccttctcctcgcttcagaggatcataatttgtataccttcgatatcagaaatttagcctccccaacccaaatctacaaggatcatgtggctgcagtgatgagttgcgactggagttagttcctttatcttcttcttcttatactccattatttcttcttttcccttcttgaatactgatttttgaatgctgttacccacacgcaggtcctaccggtgaagagtttgtctctggaggttgggatagaagcgtcagaatttgggatcgaacggagggaaagagcaaggacgtctatcacaccaaacgaatgcaacggttagaattttctcttcatctcttctgctcttttctttccctctcttcctcaccgcaaacgacatactaaaagacaaattgtacgatccggaaacagtgtgatggatgtagcatacacccctacttcgacattcgtcatgtccgcttctgacgacggaaatatcagactatggaagtcgaaggcatccgcttcactaggagtggtcgactcgagagaacgagctagtagagagtatagagcaaagttggtcgacaagtggggcaagacggatgctgtcagaagaatcgaaaagtatgtgctctcatgatattccgtccgtctcttctctctcacatactggcatgaactgacgcttttcttctcaaccatgctctcatgaacagacgacgacatataccttcctccatccacaacgctaccaagctcaaacgggagatgatagatgccaggaaagcaaaggaggagaacaggaggagacatacgaaggctgggttgacaaaacccaaggccgagaagaaaaaggtctatttttctgtttcccctccttcgtcccttcaacaagaacttgaaaactgatactctcatttcgtttggttatgtttctgcaattgacatgttcaccggatgggtagatgatgatgggcgtggacgaatgattgaaatgtctctctttttgctctctcgatacagaccttgtttgttgcttttgaaaagtctcattataaacaaaatctgaagcacgaatacatatcaaagccctttttcctatttgatcctcatttgattccaagaattgagccaagaaggtcatgaacgagcgtatggcttcccgctatgtttggctcccgctttggtttccgttttgatcttacctaattctgagcccgacttggatccaaactttaattggctcgaactgacaacgcttggttttcttcgaagatatggtgtggagaagcaggcgtcacattgaatagtgaacgctttcaaaatatcttcgaataagcagtcgtcaagctgttgattcagtacgttcgttcgttcatccgtaaccgtagatttcacagtatgcgacattagttgattgaaacgagcaagatagaaaagtgaagggtgaggagacgaactgaaccgaaagtaggatgtttgctaagtttgagttcccttactcgaggactcgtaatgccaaacgcatatttagccaaaaacctgaagttccaaaaaccggacgcaataacctgtatcagagactacatatatatatatatatatatatg

SEQ ID NO: 874 - DNA, 41697 bp, Xanthophyllomyces dendrorhous
atatatatatatatgaatgagggcgtcacctagggtcgtcccttacagggttatggtccaacacagctaaagttcagagaggcgaccacgacggaagaagagaaggtaagccttgttctaaacaacactagagaagcatgatggcttcattgaatcttacctttaatctttgcagccgaggggggagcaatatttgtggaaaataatggtcttggaaagttggttgcccggccggttgtacagggtgtacagttcccgcatgggccaatggcgtcaccaaactttgcgaagtaatttcacgagttgagtcggacataagatgatctatgaaacttgcaaattggacgtacatgtttagataagaactgagggatgcctagacggaaagataaagatgatcattacagtacagataacgttagccgacctggttgtcgaatgataacatcacgttcttcaaatacataggaggggcttgacgcttacaagatttccctacagccatttctacgactttatgaattcttgctagatctttctcttctctccgaacagctagatcgtatatcttatcggcaagcatctcgatctcctcccgatctgacggcaacggcttcacaatcgcgaatcggttacacacctgagcgactttacaacggacccaaccactaagagaataggaaataacacattcagaccatccgactgtgggtcttatatatgcattcaagcagactacgatagacactgacttaatctcccatctgttaatcctcttctgaattaccgaacgtgatacatcgccctgccgggcagtcgagttgatatcaatctaaattatcctccaaacattgaacaaattcagatactccaattcaccggattatagattgatgtatgtaccaacgtactgtgtgccaaacttttcctactttccatctcttccgaatcaagattgcttcgtgtgatcgatcggctattacctccgcccagccttgactggaagttgcttgaatagcgtactcgagatagccgggggtcaatgatcggatgtatttatagtctagttcgagttgagcattcatgatccctaactgagtcggtcgaagatcgtgactatcataaccggggcagaaaaacataaagtctctcagcggtatcggtggaaataatggcagatattatatgccaaaactcactcggcactctgtcgatagcccgagatagagatgacgcctatgattttacgtgtctaggtgagtgagggccctgtatgagcagttgatgacagaagcaaccaggacatacctggatcacaggggttgtcacctaatgcgcacatttcggttagccagctgatagagggacattaatcgaatggagcgaatgagcgggcgtaggttcagtggttatgcagctgaacatgggtgttggcttacgaatgcacggatcgtcgagacggcgtatctcctcgagcaaatccttccatgacctacgcaggtgaagcacaagacaaccagttgtagcgtgtatacaaaaaaaaacaacaaccaagaaccatcgagtacgtactgccagatcgggattgtggaggaactgttaactcgagagagacacgaaaggttgcgattagcaaggagctctatcaagagaatcagactggaagacatagagaaatgatggtcgtactagataacaatctgatggaaagccatctcgaccggctctacccacttcctggctatgaacaaagaggaaataagtcccttacgcttcctcttcaacctgttttcttgatgcaatggaacgatacctgtatgactcgagcgctaccacgccaatgagacatgtatttgatacaacatttaaagtcaagtcgagtcaatttgaacaaaggaaaaatagaaaacacgtagtccttacattgacagaaattaaagtgagctacgattcggatattcgacttgtcgacgcccattccgaactaatacaaggcccagtaagaaaagagaagaagagggaagaagtctcaatttgttagttattacatcagattctaagacatatatactaccgtctggcttttcatcagaacacgataggacgggtgctttattgtggaaaaccatactaacggcgatggtagccacaacaatcagatctctaccttgcatgaacaattcttgttcggctttcttctgatcgaccgtcaagccaccatgataacatcttgcgcccggaatgccggcagagtttaagagatctgcaacctcttggcaattacgttgtagggaaacatatatgatggcagggctagtgtttggacgttacattgatctttagcatatgtctttggtcatatggaaagataataatgatgacactcacccggtacgtgatcgcaaaatgggtactatctgagcgatcttatcatctagggaattggcttgcaagaccttcagattcagattcggtctgaaagcaggttgtagagaattactgagtttgacattcgagttgagaacaggagttccacaaaaagtccataccggaagacagcagtctagcaagagacgtgtattgaggttaaatcaacacttatcagaaaaatgatgagccagaaagagattattcgaagtacctactttaaagactccagaattataatcaatatcaaattcttcacaaatatcctttgcaacctaaccaacagatcaagacaagtaagaactgatgtgttctcacacaaaacttgactccactactaggacaagctctttacaaacctctggtgtagcggtagctgtcaggcataaaacaatatcggctttaatttctttaacaaatcgcgccactttgaggtattcgggtcgaaaagactagagaatgagggaacggttattaagtaagtctgtcagtatcattttgtcagaaggatggagtgtcgtccacagcaaaatatggggacaaacagctccccactcggacacgcaatgcgattcatctacggccacgcagctttgttgtccaaaatccaaggttgggaggtcgatgagccaggagatttcttgagcgtgtaacctcactgttactcagccaatgggtgcctacctgacatgcacatccgctatcagctcatggaatccttcattgctgagccgttctggtgcaacataaagaatcttgagagatccgttacgaatggaatccttaacctggttggattcctcccatgtaagcgtagaatctagttgcgccgcagcgacacctttctgacgtagtgtatcaacttgatcctcttgaagaggagagaaagtggtgtattcaggaacaaaggctgaagatattgacatgcatctcgaacgtgctcactcattaaactgatcaacgggctgacaacgatagtaaggccgggcatacagagtgcgggtacttgactgtgttcattgattcatagaaaacactcgtccagtgcaaataacccatcagcagaccgagctaatagacttttttgtctgtttagttgactgacgaggaactaacaaacataaagacttccctcctcctgtaggaaacaagaccaaagcgctcttcttttggactaaaagctgctcgacgacctgtaattgaagcagccggaactcggaatactagagaaccatttaaacccagcggcgagagtcagctttctgaacttcatgccactaagaatgggattggaatgaacatacaccaaagacattatgcaagactttctcagcctggattatcgaagaatgttttgtcatcagatgatcgatagcggcttcgttgtgtcaagccatgcatgagttagatactctgttaagtcgaatgaaagcttacagagagacattgagagaaggcgcataccaaggtcattttcagagaattctagaacgtcaaactcgtcgtcggacatattctgttcaaaaagggagatactcgataaggaaaaggggttgaatgagaaagattaggggaacgggaaagctttaataaaagaattacacgaacgcgtctattacgcgtttgattgcaatgctcggcctacaacgtaattctgatcaatccaagtggccgttggatatgccctatcatcatctctagtcatcatggaaggagtaaaaataggagggaaataaaaattatctagtccatgcatgcattgtggtttttttaatctatttaaatcttaatctatctcagaactcaagatggacgctgcaaaaaatgttcaggagaggtgtttcaaaagagaaaaatgaacgaagtggggttcgaacccacgcatccgaagatagggctgtttaggatcgtgtggatcttaaaagcaccgccttagaccactcggccattcgtccacattgtacatactgaaaacatattttcctaataaggcaaaaacttagtcaagggttgttggagtttcagcagtcttgacataatttcatctgttatttgtaatctcttcttgagacatcatctgcccccctctatttgcgcgaagtcccaaggctttctttccgaagagctataaattttctagcgggtttcccttctgttatcctggtttcccaaaccatatacacaccacccaggtgtttcagtaaaatggattgagaaactagtgaggtttggattggaaacaaatgataaggcgaaaagttcattgcacccatgaagtccagtgaggttttaacagattcaataatagcttttccctctcattctccccatttttccaagctcatgcgcttcatcatcaagtatttcccaggtcatagtaaaactcatagttataacataagtgaaaagtcaaatatagagaaaagaaagagattgtaagttgtccttgctggacaacttacatgcacacccacaccaataatcgcaaacaaatcatccacaggccatatctaagtccgtcatgcctcagcttgaacgaaagcgtctaccggtgtgagaatgtcaaacacggccgttccattcacactgggtttacccatcacaatgtttgcactaggcgacttaagatcatcaaagtctccgtgcaatgtagcttcagacaagaacgccatagtcgtctcaaacgaagccttgagaagcggagaggactttgaggagataccagttcggttgaatggcttataacctccctcgtgagtctagtgcgttgcagaaggaaaaacgagttctgttagtgtcggttctagtcctaagggaataataagagaaattcaccatgtaatctgctataagtgacagatgtcggaagttgatggtgatcgcatagacgccgaatactcccgagacttctcggatgatacttgctcgagcggcctcgactccataagtgtgaagaatggcggcgatatcattcgatcgaatatagttcaaatctacgagctcatttgcatgctcccacatcgcttggaaattcgatccctcagtcaaaagcgttcgctacataaagagaaaagcggataagcttcggtctgatggaacaagggtagaagccagagggaacttacttttccgtgctcccaagcttcatcgtctccgcttcccgtacgtaacctgatggcccgagagatgtctggtacctgatgaataaccgcctttctgcaacatctctccatcacatcgacaataagaagcttctgagagtctccggggaactagaagaataagagcgccaagctgttagtgtgctacttctttatgactcaccaacagagaacaacaattagaaatcgataaggaagagtgaatagccttacagaaatctggaattcacacgatcggccttccttccggtcaaagctgaaggatgacacatatttggcaaccgtgatgaattgagtctgaatctcctcgtatcgggcggacatcgccgcgtggttctcggcggcggcagcagcggcagcttctccttcatcctcatctgcagggaaggcaccctcgatgtcgtctaaatcaggctcagacccggactcgtcgtcatcttcgtacgatgtcatctccttagacttcgaagccctcttaacatcgtcggcatctccgtccccgatatctgactcggcatcatctccagcgtcttcgcccttgtcctcgacggaggtatcgaggttttcatcaacagcccccttaggaattcgaacggcggagcccttaccaacaccttctaaatcgttcttcatcatcttgctcacatctttgagttctcgaagaatttcatttcgaacatgaggagcaaaggaggtaggtagagcctccagaatctggttcggagtcaaatcatgttcttctaggtattcctctttagggaacagatcaagaagcacggtgtactctctggatcgggagtatccgtttgattgagtcttgtttgtcagtcgttctgtgactgtgaccttctcgacaagttcggaaagagtgaccttcttggtgttcttgataaacatgttcaggtcgtcgtctcgaacagcgtcgtatatcggaagcttcatcgaaggcgtctttggttttgaggacgcggtcatgaccaactctcgtagacgaggaataccaagcgtaacgttggcggctccgtgaccagctaaatggaaagtgttcaatgtcatttgcgtcgacggttctcccacactatatatacacagatggcaatgatgttgataagcgatactatacaattcagagaacgataacagaatatcttcaggtaacacagaatagaaactcacccctgagcagcaagtaaaccgacagcttctcccggatcaatcatcgccttaatgtatcgaaggttcatcattcccttgaatttttgcttctgaatagcccaaggagactgcttgctcgcctccgctcccttcttggcctttgtgatgatcaggttgttcgggtttttctcgatgtactcatcaacagaagcagcatatttttctcctgtacttccgaagtacaacgacggggagtagatcgagagtgccgggtcgtactttctaggctttctagcggccttcttcatgtgggccactgcggtctcctcatccattcgaccattgagagcggcggcgtcatatcgctgaaggagggattcggagttggcgatgttgaaggcgaactgcttagggtcgagatgagcctgcttagtaacatcaagcgaatcctctccataatggaactggataacggacgagtcggaatctcgaacagtgtgatcgtagtgaactcgaataccttccaaatgtttgatcaaacatcgctgtaggtaaccggatcgacttgtcttgacggctgtatcgatcagaccctctcgaccggacatacaatggaagtagtactcctggggtcgaatgcccgtcaagaaccggttcgcaacataacctccggctcgggcggcggtctcaaaaggcttgaatgagggaagggtctttccagacaccatagtcggcactcgacgaccttctagagactgctgaccaagcacagatgaaatcatagtagcgttcgtagcagaacccttggctccagacaccgtcatcatttgcatgttgttgtgcgggaagggcttgaccaatcggtgagggttaagtgtagcattgactttggtagtggtttgaccaaatcgagcctgcatcacattatcgagaccagccataagtcggtcatcccgaagaatctcttccaatcgaatctgtaggttatgcttaacatccggatcctccggatcagcgtcttctccaagtccgacataagagatagcgaccttctttccgtcggcatcaatctgagaaagcagctccttccgctcgttttctccagcagcggtgagtaccaaatcgtccattcggcaggaaaatgcgtcatgctgaaggtatttagtgaatagtcgactaagaacactaagaaccttcccggcggtctcggcaccatagacttcaaaacaagaatgaacaagaccataggaagacgctccgaattgactcttgtcaaggataccaataaggagttctccatccatgaagagcacgtcattatccttcgagtgaggaccccaaagctcgttcttaaccttgttcttagactcaaggttcagacccttagcgttcagcggtttgatattcaagaggagagtagtaataagttgttttccggtccagagaggctggggcttccaaatcgtaggaggaacggtaacgatctttccagacgagcagtagtcctcctctgtcctgagagcaccatatagcaactgatgatactgctctcgagtgaagaaacttcccttggagcacatccatgtacccgcaacgacatgatcctgaatcaaacctcgaagaggctgaccagatgtgggcaccaagtactggttgtcggtgttggcgatgttataggcctcagctcgggcagtttgagattctaaagacggcggtgtaatatacgcgcattgttagttaaatcatcgtgtccgtcttcgcaaacaaatgaaactcacgagcaaaatggatgttcatctcatctccatcgaaatcggcgttgtatgagttactgcaaagaaggggagacaagacaatgaatgctcagttagatagccgtacgtctgacccacatctgagacgacaacatagtgactgaccaattggcgtagtgcattcggatagtcttttctcccaacaatactctggccttatgagccatcattgaaggcttgtggagtgtaggctgtcggttgagcaataatatatctccatctcgaaggtgtctgaaaacctttttgttgataacttgagttcgagtggacagtccaccttgagcgagtgagtaggaaccttcttgaggggtaagcagctgattagccaaagcagttcgctgctcgagggtcattcgatcctacgaaggtcaaaaatgagaagaaattgagcttccaggttattataagagaaacgcaagaaggaacagaaagtagagaaacgaacaagtgcaattcgagttccatcttcgtttacaatcatggaagcaccaggatacgtcgatggtccgttgatgacggcctgtctcatttggttaatgttgtgaatggtcacaggctcagggaaggtaagcttgatggcaaagacaggaggaacaccaatttcattggtctcaaggttgatatcaggagaaatgaccgatcgagcagcgtagttgactcgtttaccctacagatagataatggctcacggtaagctgacaggacagaacgataatctcgattgactgaacacactcaccatcatgtgctttcggaacagaccctccttcttttctaagacctgcttgacaccgttaggcgggggacctcctccacggatgattgtcgggttcttactgctatcgatgaaactgtttacgtcaatctgtagttggactaaagcgcctaacaacaaaccatacactcgggttctctcctctaaatccatcaataaccccacggtctcccctgccttaggcttcgatgtaccggccgtgagctgggcagtcaaatctcttatgcgataagaagtttggagaatcttattgagatagtcgttttgagagttttcaaaggtaaggtcgcccattttggaggcaggacggaaccgagtcggaggtactgggactagcgacatgaagaacatatcagccgacgccggagggagcgccttgtaagccgggatgagcttggctgagggagctgtcgaagtgaccgtcttcttggtgaacggaccatggcctccatagatgagggaagtaatgagaggctcattcttgaacagcattcgaaggtgggccctagcctcctcactagacatcaccctctccttcctcttcttggacccggcctccttagctctttccaactgagcctcctcatcttccatctcaatatcttcgttggcttcctcagcttccgattctgaatcagatccagcaccctttccggtggagggaccaacctggtagccagcgtcatcatgaatgatggccccagatttcctattggcaatatagcgttcgatttgaagaacattgggtcgaacctttccggtagcggcgtgaatagcgtcgttcttagcaccaagctcgtactcgatgatcttggtggatccttcctttcgataggtgtgagcgaaactagaagaatagagcgcatcctcacaatcccagtcagaaaaagatctactaatttgtagcaaccagaatacaaagaaaagtagacgacttacgctttacaactgtggcacttcttataacctctcttagagaattcagaaatgagcttcttcctttcgttatagacaagatcgtccttgtaggcgtcccgcttgtttccactggaaggagccttgacagtcgccaaactggctcgaacaaactcctctactcgcttaatgaacatgggctcggtctcagagacctttccttgttcaccatcttccgactcggaatcatcggcagtcgacttgcccttctcattcggagcgacaacgacagcgtgcatgtttcctagttggattgcctcggagagaagaccatgatcaagtaaagtcaaccggccgacaaatctagaaatctggagaaagtttgagcagaagaagcaagatgtaagtctaatacactgcttgataagaaggatctatcttggtcaaagatctgacctctgcagccggattcctcagcttgtggcagaacatgcacgtctgtcgaatgaggttgtagcactgtgtaaaaaagagagggtggtaaactggagtggagagagtgatgtgaccaaaatgaccaggacagtcaaaggaagttagtcggcaagtagagcagctggtgccaatgtgtccaagcaagaccaacgtagtgatgataaaagaagtgaagagagcgttagagagccagtttcctatgacgcgaagaaagatttgtgttgggacgaagaagagagatgaaagagaacctacacgtctcccttctccataggaccaagagcaggatcgtagaggcctccaatagtcggccttgacaggttatcaaacagaatcgggttgacaatctgtttgacggaaatcctctggatatcctccgtcgagaggaaggagaacgagatcgactggggcgtcgagggaagggatcgagagatatccatttttggctttccttttctttttttagagtagagaagtcctccagcctttgaagaactggatcaagggacccttttttgtgatgtagagagaaaaagaggagaaggggataaagagagcaagggtcgagtgaaagagaaggagaaggcgaagaaattgggaggaggaaagattgaaaaaaattctggaactgacgcgaacctgacacgacttctactattgtgagtccttgcttattctcttcaactatgttgtagaaagcccctctcttctttcagacgttgtacatcatatagactacacaaggtgacagcataggagaccgagtagaaattgagattagtaagaagaacaataaagagtgaaatcaatggatgacaatccgagagaggttaaaaagcgagaagggaaaggtgtgattattaagaatacagagttgcctatctggacgagtccagaagggatacaagataacgacagagcgatggccagaccaaaagagaagagaagacaacaaagcacacggacaaaatctcacaaaaatatgaagatacatgagagaatcatcaagaaaaatgaagaaaagatcatgagatgacaagcagagaacataatccgtaggagcttagcctgttagatccgctcttattctcgtttcgtcacaggtcgccctcggtagttcgtcataacttcccacccattgtatcgagaacatttctgttatctgcataggctgctaggagtccggttatatcgatcggtggttcttgccccggaccaaattctccctgtagggggtgcgacatgaatatgtttgccgttcctggtattgagttgactaattgaggcgactgtattgtctgttgggtttcattgttcgtcgtcgatggtgaagcatccatctctgatatgctgctgtttccaaattgaggaaatatcgcgctatttgttgggaatgatggattgtttccgtgcgaggtagattgaataggatttgaaggaatcatgttggcaggtaacgtcattgaccgcttcaacggcgagaccgacgtgcttgacctagagctccctccgtttgatgaaggaagacttgcatacgaagcctgatgaatttgacccagtcgattagcagctgcagaatacggatgatgttgctgttgttgtagctgctgttgaagttgttgttgtaactgcatctgccgaagttgagatttcagtgagctcggtctaactgccgagtgtgattctgaagcccttcgtcttttgtctgaaggttgttccgctccttccgtgctttcgattatggctatattctgacgaggcgatgaaactgacgaaacgttagtcgaagctgctgtactttgagcaatagaatatccgggcgaggctgccgccgatgacacatttagattgacgttgacaggcgacgaatttgggtataagttcgtgctgagcactagatcattcaaagcctgttgctgttgtctcaactgttgttgagaaaatactccgccgttgaaggccgaggaaccagcatgattatgagagtagctcctgtacttaaatgctgactgtgggtttcctgaagtaggtcgtaaaccactcggactcgacgcccgggctgtccgttgagttcccaaaccgccaagattctgaagtccatacgagatgtcagtcgctggagattgagtcccagatcctgatcgccatggggacggcgctctagactttggaagcgttatctgggcaggattcaagttcgaaagcttgtgacttaggctaccagaggtaacagatgttgtgaccgagtcccgacggcgtttgaatgatccgtctgcaaatgatgtaagaaacacagataattcagtcatcatgattacttgctaaatggagaactattcgaaacttaccgtcggattcgaaggagtttgttcttgactccttcagcttcgtcggagaagttatagcttgttttgaaaagcctgaacccgtggatgatttttgctaaatacacaagaattgacgcaaaccgaacaacacgtaattgagaagcctttcctttacagaatattaaagaggagttagtcaagaccaaacgaacctctgctcctctccccaccctagcaatactcgcttggtttctgagagcctgttgaagctgctgctgttgttctgctgcgttcagtcctattccctggacttgacctcgactgattgatgccgagaatgtctcttgtaatctagatgaacttggtaccctggacgcaaagtttacttgccccattgtgctggtcgctggactcgaactcggattatactcaggactcgagacagacgaggtagaggatggggtagtgaccaggttggtgtttggtattggaatcggagctgggtttgtgttcatattcgagtttgagttgtttaaggattgatggttggaaagccgtcgatccgaggaactgctcggtagaccggcgatgggtcgagttggtattgaatttagattaggcaacaggtcagggggagcagacggcgaaggagaggggaaaacgggttgattggtggcttgcacgttgccctttggaaatacattgtttcctcctcctcctaaatcgttcaagttgaacccggtgttgtccgtcttgattataacttcatcacttgattccgtagaggcaacaaacccatcgatttccctcatcaggttctcaaacgagacatctgatagcggaatagaaggatcaagtgctgacgtagattgttgagagaatgagaatggttgcgaagacggaaacacttgctgctgctgctgcggttgttgattttgttggttcaaacccatcttttgttgttgctgttgctgattcaactgcaattgctgcagaagctgaagcttcttctgtgcatgctgggaagacattccagagaaatcgaaagacgacgcggttgacgacggtaaaggatgcgtatcaaatggcgcgtatgactgcccactgagtatcgacggtgacggcgcgaatgaaagaatgtcgtctaagctgatcgggattgcctggcctgtcatggatggatctgtcaaattgagttgctgcagatgggatggaagatgggtctgttgagaagaatgttgagagacgttggatgagtcacgagacatatgcggagtaacgactgcgtgttgactggatgaatgagcgaaagggtgattcgaaggatacggtgggggttcattctcagtgggatcgggcagtcggttagtcacacctgctgttgacgacgaggaagatattcgtagatggctggaacctatagggatatgctgagagcccgatgggtacatatggctgctacctggactactatccgttgaatggtctgtcataacaacatctccatagggtgattgtgattgggaccgttggctcgatgagctctctcgacggtcttttggtcgcgcgttctttccgacgttttgcttaatactaactccctgggacggatcaagaccgacgcttcctagcatagatgtcatcttatgactgttccgggacattcttcttgtgcgtgatcgctcagctgcacgagaagctaaacgctcgtctgatccctgtgaaagtagctccccgaaattgaagtaggttttcattagttggcacagactctcagatacataagaaagagttaggcccactcaccgatctcggcttatagtcaggcatcttgaggtcttccaagctgatgcctctttctcgatcaaacccatcagctacaactctggagaattttttgaactccttccgttgtttcgatgacgattcgtctaccacgagagaatgcagataccaaagtctccactgtgtttacgaagccccgagaagatgacgagaaacttctatgctgtaagtagacaggtcaagataggtataccacaatgaagatagcacggacagagaggttttcgagtcggcttccagggaaaggaaacgaagatatggaagcagagtggtatcgcaccaaacgaggtttgaagttgatcaatcgtctgaccggctttcgccccgggtaaccgaaaaagagtagtacttgactcactgtccttgttccaggtgctttgccagatggcgaacgtcaatatcggaatatgtctctagtcagatgataatacgacctgagatgaaccagagaattgaaggtctagaatccatacctgagacactttggtgcaaaccttccatacacgcataagattgtcctcctttatggacgatccaaggtgtggttcgaatttcagcacccatccgtcgaacatttgtgtgaatgaataagataaagaaggattaatttaaaaactcttggctaaatctcgaaaacaaatcttcaagtgtttacaataagaagagaaaaaaatccaggccgatatgagaaggggaaaacagaacagaaggagggtagggttttacctctgatatgtttgagaacggagagaacgtcttatttcctttgaacttgaggacgaaggggttcgctttggagcccatgacggtcgacgtggactttgcgggtgtacgactaagtctgatcagggattatataaaggaaaagagggctgtataacacagactagatcagttgatggaacggatggatcggtgttcaataaagagagctaatgtatgctgaacgacaaccgaacgacaacccaacgaatggcccggccgaaacgtcttcccggtcaattcatctgtgttcgtcgcactcccatctttcctatctctcactctctcatcaacatatttctaacaagaatgaaagaaccatatcataataactcggctatacaacaatcaacaaccatgcaagtcttcaagcggaaatatatgaataagagaaccgtttaactaccccgataggtagtgtagctgtgaggactcagaagaagagggatatgataatgctcgtccgggctaccatttagaatcacacacactcagaggacaacgttaacgatgataccgatgctggaatgagatcaacacaggtagacgactaactttgagtacttaaataaaatctatatcgatgtacacatctcatccagaacggaagtggacgccgtcagtcgctatacatatcagacgaacacgaaaccagattccgaggatcatcccatcacgcacctctactttaggatagaaacattggatattgttctctgagaaataagcttctgtctggaagaccatcttgtatgtacctacagccagcggagcaacccccgccggaaggagttgagatgctcgtccatcggcatctgtcgctctattcaagttgttctcgatcagaacgatatcaaaaattgagtatttcttggctattccggtgtgcaaaaatgaaaagtatccctacttaccccttggccaaagagataaattctccatcttgggtcaattgctcgagctcgaccgctacgaactttgctggtttgcccaaagttgagtcgaggactaaagaaaaaaggtataaattcttaacaattcagaaaacgtacagcatatgacagacataaacgtcaccatgagcagactcaccatggcaagttataggtgatttgtgagacattctgagtgatcgtgatgcacaagaaagtatacgaggtagaacaaaaggttgattgatattcctcccgggtagtaacgtcagatatctgccagctcttcaaccttaccatccttttaattcgcttaagcgtccatcgtcgatcgtccatcatatatcttattgtcctggtcgtaacagggccgtgatgacatcagctagagctcatgctcctctcagttcttcatccttccggtcatcgttatttgctgatcctcaacagaccgcccggcaggaagcctttcgttctgttcgtttggctcttcttgtttatagtgatcgagtcatacaggctaatctcgctctatacatctacattcatagcttaaacctggatgcacgttactcctcacatgctcgcttctcaccccagaaaacatcccttctgcgatcaaaagcctttctcagattcatcatatccttttcacacttccctctccagccgagaccttaactccttcgcttacgtcttatgtgttctttccaattacgcaactcctccaacgtaatcctccgagaagcgtgccaccgcccatcagaataggtgttctgcgtgtgctcactgtattggtcagatactggtctggggagggacgggcggctgtccgggaacagatttggaagatggctgttagctggtggaaggttggtggattagatacagaggagggtatagacgcttggatacaaggtctcagagagttcgcactcggaagctcttccggagaaacggagctcgattttgagagagaagaagctcagctggcgtcgcaactagagttggaaggtttggtagcacgagaagcgttcctacctgtgctgggagagacgctacatatcatgatacgtatgtgttttgtgcccattgtgtctcgttcttaattcttgtacttatacgatttccttacatgacaaaatcaatggaaaaccatcaaaggcatcatatccacgacgcccattcctttacgaatacttcagacttttcatgctattcttcgaacgtatcttcctaaccgctcccgaataaaagctacaatccttccgggttgcgtttccacgttgaccaaacttctttctccgctgtcatctcgacagagtggcaagggcgtcaacggagatatcgtggttgagtcgctagggataataacccacctcgtcacaggctgcttcagtttggctatcgtcgggcctatcattggtcacggagcgcaaacactcaatgatttctcccatcgcagggtatggcttaccgaggaagagcttgcttcgacgtcaggttcagaagagccccttccaacttctaccccatccccgccatcaccagcctcttctgatgcatcattcaaaactacaacatctgaacaaaccggcacatcctttacatctacccaatccgttgctgcttcgcctctggtcacaatcacttcttcctggctccgaggcaatgcatcccaacttcttccagctttcatctcactttcacatctcaaaaaacattcgaatccaaatgctcgaaatgcactagccgacctttcttctactctgctccttacttgcctcgacccgttagaagaaagcgtgcatgtcctcctcggctacctactgacgctctctgtagatacattccccgctgtaaatcggtcttcccgtcaagctctgatcagtctgcttgatattccaggaaaccggccaaagctaattcctatcctcaatcaagcacttacgacatcgctacaaacaattccgcttctgcttcaatctcctcaacaggtatcctctgtgaaagtgactgaacattgtcaacagatcactgctgtcgctcagcttggtccaacatctgagagtcttctccaaggtatgctgggtccaataggaggcgtggaaagatggggaactggcttactcgactgcatggtgtttgagccggacgttgtcatgggttcttcataccaaaggcctgtcaatcggattgccgagcttgcatggacagcaacgaagagttcaacagtcgatccatcattggatggtaaactagacgacgtgccatacccccgaatctgcttgagtaatttggcaaatgctgaaacggaggatgcattcgcaggtatgctggtatcgttggggagagcagcaggagaagaagctatttttgccgtagaacacttcatcgctgttgccaaagcaggtgcctcggacgggacagtgataggtttacggagaagtgtggcaggtgtgtgggtggctgagagattgcttagagggattgtttcttcattgaataattccgatgatcccatcaaaggcatagagaagacgaagactggggtggataagggtaggcggacaagaaagacgatcaggagattagtcaagaccttgatgcggatggacgcggatcaacaggatgaagacccaacagcagataatccgaccaattcatctggtggaacagaggaaaaaaacttgcgcgcggatcgaaatttaacggacatggtattgaaacctgaatacataagaggattgaacccgttgactactctgctcgatcaaccatcacacaattcatcaacaaatcctgggtctggctcacgtacatcagctgccgatcgattgatttcacagtcgattctctcctgtcactcgctttctctccttgcattctctgctcagacgttaaccacgtcatttcggccactcctcctggacacaacgtactacctccttgcccaccttggctcaccttctgttcttgttcaacaatatgcaagtattgccctcgatcgaatagcatacgaatcaggatacgcctccgctcgtaatcttgtatttgacaacgtggactatgtcatcaatgtcgtctcccagagattgacgagtaccaagttggacgcgcttgccccgcttgttctgatcgaaatgattcgattggtaggagaaccaattgtgccgatggttcatgatgtagttgatgagatatttgacgcgttggacgcctttcacggatatgaacttgtagcttcgacgttactggcggtactggatacattaatcaaggtcatgcctgatgggaggagggatgatgcacggagtcgaacaatgggaccaggagaccaaggagcaacggttggtgagaaaatgtacccagatcggcctcaacccgaaaaagatctccattcattcaggtcttggcttgctcagcgacatgatcaagcacgatcaaatctagaagagctcttggaggagactattgaaccaactcctcatcaatcatggggcagggataagtcactcccttctgtagaagcagacgaagcgtcgaccagcctacctccgacggatggaccactcgatgttgaacctgacagatcccaatcaatttgtgctcagatcatttcccaggcgcttcctttcttgactcatgcgtccccttttctgagatcgcgagtgctttctctcttcgcatcggccatcggtgtcttggctcctgcagggctggaagctcaacttctaccagtcgtcaatcgggcctggccttatattctcaataggacgaaagacaaagagtactatgtcgtcgttgaggcagtcggcgtgatcgaatgtttatctaagttggtgggtgagtatgtaggggtaaaaatccgagacgaaggatggcctgtattgaaacagttagcggcagatcttttgaaggatcaacgaaaggacagcctcatcactagaagagggaataccgctactgccatcaacactggaagacagccgcagagcaagcatactccaactcataggctgctccgatcgcttctttcaactttcagacatgtcgccgtgtcggtcccgctgacatttaagcaaagatgggacatgctcctattagtcagggcttttctggacgaccgaactcatgaagaactccgaacagaggccaatcttgtctatttgactttgggatgggctgatgaagatgcggtttgggcagggctaagagggtctctcaattgggcggagaatgacaaaagctcaaagacagaacgaatgggatggctggtggaggacgattcagatctgaaggaaggaatctctaaaatcttacaaaaactagaagaagcgtattagatgacatatgtgaaactgtttccccatgagcgagagccagttaaagccaacagaccagactttattgaggggaagtcagtttatgtcttaatgactgagttgagttagcttcggcctcaaagtacactgtgagctaacatttaagcaatcgtctatcacgaagcctctcggtccatctacgattacaagaacactcttctcatcattacaatctgagtacattgaaattctatactcatctcccttcccatctatatcaatcttcactcttaggctgaaacttttcatgaaacctgacctgccatgggctaggcagaccagacttgaaagtctgttttgactgtctcaacaccgtcaataccggatctcccttctcaagcgccgatcgatcgagagattttttgatagtcactgcctctgggtgagggagagaaactcgggcaacaccattcgaaagaatgtaggctgctttctcctttctgtaaaggacgtccctcatatgcttccggtgaaccgcaaccaaatcgcctatcaattgaaagaccaattcgaaagacaagtgatattttgatcaaaagagaaagagccagaaacgtattgacagagtatggtaatcagtcgggatctctgaagtaataagtctgctagcaggaacagaaatgatataaaaaggtatggaggaaaaaaatccaataaatcaagacatacctttctttcctagcctaatatcatcttccagcaacttgatcggaatgctgttctttgtctctagcttggtagggttggccaccacaatttttcgacacacatttcgtcgctatacgatagaacaaggaaaaaagaacgagagagaattccaatgacatgatcaaattgagatcaaccgataccatagaaacgttactcaatcatcatcatcagtcaattaattcctttctgttgaagacactggatgtgttctcacataccaatgcacgtaagcttaagggcttgattgaagtagctgttcgtaatagggtgaacatgatgatgggtgaacaaatatacggttcgaccatgatcatcaacgtaaagtcgacagtagcggataatgttctctcagacgacttgccacattctgggctgtgtcttccttgatttctacacttttcaactttttggaatctgaggtttgttgtatctatgatgcatcaaatgattgaggtaaaatattctaagaagacgccgagcgagccgtaaagagtaccttaaacaatgcatcagaacatccaaagggcggaaacaatatctctagtgatcgtctcctgttcctgctcctcctctccgtcatcaacctcttgagcacttcgctttttggctcccttgtctctaattgagcttgaaggaaacacaactccaggcgccggaagggctaaagctggatcgtttcgtatctttcgcttcgcttcagtatcaaacatctgttgaatttaatgacttgaggtcaggcttcgtagtcatgacaaaagtagattgatatctatatgtagaaaaaacataagtacgaacggtaacgtaggtgtgatccaaaaagtcctccatgccatatttcggctttgtgaagacctcggtgaagatctttgccagactggagaccgaagacacataatgagtcctcaaggaagcgatctcccagagggatgaatcgagcgctcgggtgagcaacgggtccgttgttaaggcgtcgtaagggtctatctcagtcaaccagcgatcaggtttagaaacaggcggatcacgtcaaatcaggtaagtcaagcaagagagaagtaagatttgttacaaacctttagtaccgtcctgagccaaactctccaacgttatctctccctcagttccgccaaagccatctcgatgaatcaacagcatgcatcccggatgcattttgagcaggttgtacacaaacgggataacaattaccacagctgccggaggtgccgtcaaggcgagtcgcgcgagtcgcttgatgaacgacgcgatgagggaagaaggaagaagtctgtttttcaggattttttccaaacagacaataagatttgttaagacaattcattgggtagctaaagggtagcaagggccatacgttgaggaaaggaaagtttccgtcagccggaaaaaccgggctcgatacttgatgtggaggaccgatcgatccaacatggaatacaatttggcgtagaagtcagggtattctctaacgataggtacagccaatatttgatgagtcaattgaccagaaagctcgaagaagagacagaaagagatcacgaacaagttatactgcgtcatgagaatgaacagtccattgagggccaatagtccaaggggtccacctggtcagcaaacaaaaaaaactaatcagtaccttgcagaatcggaaaaagaattggagctaggaaagacctttatcaacccattctccaagccagtcagccgtttggacaacccgacctcgagtcatgctaggtaagacttgatgatgtaggatgacaagaattcgtctcgcctgcgacgcgtccaatctgggagaagaaaagaaaagaaaaaccagaaatcagctcagactcaattctttgagctcaagttactaaattattgagattctctatcatcttaccgcaacgaaaacagtcctagccaaacggcagtgaaggcagatttcgcacttgctaaactccagattccctcatggatggtcatatccctcgtcttccctcccgccacttccttcttcactccctttttggccgagactttctttccatctttattgattaccttggtcgatcgaatctgaacctcagcatcgtcatcctcctgatcagaatcgaagtatgccctccagtcatcttcctcatccgttgacttgggcgcttttggtcctgaggagagggtaaaaggagaagaggcgaaaccgggcatgagcactggaagcctctctagcgccttctgagtggtcgggaaagggggaagagactccaacaagttcagcaggttcagcgacagacatgcagtagctggtcgagacgtaggtggcaagaatggacggatgaccacactaatttctttgagaatcgaccatcgaacgtcttttttctcctccatcaagctgactaccttctcgaggacatcgttttcaacggaaaggccctgcattccatccgaaacgccttcctgagaaatcgagtatagtgtagatgcacctcgagtggaaggtgtaggaagtagaaggaacttgacgagctgccgaatgtacgaagctgggtaaaaaggagtggatttgaggtttaaatcattgatgggtgcgaggagagggaggaaggagagcaggtgggtcaaagcagctgactatgaaggccacaaagggtaaaaaataagtttgatcaataaaattggggttgaaacgaagaaatcctgcacaagaatacttactcgcagctcagtctctacgtcctttaataatcctccaaggtactcgatgtaatcattgaatctagccttcacccactccattaccatcacctccctatcctcttgctcctggcccttagcttcgtcgtcgtcagagccagctccagctccaggtccgattcgctgtcggttagaacgctttctgagctgaaagttgagtctgttctgagttaacaacgcagtaaacactctgccgagcgcgtagactcctttgtggacaacctctggctcgggcgatgtcttgaccaagctgagtaggtcaataagtggatttaaagacgaggtcgaaggaagaagtacttcctcaaaggcagaaatctgtgagagcttagcgatcaacagagaagacttcgaggaggaagagtctgaggatgaggtcttctgtttcttgagtttgagaggtgccatgatggtctatattagagtgtatatgtatcgtcaagacctggggatgtatggaccagaatgggaaggtcaagaattctcaaaaatcgttgatcggctagttatgtaagcaacagacttacgtaattgagtcttatcgacttacacaaaaaggtcctgatttgtacagcgtgtcgcaaacatctatcacctctactctctctgctcttgtattgatattcttctcggactttgcccattatgatgaaagtcagtttaaactctaacgtgcaactattgtaaactttccagacttctgacctcaaaaatacatatgtcgatcttcgctttcagatttggtccatgaagaaggattctgaggcggccgcgaagaagaaacctaaagtgaacgccgctcaacttcgagttcagaaaggtaattttctttgctctctaatggaaatttgcgcataggaagaggtgatagtacttggtattgattccatatgtcatctattagatatcactgagttggacttgccgacgaacatcaagacgatcttcccggatccagccgacattctgaatttcgaactaacgattgaccctgatgaaggtccgtcctcaaagccttcattctccagatctgtctggaaacaggttggctgaacgaatcttctgaaactcattccaggaatgtacaagaatggacacttcaagtttactttcaacatcaaccagaactatccacatgagcctccgaaagtccgatgtactcagaaggttcgtacattatctatactttcattcgatgtattcatctatcggtttcatctggagatgaaaatcatgggccatctaatcaaaatcatactatcttaaacttcttaagatttatcaccctaatatcgacctagagggagctgtctgcctgaacctggtttgtgttatcgctttccctccttgacgccatcagtgctaaccacattgatttgtgttcggtcgcgcaactaaccccaatgtttccaattttcagcttgtaagtcaatcatgacgtctctctcatcaaatttcggctcttttctctagttttgtctagatacttataggtattcggtttgatcatcctgcttgtcttgtagcgagaagattggaagccggttctcactctgaactcgatcatgattgggttgcaatacctctttctggagccgaatgctgatgatcctctaaataaaggtccgttaatatctcactgtatgtttctgatattgcaaagctgacatctcatgaacaatcatctcatttctcagacgccgccaaggaacttcgaagcaatcgggaattatttgctcagaatgttagaagtagtttgcaaggccgatcgattcggggtgagacgtttgagagggtcttgaagtagttacctcaacagagcagtggtcctagcatcattattgttgttgttaagtttgtttagtttgtccatgcttctaagtacgttaggtgtcttagacgtgacacaattgtatattctgcgacttaggttgttcgacatatgcaggcccgacacagcttcgtttgatcgtctaagtattaaaaaagaaacattaaatacatatatgcacgcgatgacaagacaacgaagtctgcgatgtgaaagtataccaaaaaagaaataggaagatgtcaaatgactgaaggtaaaccaatgctgagggggtaggccgagatgtgaatataggaaacgaagccaagatcaggtttgtctagtttccgaaaccatagagtgttcgaccctgtcgcttgagagcatacacgacatcgagagccgtcacggtctttcgcttcgagtgctcggtgtaggtgacagagtctcggatgacatctggggagaaaagaacacgtgcgataagccagcgatcagtagatggatcaagcgacagagacagaagatcgatgcaggatcgacaaggagactcactctcgaggaacagcttgaggacacctcgggtctcctcgtagatgagaccggagattcgcttgactccacctcgtcgcgcaagtcgtcggatggcaggcttggtgataccctggatgttgtctcgaaggatctttcggtgtcgcttggctcctccctttccgagtccctgtgggtgagggtagagcagatcgagaaggcagatcagaagaacgggcgaatggaggatacatgtcaggatcagagaatacagacagacagagacagccgatcgacagagacacaggtgaagacacgtacctttcctccttttcctcgtccggacatggctgtttgttgttggtgagtggggtgggtgggtgttggctggctggttgcttggctgagtatgaaggcttggatgaggggaagagaagagaatgggaaaagggacgaagaattggctggctttaagaccatccggtcggtcgtccggctgacgcgcccagccggccgcgtggtcgactgacgcgtgaggcgagcgcgacggatgagacaggcacccaggccgacgcgactcggggagacgtggtctctatggtcgcgacgtgcgtctgagtgtctggacgcgtcggccggacgcgtcgacgggctggtgctgctctcctagctagcctcctagtcactttcctagtcgctttcctaatcaagctagagccagactacagtcgtcgcgtagtgatcgtgtagtcacctggtcgactcgcgtctcacgctaaacacgaggacgcgtcaattatattcgacaccattattttatattccgtatggatcattatattccgcgtccgtgtccgtgtccgtgtccgtctcgcttcccgcctccttcctgctcgctcgccatcctcacgacgcgtctgtctgagtgagcagccgatcgggacgagaactggattcgaccgagctgagacataaagagtgggcatgtgtgggggtgtatgctgactttgttccttcttactactcaccgtcatcaccttagctaccttcaccaagcactcaccaagcactcagccacacactactatccaaccaacctatacctattaaccttagaacacaatggcccgaactaagcaaaccgcccgaaagtcgaccggaggaaaggctccccgaaagcagctcgctaccaaggctgcccgaaagactgctcccgctgccggaggtgtcaagaagccccacagatacaggttggtcttttgctcttctgctcttctgctcagagtaacctcagactgacatgcctctgcggtgctcctctacagacccggaacggtcgctcttcgagagatccgacgataccagaagtcgaccgagctcctaatccgaaagctgcccttccagcggctcgtccgagagatcgcccaggatttcaagactgatctccgattccagtcgtcggccgtcatggctcttcaggaggcctccgaggcttaccttgtctctctcttcgaggacaccaacctggctgccatccatgcgaaacgggtgacgatccagccgaaggacctgcagcttgcccgacggctgcgaggagagcgggcttaaacaattagcatcatttatcgcccaggctccattcttacattcccatttcttagcttttcttgctggtactgcttccgcacatgcgggcatgaccggttgcttgcctcttttggagaccatctccatttcgtttttgctcttttcttttgttaattctggtcttcggggaatacggccagtatatacataattattatatgtttacatctatctgtgagatttggagtcatgaaagcaagagaatgattctactatgacaaaagagcgcgttcaatcgatatatactagcgctggctgaattccggttgccgcccgtcggccgaatttccaatttctcccatcttctttttttcctctccttcttatgaggtcgtccgccgccttttaagcaaatatgtcaggcttctacatcactacgactcttttcaaacgaaccaccacggctattcagcttcacactctttctcgactcacttcctcgtacagacgagcgtttacatctactttgccaacacgaaaaatgtctacttcttactctgtcgtttcaactcctggtgaggtcccaccgccacaatctctccatgcctctacatttgcctgctttgacaggccgagagggttattctttttgcattaccctagggtagactcaaacagatggctcaccactactcttatatctatccaactgaaaatatgacttcgacatacagatgctcctaaggctattggaccttactctcaagccatctcatacaatggcttggtctacctcagtggatgcattccccttgatcccgtatctatgaccgtggttggaactactatcgaggagcagaccgttcgtcctctacatattcctttgatgttatatcccattgactctttaccgacctgtttctttttacggcttcttcctttgtttggatgcttattctttgctaacgaatatagacccaagttttgaagaacttgtccaatgtcctcaaggctgccggatcttctcccgataaggtcatcaaaaccacgttcgtccacggcgcttgatttcttttcacttctgatctcttgtctattcaaagaattataaaaggaatacatgatatgcagatgtgacgaagactgatcacaatcgttctgtttgcgttcatagcgtgttcatcaaaaacatgaacgactttgtcgcgttcaatggtgtttatgagagtgtatgtcattttttctcctctttcatcgttaccttagaagcgatgaaatgtcaactcagataaaatacatatgccttattgcctacgaccttctatgataattcaatagttcttcaacccttccaagccggcacggtcgaccgttgaggtcgcccgattgcccaaggatgtccttgtcgaggttgaggtccgtgtcttacacacatcctggttctctcgatcacaagatggattactgatactgtatttcttttgattttgggataatgtcttttattcgcttgggtccaaattgctgacgtatagtgtattgccatcgctcaatagagtgaggcaccggtcgtttcattatagttatattcgtgttcagacagtgtattgatgatcagatagaaatgtcctgccactggtcgtctatgaggttttgaaacctaacaaagcctggtaaaagataacatatataggcggtaattcaatatcaatcgctcgatgacgacgatgacaatgactttggggttcctgagggtgcagatgatggtactggttgaggaggtggtagcggaggcggaggccgaaatggcggaggcgagaaaacagaattcgtcccagcatctctacgttctctctcctccaatcttcttctgattctttctgaccatccgagtcccttctcctctctcgcaagcctctccctttcaaccttggcctgtatctccttccccatcctttcatcctctctcctggctatatatctagccctacgtttcgatcgactgataggtccctcttcggttgataagacgggcttgcgaacagcgacgaatgtatccttcttggaggtagctgctcgaaggagagcaacttgagtaactgaaggtgtccagttagggtcggatacattgaaaggtacaactgtccgtctatctattgatccatcttctaaagcgcggacactgtcctcttcacctcccttctttccctcgagagcagcggcagaaggcgtttttttccaagcaggagagagagaggagataggcgtaagctggatgtattcggacaggaatgactcgaaggcaggatgtctgaaagccgtcgggagtctacgaggtatctggggtggattcgatctattgtagttcaactgagaagtcttgaagttacctgatggcgggacgagtatgtcaagtaactctaccgaaggaatctcccttgctagtactgaaggcgcaggaggagttcgaaacggagatcttcctggggcagaaggaacaagttgaggaaagatattgtgcgcgggcgaaggtggagagaggacttctgagagaggtggaaaggagagtgcacaagagaaagagagaggaggcggtgtagttttagaggttgatcgaggaatacttaatgggttccgaatagcaaatgatcgttggtttttgaactcagcttcccaaaggcgctcatactcttcggccttcgtcaacgtgcttctgaattctgtcgatcgagtgctcggagaggctgttgaagaaggagcgagaggtacagtgtctgttactaatgttgatgtacttgtagagggtaatgcgacagcatccgctaatgttgattcagatgcgatatccaagaatgaagacgaagaaagttgggagtccgaagtggtcttgaccgaagatgatggtttggaggaaagagaagattctttggtcgaaggagtaacggaaggtgaagatggtgatgaccagacaggtgagaagggcaacaccgatttggattcactaagtgatcttggatgaggctctgggattcctgttgcctgttctgttggtgagtgttgttgtggcggaggtggtgatggtggtagtgatggtagcagtagtagtgacggacccgacgaatcggttggaaagtcgtcttcggtaatcaagtaccactttcccgtcgctctttgacgagcagctctattcttctggcccttcttttttgtattcttcatcgtggttgttaaattactcgacgggtcttccctatcagtaggaatcaactttgactcaacgggtggcagtatcgtcttcacaaacacggcattcttcggagctcccggccatatcttcctgccatacggtgtatccaattgatgagttcgattggagctcgaaacctcaacagattttgggaacaccttaggtctagccttagctttagcctttgccttggcaactctcgcttgtgtgagagctgcagctcgaactttggcttccgctatatctaatgaagtagccgaacgtcgaatgatattcttgggttgtccacctccgtttgtcgctccttttttgggccctaattctgctccgcaggttgtctggtttttatttatatctgtttctggagttccttgtgagttatgaggagaagaggtcgtgtagggtcgaccagggattctgacagttaatcgacctggaggagaaccggtcaaaagatgattgagtttcaagatgtctgaaaatgattatttcggataaaggatgagcaagacagaagaatacagtgggttacctgagatctgtgcgacacaagccgaccgataataagccaacatagggtactctaaattgatgatgttgtgaaagagactaatcggtcggaaggagagaggatgagaaagtgattttttctttacttttctctactgaatgcagacacttcctgtatttcaagttttactgcagttattctcttctgagcaacctcacacgcacccttcattctcatttatctctcattctttgatctagtgaacatgtagaacccatttagagatgaagaaacatatcacatcatcatctacgatttttttaaatagaatgaaaatatcaaagaagaggagagaatacatcatgaaggcctataacttggtggaccttctagtcccaagaatgaaccgtcctcgcaccacgacggtctgaacccgtcatcatttccccaatgagatcgacacctataatcaaaagagtatccatagatcacatagttcgttaggcttcatttacagataaggattcagctgaaatgaacaaagcgagaggacgacgcaccgcatagaaaatccgtaaggaaacttataacccctctcacccctttcgtagcctccgacaaacaattccatagccttatcgacttttctcaaattcgtcaaatgctctctggcaaacatgaatcccgcaagcgcctttcgctggagttcggctggattggcgagcgctttggcaacaacttgattgatttgctgcaagaagtaaaaaaagcaaaaacaagaagcatccttcagaagctgacagaccaaggcaaaaaaagagagaacaagctgtatactaacttctatggaccagtaaggttgcaaaacaaccatgaactcggacaactcatctgtcgttcagttcggcatcccgagggaaaatcagaaatcagcgtggtctcgttatattgccgcgagatggatctagatgtgaagacccaaaatgacgaaccctccatctcggtgggtagatctccagcaatcacacagccactgtcaattaatgaattataagtcacaaaagtagaacaggcagaccgtcattagctgaatgggttctctcccatctttgctcttaattggattttcttctttcggacaaaacacaaacctaagaagcgcttgcgcgtatctattttgaggaagagtgcaagtaggcggagaagtcagtgaaagcctcgtggcgtattgaaacgaatttcaagagaagaaaaggagggctgttactttcgaatcatctttcgctccaagctcgaatcaaactaatttcaacccaggagtttcatcagtattcaacgataaacttatttttctgcatacttgacacacaaccaccacttctcgagatttgcacagaaaaaaaagcaatggttgacgaacgatacagatctgagcttccctcattccctttgcaaactcttctctcgttcgtatgtgatttttgtagaactctgatgaaacagagtacgtcttgggtcgatcggaataagcagtctgtggttgagaaatagagtagcctttcaagatttgtgtgtatcgacaaaaattaagaacacacagttagaattgaaaagagaaatattatggacagaagtgagaccgaatcgaagcgagacaaacctggatgactgaatctctgaatggatgttttgccttcgcgaattgcatcgtctatagtcgttcggaggggatagaaagaaccaccaaacccaaataggacggcattcttggatttttgtttccaagaattgaaaggatagaattcccattcactttggggttcgaattattcagagaagagtcagatttagtacgacgatatcaagtggagtagagaagagactgtgtggctgtggagaggagggcgtactttgcctagacaatttaagattagatatatgcacaaggtgaagagttgttagtgtcatgagattactagtcgatatagccaaaagagaggataaagagaacgcacagcatcaggcgaatgaccaaagaggtgcatggtatggccgggaaagagtttcgagattcgttgatgagtaaacacttcggtcaactcaaatgcgtatctgtttggtcatcagttaaccgaagaggaaaaatagattcaagaagatagagatattggatgatgggttaatttcaagtaatgattaatatcacggattcagaagattaaataccttgagagggtgacattccctaggtagggcatccattcctgttttcgaattcaagtagacaaagcctcggtcaggctcatactgagaaaaagaaacacaagtagcatgctcgtactctcatacagctattttctggcgtgccgtcatgacaatcccccagttgtctgtaacatgtattgagaagatggatccaacttatcggtcttatgtatcgaaataacgatatagcgcgatagaagatacgtactgtacccagacagtattgcaaccgggcgcatcaaccaacggatcagacctagcagaacggatgaaggattgatcgccatcaatgagcaaatggcgcatgaaacgaaatcagtatatgtcaaaataggtcatgaatcaatgtaccagaaacgaccagacaaactctttcagcagatgtgcaaaagtccagataacatcccaatacccacatccccatcgagcatggatgttatctgagagcgtcttcgtgttgtcccctttcggaagtagatacaaacaaaggagaaggataaatcagcctggtattccttcaagttctatgatatttatgatagataaatcaatttgaacaggtcaatgagcttactcacattctccccattgagggccccatacgtcgactactaagcctggatgccggagggaggcatcgattagttcatagatgaccgtactaaatggacgaaagagggttgcaatccagaacggtcaaagatcatatacatgccaatctattcacctccttaacgacgaaatctcaacatcgaggtgattctgttattcgtttgtttcttagaaagaagaagagtctcactccattcgatccagataatctttcgtatcagtcgacacatagagtagattagcgtaaggaaggacaatctatgatccatgtacacaaagctatgctacacaccaaggtaatctacgatgacgccaaaaccaagagaatagaaagagtgaatcagcgtttcttaaagattacggtgaagtgtaaagagattgaaactcacctgtcaagaatagcaccctcttctttcttccttcttctccattccatttaacctggtagtcccacggactagctcctactatctcggggttaccataccacgcagggaaccggcctttaataggccttgcttgttgcttctctatcagacttgattgggtttgaatgtctgttcgtagagacgaatggacgtagaacagacaaatcgatcctaagaccaagatgacggtaagaagaatctttggcggaggcaaatgcatcaggccagatgtatgatgaacccaagggtagaatagatgtcgcaggaggctaggtagaagtaagagcccaaagaaagtgcagacaagttaatcagtaaagcgaggtaagatattgccatgccaagttgttatcttatgtattatatatcaatacttgattacatagacgcgtcgcaacgcgatacgcgttaatgagcttgggccctttgctgcgcgtggctacttctttgtcgccactttcgatcgtttctctgatggatttgtctccaccacattgcactcacatcagcatacacccagcttgttcattgcacacgcctatctcatttgttatcagcagacacatacatacatggacgaccttactcagcagacaaaccaaaatgagttagtaggagccgaggaggagggtgattttggagacgagtccattggaccgctcctcgtcatcaagctctctgttcgtattcctttctttttcttcctttactccactcgacatgtttcctatcttcttcaaccgcgctcttctttgcgaagaatctcgttatgaggattcatcgagtttgctaacctgcgtacgagcacatcttctttacattttccgctaacaggagtctggtatttctccggccgattgcaagaaacttcaggacgcaggccttcagttcgttcactcttcagcttacttgtcctatcttcttcttttcaaaaatctatattcattctgagcattaatttccttcgaatgtctcttgttgtttgatgtgtacatttcaacagtacggtggaatcagtggcgttcactccgaaaaagacgttgattgggatcaaggggatatccgaggccaaggctgacaagattcttatcgaaggttagccaaactataattacttgtcatttccctaggaagcgtgcaagtatcgcttgttcaactcgcactcttggtattcaatcttctccagccaacaagcttgttccgatgggattcacgaccgccaccgagttccatcagcgccgatccgagttggtgtgtatctccaccggaagcaaggtcctggacacgttgttaggtggtacgttcattttatcgacacctctccgacattatcgtcgagtcactaaagcatctggcccatctctggtctattctgtaaatgcaggcggtattgaaacaggagctatcactgagcttattggagaattccgaacaggaaagagtcaattatgtcacacacttgctgttacctgccaggtaaagtctcatctcgccctaccctgacccctcgatgtcgccccgatatttatatcatgggttttaacaaatatgttttctagctaccgataacaatgggaggaggagaaggaaagtgtttgtatatcgacacagaaggaacgtttcgaccggtaagagtactcgctgtggcggagcgatttgggctcaatggcgaggaggtgctggataatattgcatatgcaaggtctgtcacaacaactcttccgtcaaattgtacggttactagatggaggaactcactcaatcattgactctgttctcgtcagagcgtacaattcggatcatcagcagaaactactcttgcaagctagcgcgatgatggcagagtctaggtacgtgtcgtctgtttttcgtgtctatttacgcgtactcatgcttgattctcctctgtgtgttttcttcttaggttttcgttgcttatcgtggattcttgtacctcactctaccgagttgatttctccggccgaggagagctctcggctaggcagatccatctggccaagttcctacgaacgctcatgaggctagccgatgaggtttgttatcatttatcttggttgaaactgatgtctattcttggtgtactgatgcaagtggtggtttttattcattgaaatatctgccttggttcgaacagtacggaattgccgtagtggttacaaatcaggtggttgccagtgtagatggaggagcgatgatggggccagataagaaacctattggaggaaacatcatgttcgcattgaccagttctgcattttttgttccctgactgcacaacacgagctttctctgacttcttcttccctatgatttcgatatagggctcatgcggcgacgacgcggctgttcctaagtaaacacagaggcagcaatcgaaagtgcaaggtgtacgactcgccgtgcttaccagagagtgattgcctgtttagcatcaagtacgtgtcttttacttttttttttggcaatatcctttctgtctatcaaatggtgtgtgtagaaattgacaaggtatcctttttttttcctcgtcaaacagtgcggatggaattggagagccagaagagatggatgataattgattagatgcttttgccttctttttttctttcttgccccaagctgcctttatatgtcttcccatttgatttgattattccctttgtcttcgttcccttccttcaattctttaggtgtcgttcatgttgtacaaccttcttcctgtttgatgtgaccaaaagaggacgaaacttctctcgagaagaacccttcctattataatatataaacgtatctgatcgttcaacccatgggaactgttttcacgccttttgaaatccgtcgctgcgacagagacacgagactgaaactaattctcctgagatctctcacccatccaatccgcctagtcctttcaagaacccctcgtatccatctttatctcccttcttggccggaccgcccgaaccagcaccggctgtagcggcaggtccgggtcgaccgaaccctgctttacccaagacacccaagagaccgccgaggagttcattgcctgaacctaagcctggcccggctggccgttcggttataggtttcgaacggacgtcatcgaacgagattgatttttcttgatagtcacctgtcgaatctcttgacgatgatgatgctgttgttgttgttgttgttgttgatggtagtgttgatggttggtgatgtgctgatgactgggaagaggagaagtcggggagggacggcccgatgtctgatccattgcctactgtgctgaaagaagaaggtgccgacaaagaaggagcggcgttgactcgtttggaagctaaagcagcttcggccgctcttttccgtttgacggccagtgggacgaacgctgctgattctttcctgaaatctcggagttgaggggcagcggagatgacttgtgaaggagcggacgctgacgccgccgccgtcggtgtggagttttctccgtctggtttgtcaaatttgttatcatcggtcgctcggacagaaatcatgttcgggttatcaggtaacgaagggtgttttctcgcgtgttggtgtgcttggaaactctgtacagggttcgagttcagcggatcatgtaacatcggtggtggttgcctggcggttggtggcctgttcatcggtggtcggttcgggttcccgttctgtggcagacggaagaaaggttggttgttgaaaccggccggacggggtggatacggtccgggaccaaacccaggtcggaacggagggaatcctgggttgaatcctgggggtggatacggagggtaagatgaacccatgttaaaaggtggcggagggggtggtccaggagggagaggcggctggaccaaagcttttggatttgggtttggcgctgtgggcagggggatgtcatcgtcatcagactcagattctgatggagtgcccgtcagaggggtagcgggtacggcgcgtgaaggtggaggagcggaaggtagagggatatctgaatcgtctgaatcatctgaatcttcttcagaatcctcgtcagaatcttcaatcaaaacccggtggatgacaaggacaagttgtggaggttttaaaaataaaatagaattgatatctagtatcagcgcaagttccagaaagaaacaaagtgttggaaaagacgacgatacctgatgcgatgtctggttcaagcactgcgtatgggtcgaccggaacgggtccggtaggtagcggaggcatgaacgctgaggtcatcgaattcgaagaaaggatcagtatcagatgaatgtttcctttctgccggttgatagtaggacgtgtgaagtagctgaagaaacctacgtttctctcgataaggcatccctggaggaggaactccgaacggattcaacactggatcatagtagatcgatcgttccgggtgtctctgtttggccaggaagaggagaaaagagataggaacccaacgcgtcaaactcgccacctactcacgcgactacaagggaagcctgcttggacattcacgtccggctagagaacttacgagtttaccctgctcatcataaagccctgctgcagctctggccttgcctttcgcttcgtccctctccctcgcctctttttctcgctcgtcctctcgtttgtagacgatcgacctatgttccgggtgtttctccacgtactctgccttttgcttttgaacataagtgagctctgactggagagcctcgagttgatctctatccctagcggagagtgggcctgatttcgcttgggcttgtaatctacgtatgtcagcttcgatgcctgtgtgtttgtatgtgtgtgtattaacaatggcaatgatgatcggaagaaatagagaaagagaaaaagaaaacagattgagtggaaggaaagaggtcagatgagtagacaagagaaggctgaacgtgaacagtacctccggtgtccttcttcaacgtagcgacctctcggacttttttcctatccgctttgttctacgttcgagagaagagttcaaacaagcgacccagctcaggacacatgtccgaatgtgcacacaaggagaggagagaaaacaacaggattggaaagatagatggacgtgagaccacagacctttttgatctctttcgctctctgtgctttcccttgattaattgtcaaaagattcaatccagagattcgatcggtcagccctgtggttccgcggtaaataggacgtatgagaacgagaacgaacgatgtgcatcggccgggttcattgatttctttgccatgatgatgacgacgacgacgatgatgatggagaatgagtgcggaaggggtgatcgtctgtgagggtatgatattggaaacgaaggtgtaggcgaggtttcgtcaaagtgacctagggttaacgtccgactgttccaccagcgctaacatggatcacacgtttgcctcctctttctgctccagcgcgcgcatatacactcagatgtttcagacacggccagacactggttgaacagagcagaaacagaccgtcgaaagttaaagagcatatcgacaagggaacagaatgagataaaaagttagaagaaagagaacgacgagaagaaacgagatacacagcgtgaatattccctttctagccttcttgtgaatatatgtataaaaagtatctagcacccccggttagatcatcttggtgcctcgttcatactcatctcacgatgcatactctaaacagacgaacaaaggccgacatagagaaaagaaagaaaaggtgtgatcggcgtccagagttgataattagaaaaagattaaaaaaaataaaagatgaacgaagtggggttcgaacccacgcatccgaagatagggctgtttaggatcgtgtggatcttaaaagcaccgccttagaccactcggccattcgtccagttgttaatgatggaacttaacaagaatatgaccagaaaagtcaaatgatgagaggacggtggtcccatagccgagaggttcatttcattgggtatccgatgggaaagatgtacagatagatgggcgggtattattatagaagtacaactcgaaaggcaaagacgagaaggagaacaaaaggaagactgaaacaccgagaagaggagaacgtctgagtgtatatgtgaaagggatctgatgagaggtattatgggttgttcaatcaaagaaaaaaaaggagg

SEQ ID NO: 875 - DNA, 704 bp, Xanthophyllomyces dendrorhous
tcttttaatgatacaatgcctgcttagacgtccaaagccgagtttcatcctcggcctgtcgtccgataagtgtgtagaagggagaagatgaaaagtctcagtgagctgcttcctatgcgatcaaagaaggaggtgaagcaggaaaaaaagagaaaaaacaaacaaacaacaacggtgaaaacaaagagacaaacgtaccctcaacagaactgcctgaagctctccctctctctgtccgatccgttgctcgagtgatcgcatcatccctctgaagctttgtagctgggccaagacgtgttgcgcgccatcattggtgttggcgtctccgtcggtgtgtgtgtcaggtagaatcgagtctgacggcgtgggcaggaacgaggatgacgaagatgtgtgtgtgggcgtatgggtggccgagcttcctccgccggctaatctagaaagcgaaggagcctgttgaacgagagcggagcgtaccgtgggcgaatcaacaggtgaagtcgaggtcgagcctatggggccggggccggggatggggacggcggccggatgtacgggcacatcaagcgaggcagcccatgtcggaccgaacagacgttccaggtgggactctaacagacgttcgcggctctttcctttctcaatctctctcgacgccttctcgatctctctctggaagcctgatagaagggattcctggaaac

SEQ ID NO: 876 - DNA, 3078 bp, Xanthophyllomyces dendrorhous
gaatcaagggggacatcacctgaattcacgcatgagttgttcgatctctgatcgaggaggtctcgatgttagttgactctggagtagatccacctgatcttgaagctggtttagtgaaagttcattagatcgaagaggaaagtcggaaccgttcgcgtttcaagttgccgtgtttggaggagagagaaagagagaagagatcaagaaagagagaaagaaagaaagaaaaaaaaacatgatcagaagaaaacaaaagagaaaaaaaaaacatgagcgcgcccagacatgagaaacccagaaacggcagacccaacaggacgaaccttttcgcactctctttcctttgtggcaagcctgtctgtcagatctacgagctggtcttcttgttctcctagtacacccaggctcgagacgtttccgatgtgggtagcatggaacgagtcgagtatgctcgtccgtctctgggtctttgtcgacgcggtcgtggacgtggttgactcggagaagggaccggcggtggacgggccggtcgaacggagtgagagcgacgggttggcttgatgtgattgacgacgcatcgtgagctagacgttcggtaacagagcggaagttggtttgattcttgtagatgtgtgtttggaggaagaagatgaagagacgatccaatatggggagaacggaaggtgagagtgaagacgcgagcggccgtcgaccgctttttctttattttcgctcgaaacaccatcagtaaagaaaaaagaagaagcaaaagaaggtaaagaagaaggcggccaacctcttttcgggaacagatacaaccaagacacacttgtacccacacccacacccacacatatagaggatggcaccactctccccatccgtgtcccttccgagtagacctcgttcgcccactcacggctccttcccctctcgactgcgacgggactctcgttcgccgccgcctgctatcattgctgctgctgctgcttcttcttcttctcgttggcgaggagacgaacgatacgatgaacgatcctgggccgggggacattcctattcgtacagggatccatcctatgggacgtacagacctcgggaaagaagtccgagcccgaggcgataccgagaccacagggagggggagagatattgggatgacgagagatatcgggatggtgggagaggagcgtacagaccgagacagagggagagggataccgacagaaggtttccggatagagaccgccggtttgattctgatatctgtacgtgtgtgtctgttgtcttctctctctctctctctctctgttcagacgatgtgatacgaattctgagaacgtgaatttgcctttgcttttgcttttgctattgctgttgctgttactgttgcttttggattgttcactctttggctcaaacacacatacatacatacacaaaataaagccttcaaacagagatacagatcaccttctcctcgccggctacccaatcgatcgccttcacctcttgattctaccccgtccactactactgctgcctcccaccgaccgacaccatggccgagacagacacaagcacaaacacagacaaagacacaagcatcaggagggaccggctcggagccatcaccggagaagggttcggaaggcggacgagaaaaggggatgaggaaggtgacgccggatccagagatcgaagagggagaactcgatcctcggtctgctgatgtcttgatcgagccgccggcgttgacttccgagaaggacaagcgggtggagagagaacgagtaccggcggtggcggcaaggagttcgtctacttctcggttccctccttctggcccaagggttcccccgggcgatcatcgagagaaggagagagaacgagcggggatggccgatagggattgggagagagaaagagaatgggaaagagagaggggaaaccgaggaagaaggtttgagagtccctcacccgttctctcgagaggcggtccgaaacgacctggagtgtattcggactacgaacctggttctggttcaggcttgaacggagctggaagtactaccggtgggagggacgattggaggagaggtgggagacggagtggggaggggggaatcaacaggcctgagcacggtcgagtcggttcgagccgaaggcctgggcgatcacggtcacggtcgcgatcgatttcccggtcgagggggagctcgagctcgagatctcggtctcggtctcggaccagtagatctcggtcgagttcttcgacgacgagatctgatgttcgagatagagacgatgtggccgggcgagtggctgcgcctgggcatttaccggcgaggattccgacggggccgatgtcgacgaacaaccgaggccgatgggcttccgaacgggcccggccgagggctgcgtctggatgggatcggacggagggcgaccgagagcggttgctggcggtggagagtgagcgggagaggggccgggtgagggagagagaccggcgggagatggagttgatggatgaccgcagacggaaggatcaggctggggagggggggagagaaacggagaaggagaaggggaaggcaaccgggcagcctctgggagggaaggaatgggcagagaggatgaagctcttggaggagcgcaaggcgagaaaggcagaagccgaggcggcgacccgaccgaggggtgtacttgagcccgttcgggatgacggagcgcaggagagagagaggcagagggagatcgagagggagggagcgaccgtgccattggttgtgccatcgattgtgtcgtccactgagttgtcgactgtgccatccgctgcgtcctccatcactgcgccgtcgacgacaccgaaggagtcatcgagagagacgagaaacacaaaggaaccggaagaagacgtatggaaggcggctcgagcgcggatggagcgggacggacgagagcgcgagcgactggagcgagaacgagagcgggtcgaccgggtgcttgctcggttgattgatgggatggccgaccgactggagtctgagcgtacgtcttgggctctccatgggg

SEQ ID NO: 877 - DNA, 302 bp, Xanthophyllomyces dendrorhous
ttgtgtttgtgtttgtgtttgtgtttgtgtttgtgtttgtgtttgtgtttgtgtttgtgtttgtgtttgtgtttgtgtttgccttgtctctacagctgacgaaactccgggggacgctgtctgtgttgacgaaggatgggatccgcgtggggtgggagctgtggcagtctcggcaggagctgtccaacggggaggttgatctggctgcgtttgaggaccgacggaggttggccgaggcgtggggtgtgaggcgtggggtgtgaggcgtgtgtagggtgtgtcgtgtgtggggtgtgtgtgtg

SEQ ID NO: 878 - DNA, 1189 bp, Xanthophyllomyces dendrorhous
gtgtgtgtgtgtgtgtgtgtgcgcatatgtgtgtaagggtgtaacaagcgggtgcaagcatgtggatgtgtatgtggatgtgaatgattatatcaaattgtcccacgtgttggtgaggttgactggctgacgcacgttttcgggggggaggaagaatgtgtgtatgagaatgtgtgtactagaggattccactagagggttagattacaatgtgtaatacagagttgtattagagacaatgcaaaagagagagagagagggcattgagaatggactagagagaatggactagagagactgtattatagagtgtactacagaatggcctacagaacggactacaaagtgcactagagactctactacaaagagcactacacaacgcactacacaacgcactacacaacgcaccacacaacgcaccacacaacgcaccacacaacgcacagagagcaccgcatacactccacacacacacacacacacacacacacaccagcgagcagaggaagggacagtgtattggcgaattctattagggaattctattagggaaggcactacaaaactgtattgcccgtttggttacactttcctatagacctccctagtacgtttcctagtacgtttcctaatacactctctaatacacttcctaatacactccctcatacacttcctaatacacttcctaatacactccctaatgaaattcccatcggccctttctttccgccgtctttctgctcactctcgcttagccttgaccttggccttaccctcttcccccgaccgtgctcatccagactagacaaggctagaggatgaaggtgccgttctctctctctctctctgtgaccttccttatagctttcaatctgacgatctctctctctctctctctctttgttctcctccccttctctccccttctctccctgctcgcttgtgcgtgtgtgcatgcatacgttcactctctcccccgccccgccagttcggaaaacaaatccagagccagcagatccctggctggggggcgttctacctcgactacaagtttctcaaaaaggtcggtccttcctttccccctcgcctttctctctatcaccatccttgactgttcacttgatctcatctctctttctctctttgctcctgcttcaattcaattcaattctcttctcttctc

SEQ ID NO: 879 - DNA, 386 bp, Xanthophyllomyces dendrorhous
cctccccccccacctctctcgaccgcatcctccctatcaaacccaccctccggattctttactggcgatctatccagcttacaccccgatagtaacgacaactccaccaccgctatcaccaccaccaccaccaacagcaatccactcggccagaccgccgcgccgcccttatggttctctgcagagaacgggttgatcccaaccttgaccgctcctaccatgacaaacaccacggccacgaccacaacgacaacgacaacaaaaacaacaacaaatacatcctcatcctcatcctcctcatcctcgttcaccaccgtacccatggaccaagacctcattcactcagaccgcgatcaacacaccgaacacgaaccccttccccccag

SEQ ID NO: 880 - DNA, 859 bp, Xanthophyllomyces dendrorhous
ggcttctttgaactcaacccgctagacagatcagaccaccccgcacacgacggccggtccgtcggtggaaagaaaggaaaggaaagcgagttgctcgtcgcccatcgcaccgtctttttctttaaactcgagcgagagatcgaaaaggtcagtccaacagatggttgaagcgggggagctttcttttctttttttctttccgttcaaaagccaaagccaaagccaaagccaaagccaatgctgatgctgatccctctacgcaattcatctcttcctttctcctcccaccaagatcaacgcgttctacctccaaaaagaaagagacctcagactccggctactcaccctcatctccaacagaaagcgcatcctcctcgccagcagaggttcaaactcgacatcctcgatcgaatccagaaacggctacatcccacacggttccaccttttccagcgcaaccgtcctcgtcggttcaggcggaagcaccagagcagaatggaaggcgctcgaagagggttggaaggtctttgagagagatctcagcaagctccaagtgagatgtttctttcttttcctttctgttcctttctctttcttgttacttttattttgcttgcctgcttacttgcccgcttcttttcacttccccctcccacagcaattcatcgagatcaacgctacagggttccgaaagatcctcaaaaaatgggacaaacgaagcaaaagtaacaccaaagaactctacctcgaacgtcaggttgaagttcagccttgtttcaacagagaggttcgatcccctttcctctctattcatccttcttttctatctctccaatcaaactcacctcctttcccctcc

SEQ ID NO: 881 - DNA, 2664 bp, Xanthophyllomyces dendrorhous
cccccccctttctatgcctacctactcatcaacagttcatggcaaaactctcggacgtcgtggcagcaaacctcctggaccaagacaacggtaccgaaggactctacgacgaactcgacgagatcgacctcctcgataacgcgctcgaccctctcggcaacacactcgaccccagactcctattcgagtcctccccctacgacccatccgaagcactggccgacctgtcgtccgacctcaccaaagcgatccacaccctcgaaccagacgccatcctctccgcctttgcccggtccatcaacgacatcaccatcctcgagtgccctcggcaggacgcagagcgcgtcatctggaaggccgcgttggacgtgcccgaaagcttggtcgacgacgtcatcgctctcatcggtgaccatctcagctgggacaccaaagatcgcatccacagcagaaccatccttcacgaagcagcgatctctggcagcctcgccctcgtcagacactgcgtccaacggggcatccatcccggcctccgcgactgttacgaacgaatcccgctccactacggaacgatgaacggccaccccggcctcgtcccttacttgctctccgtcggatccgacccttccctcgtcgacaccgatggctacaccccgttgatccacgccatcgtcaacggtcagactgagtgtgtccgaatcctgctcgacggccctttcagaggtggaaacaatagtagtgtcagtagtgtcagtagtggtagtggtagtggcagtggcagtggcagcaacaacgataacaacaaaccagtcgactccaactctgccgccgacactacgaacgacgggaaaccatccttcatcgaaccgctcatgtcgatctcgaacgatctgatccccctctctctggcgtgcgaacacggacacgaagaagtcgccaggctcctcctccgcaagggcgcaaaggtgattcccaactcggaaggcctgtacccgctccatctggccgcccgggaaggccacgccgggatctgtcggttgctcgtccaagaaggcggccccggcatgggcgggagggacagaaaagacaagtacaacgaatggacacccttgttccatgcgtgtctcggggagagagcatcccatgtggactgtgtgaacgtcctggtggatgctggctcgaacgtcaacgagacggatgaatacgggaagaccagcttattttacgcgtcgtactatgttcgtccgatctgttcccttccttttttttcctttttttttcttttccttcgttcgagagctgaacttgtctgtcttttctatccttttttaaaaaaaatctatttaattaattttaaatctctttctcatgatgggggaaaatccttagggtgtaagtgtcctgtctctttgatgctgcctagctttcttttgttcatctgaagtatcttctaatcttcgtcgctcacacacacacacacacagcacatcggctcaataaatatcctcctccaagcaggcgccaatgttcaagcaaacaagtcgttcgtcacccagccaaccaacacaaaatccactgacgacacaggctcctcagagatgaaacccctctcggactcgcccggctcgaatttcgcactggacgaaccgatggagagcgaggccgagctggacgctatccccagtctgttattgccaccgccgatcgtcccgcttcagatttacggtcatagctagtctgtcctgtttcttttttttatttgtttatttatttaaattctttcattcgcgttcggtggcgcgctcagttgtactgacgtatgcgctctctttttctttgcgaatacaaccccccttccaaacaccactccttacagcctcgacaaagaatgcatggttcagctctcactcggtcatccgttctcccgcaaggaagcgctcggccatgccccggtgctaccagtcaagctgtacagccaatccgaaggccacgcaaacatgcagacctggtcgtccatcaaactggtcatgacgtccaagccggactttacctccatgccccacagcgtcatcctccccctggcggacgaacgggaggtcttcaactttcacgtctccgcacaggacctgccgcagttcgcgctcgacttttcgctgtacccgacgttcggcagcaaagtcatcggcaaggccgtcgttctattctcggcgttcgaggacgtgaaaggtcaccaggcgttcgtcgcgcccatcttggaccaccatctaaagactatcggcgaggtacggaccagagctttctttctttctttctctcttgttttgctttctcctctctctctctcttttttaaaagagacaaccaacgttaacctctcacacgttcactctctcatcaggtctcgttcgaattgagcgtggtccgaccgttcgtgggcgttcaactggagatcggaggcagagtagagacctactggaagtcgaccttgaacgtccccagcttctccggcgtcagccaggatcacggccgacagccacatcggccgttgtccgtgtttacgtcctctcccagagtcggaggccccaccagtacgcccggcggtcagaacccagtcggatcgagtaatccagaagccggtttggtcacctcaacttctctttctgt

SEQ ID NO: 882 - DNA, 3100 bp, Xanthophyllomyces dendrorhous
gcttttttatttctatttttcatttaataaagagaaccctgaccgaattgcgtttcttcctctctactccttgtggccaccgttttggggtttctgttttgttttcttcttcttgcacacaaaagggaaaatacgtgcacgtcatcgttcaggtcaccagagatctcgttcctgtggtctactctgattgggaactacccgtcgatggcttccagatcggtgtcgccgacgtcacgttcgcccagttccaaaagttgggccaggcaaaaggaaggagcatcgaggctctcaaagaaaagatcgtcggtgacggatcgtccgctggtatgtggcatggactgatcaaacagtcgatggcttccctggattccatccttgccgttcgtccctccatacctcttttcggcttgctctcagtcttgttcggccctgtgtgctgtcgctaatgcccgagacgattcctttttttttgctggatactatatgtgctctcccgatcgtagacgctcccggtctcgtttggagtgaacctcgagctaaggtataccaacgcacacgacgccgccagacaggctttcaacaacatcatcgagatcaaccaattcgtcgacgccatcctccgagtgatctaccgagccggtaactcttccacctcttcttccattgtcgacaacacctcgttctccctctcgcttccgccaccaccgacgacgacgacgtcggcaatagagtcaaccgccggcggcaacaccacgagtagtagtagcagcaacagcagtagccataaccgaaagatcatcttctcggctttcgacccgaatgtcgccagtctgacaaactacaaacaaccgaactacgccgtgtttttcgcgagttactgtggtctttccagaacacgcacagaccgggggctgttgatcccgttggaggtcgaggtcgaggcggacaaacgatgtgtctccgtcagagaggccgtcaagtttgcgagggcgaacaatctgttgggtgtcttgttagatgcgacgttactcgtgagtccaacaaaagaaaaaaagttctttgtggtggcctttctttctgctttgctttgcttcgcgcttttcctttcctttcattcctcaaaagaaagattgaatttgttgctgatcatcgtcatccggggcgtatcgttgtctgtctgtttcaatcatacaggctcaggttccgttcttgatatattcgtacgttgaccatacttgtcctccgcttgccctcctcctttgttgtcatcgttgtttccggtgctgaactctccctcttcttcccccccccctcctcccctcaaacaaacactcgacacgcaatgatagtgtgaaagaatcaggtctgatcctgggcacatttggggaggacgccgatctagagacgctcatgtctggacatgggatcgaaggtttacccgctatcgacgcgttcatgaaggatgggtgagtgatctctgtccctctttccttctctctttccctgcctttgatttctcgggcgctgatctggatcgaattatcttctcggcccatcgtttccgttttgtctttcctttcttcccttggggggacgaacagggtgatgtctcacgaattctaaatcgggctttagggggtaatcgtgtctgtcgttgtaaaaagaaaaaaaaaggttaaaccaatacatcaaataagcccttaccccccccaaaaaaacaacaacaattaatacagagggagaagaggtttaaaaaaaggacgcagatagacttggtctagcgtaccacctttcgttcaacatccattcaattctcttccctctccatttcttctctttcctcacgactgtgttcaaccataagatatctaatactagaactttctgctgtaccaaatgaatatctctgatctttatactatctcccctccactccctttaccccctgtgtgtctctctcgcgtgttcttctcttctctttcgaatacactctgacgtagactaccatatgccgagatagatgaagccatacataacgaaagctcacgacgtcaagcaaagcaaggtaaaaaagatcacgagcttcaaactacaggaaagttatcgatcctgttcgaacgactgaacgcatgacatcacccatctgctgcctcttggtcttctgcgctatgcgcccgaggggtgctaggtcgacaccccatggcatcatataaatcccctcttgaccaggtcttcctttcaggaggaatccttcttcctcttgctaccccatcgctcacgtccttatctgaatcataaacaactaccccacacatacacacacacacgatgtcttctgactcaacgtatgtccgtctccctatgttcacatcctctctttcttttcttcttgtttgcctctagaggacgacgctgaacaacgtcatcccactcgagatagcgtgaagaacccaacggacgtcgacacggagatcggggcgaagggagattacgcggacaccacgtattctgttgagtttttccctttctttcttactttgtcctctctccttctttggcggcctttgccggtcgggtcctttctttctttatttggcgcggcaactgagtgagtgactgacttcatatccgggctttctccctttgggatggaagagcaacaccggaaagacgtccatctccggagggtcagtcctctccttgtttgctttttcctctttctttctctcttctttcttgatcgactttcatggtaaccgtttgatcctgtgatatacaatccggaacaccgacatccagagagggaaccggaattaaccaccaagctgtgaagagcgacaaagctgctggtctcatgggtccgtctctcttccctcctttctttctttctttctttctttctttctttcgttcttcttcgcttccctcttgtcgcccactttccgaaagaccgtcagaaggctgaagtcgtcattcgatctgatctcgttccgacatatcgccggtacagacaaggtcgccgagaaggtcggcgcgaacaagtgaacggttttccaaaacggagagtttgatttgtcgaagagcttggtctgtttgtaga

SEQ ID NO: 883 - DNA, 1889 bp, Xanthophyllomyces dendrorhous
agaaagaagcagcaagaaaatgatatctcttccccccctcgtttcaaaaataaatgaataaatcaagcctctaacgttcggatcttctccttcaaccaatcgatcatctccgtcctcttgacgtccactccgttggcttccacatcttcctttgatttcgcctgttccttgatcttgacggtacccccctgaagctcgtcagaaccgatgatgaccgcgaacgggatggagtctctgtcgatcacgtcgaactgggctcgcgctcctttaggcttgactttgtacataaactcggcctgtggcgtcccgggacagaatgggaagaagaaacggatgagatgttctgcacaaatagatagacacaagaagagagcgaacgtaccttgatgccggcttcccagagctccttgcagatctgcatacgctccttgatgagaccatcaccgacagacatcacatatacctcggtctcctttcctctagcagctttaccagtcagtcgttccctctcggcttgcttggccatcatactaattttacggggaagaaagaggaaagaaagacaggcagcatttgcacaccatcagccgaattctggtttcagaagcacttatcgatcttcccccccccaaaagaaggataggataagaagaagaaaaagaaaacgtacatggcgtaaactctctccacacccacactgattcccacacagggcactctgttcctcgtcatctccctgtcggccgctttaccctgagctccggaagcagcggtggtgaacataccgaccagattgtcgtaccttcctccagcggcgatacttcccacaccaacggtcgactcatcgatctcatctccttccttcttgtttgctgtcgacgagggagcggtctggccactgacaggggtggtggcagcagcaggtaaggcaggttcgatcgagggaacgacagactgagaaggaggggcggaaagctcggtaatagcttcgtaaatgataccggtgtaatagtcaagtcctcgggcaagagacaaatcgaacgacatctatcggattacacaattgaaaatgaaggtgagccaaacgtcgtctgtggtcgcccaaaaaaaaaacaagaaacaagtgatttgacgcatttctcaagaaaacaaatacaaaccttctcgagacagccgtagacgtcgaggtactcgaacaagattcgcatatccttgagaccggcagcggccgaagcgttgctgttcaagtttgcgtccttctccaagatatccagaagctcccaacctcgtcctacgagaaacgatgtccaaaagataaacgagaagtcgttaactattttgtataggtgctttctttcttcaaaaggcgcgccaggaagtttgtgacatacccttcaacttgacgtactccccgatcttgtcggcaatgactggatccaaccccttttcctcaaccatctccttcttgacgacttcccaaggagcctgaaaggaacagaaaacattcggtaagtcatgcgtgatcggacaaggcgaagaaaaacgagaaaaccagcagcataccttgtcaagcttgtcaacagcagaagagatcgcccgaatcgagctctcggggactccacagagagagaaaattccgtccagaatctttcggtggttgatctgattaatagcgggttatgaatagacaggatgaccaggttcagctcgactccatgataaattaagatataatcaagtctccgtagaaagagaaccgaaacgaaccttgacagtaaagtctccaatgtcgagcgcggtgagagcctcacaaagaatgctcaagatctcagcatcgggcaccatggcatcatagacaccagcaatatcgaaatcctatatatatatac

SEQ ID NO: 884 - DNA, 5199 bp, Xanthophyllomyces dendrorhous
cctatatatatatacagagatgtttgaagcaacgtttagtactttgctaagtggaaaggaaagacaggaaaaacaagttaagaatcagacggacacattggtaaaactctcgaagtctacccttgctcatagcaggttgatcacgtcggtagaccttagcaatgtggtacctcttcatagcaacgactccattcatggccaagtaccgagcaaagggaacctgtttcggttaaaagagataagcccgtgacccgaacaaggacgagcaaatatatttgaagaagaagacagccgatcaaagaagcaattgagaaatttaaaaacaaggacgaacggtcaagtcatatcgaagcgaacagagttcacctccctgatcctgaagatcgtagatcaacttggaatcctctccatatctgtttaacaaattgggactagttaagagctgagataagagagggtttaaacaaagagttcatgcgtactttccagccaggatctctttaagctcaaaaacaggagtgtcgatagtactcgctccatgcttctggaagattgtctcgagggtagagaagatctttcgtcggacagtggtatcttgagcgtggaaatctcgggtaccctaaggaggagagagccaaaagcgtagatagctagctaggtaagaaacatgcgcccggaggaatgggaaggaaaggaagaaataaaccaagaactgttcttacctttggaaccttcagactcaactttccgtgagcctcaactccgaccttgctctttcctttctgaccgacagcgaggggcacgctgacgggcgcatcgctctttggaagaagagctttgagatctttcagcctttggatctctggctcacagggctgctttgcgagctttagctttttgatctgagctccgagctctgcaatctgggtcggaaggtcggctgggggagcggtagacattggacgtaaagaacttggtcgattgataagctggccgacaactggaaacaaggggaggcttcttgaatagtttgattttatacggtccaatacaatagctcgaaggcgcatgcaactgctcctttatggagagatctgagtgtgtgtaactgtgggtgggaggtagggtcaaggatggattgagagctgatgaacaaagtgaaagaagaggaaaaaaaggggagcagcggataagcgtaaccatccagagtaacaaaaggacattagttcgcatgttactcatatatcactacatatgacacggttacataaggccccggtccgacggatccggttctccttgtggagttaaaccatctcaaatttcatctcagctatccatctcttctatctaccactccgacccccacataaatttatattctatctctctctcttcttcatatttctgcttcccaagatgatcgcaaactcagtcgccttttcagtcagacaacagatcacctcgaccctacgcgcttctggtagggtcgcagtaactcccatctctgtgtccctccgatcattttcatcctccctcagacggttcgacgagaaggatgacacgtctgctggatacgacgctcatcgggtggctgttagtgattctattatctctctttgttcctccttcaccctctatcatcaatagtctacatcagtctgatctataacatccctgactcgaggattcattcagccaaagacgccgatgctggctgctgttgatgattctgtccgaatcaaagtagaagacctcgatctgggaacggatcgttcgtctgcttactgttattttcgttggagctgatgtttttgtttttatttccctaacgagttcggtttcttcctcactttgacacatatatcacatcacttcctcttcacaatctctagtgggacaccgaacggcaggtcagaataatggcaaacaccaaaaacgaacgcttgctagtctctcattcgaaggaaaatcttgtgtcatcactggtgcggctcgaggattgggtaacgtgtttgctcggacgttcgttgagagtggtgctagccaagttgccatcatggaccttgatcaggcagacagtgaacgagctgccaaagagatcgatgattggtttggtcagtcaccattctttatgtgcatctgtgtgtatcatacacgggctcattttattcttcctgcttcggtctttctgtttgatcaatcatcttagtcggtcaaggagaagctaaggaaggtgaattagatattgttggctatggttgtaatgtagcggacgaagaggctgttcagaagacattccaatcgattcgagagcgattcggcaagattgatgtcctcattaccgccgccggttagtattcccatctcatcatcctcttcaggttgctatttatattgatcaatcggggttcctcatctttctgcctacttgtttatgcatacgtcgacaggcatcgtggagaatttcccaatgctagagtacccaacggcaaagattaacaagctgtggaatattaacgtcaacggaacctacttttgtgctagagaggccgccaagtacatgttcgtgcaccttcttttggtttaatatttcacggtaatgatgtattgaacgacaactcgctccaatcttccttgttcatatacttttacaggatccaggacgatgtcagaggaagtatcgtcatggtcggaagcatgtcttcctcggtccgtcttcttcattctatcacgaagcaaatacaatccccgtggaaaaccttcagtcctgacatccgttcttgcttctacacagatcgttaacgtgccgttcgtatccttttgttctaaaccccgcaacggtcgatctttatggaaatgtaggaaactctgaccttgctattcgatctttgccagtcaaccacaggcgccttacaatgcatcgagtacgttttcatagtatccttctctctcaatatggagacatactactcagccttgtttgttcttataaattatttcgacttctctttcccttttaaaaacacgaaacattgaatgtattcagaggctgctgttagacatctagcagcttcgatggctgtcgaactagcgactaagggtgtcagagttaattgtctatcaccaggatacatgttgactagcttgacaaagacaattttggatcgagagacagagctgcgagacaaatgggttagtcctcccctttcttttctctttttttaatgggtgatcaaggtcgtgctcgcttgcgtgcaagagagggaggatctcggactgattatttgtcttgtttcatcgaactggatggggagctgatatagatttcattaactcctcaaggaagaatgggtgaacccgaagacttgaaaggagctgttgtctaccttgcttctgacgctgctgcttgtacgtacttctctttgtttgcttttcagggcttttcttttttgggacgtagaaagaaaaaagattgcgctgaacataactttccattacatactatttatgtgtatagatactacgggtatcaatctcaaggtcgatggcggatattctgtggtacgtcatttaaaatccattgtgtccaatgatgaaaataaagacagtttttaatcacctgatgtgtcctttgtcttaacgtttcttatccattctttgaatatcattttctagatctaaaccgtgaagtgatatcaaacgggtattcaatggaagttactagtgtaaatcacctctccttcatctcaatttcgattttaccaaaggactatattttctacaaatacaaagcgcaaaactcaattctattcctcagacaccctttattttgttgttttcttattttcttattttcttattttcttcctctgtcaggtgatatgatctatttgtcattgtgatgtcatgtatctatgacaaaccgggaatgctacaacggttgttctttaggtttaagacaggagattaaaaaagggaggcgtctactgtcgggaagtctgtccggatcggtatccgtggctgttacaaaggaggtgctcaatataagtttcgagatggtcaagttaagagtgccgtggagaaacttacacaaattgccactgtcgggggtggtcgccgtactgtgagatgtatgcctggtttgcgctctcctcgtcattctgtccatttccggcgtcttcccaacccttgttgaaaccagcgtcgaatctgagagaaggaaccagaggagtgagctgcagtagatgacgagagtaaagagtataacgaaccggtcgttagcagactgccaagaagagccctcctcagagttgttcctccagtagttgactgtacatcgataacaaagaggttgagtctgtcagtaccttgtctgaagatgtgataggatatgtggcagtggagatgggaaagaagagaagcattaggaggaaaaaaaacggaccgtgctcgtcctgagcggtctgtcgctcctgatctcgctgagaatcgtccttgaccatgatgagtgatttagtttgtgtttaggtgattgggtgtaagcaagatgagagaaagtgagatacggggattaagagggaagagaacgccccgatccgacagtcaaaggactggtcctttatgtttttttttgccccaaaggccgaattcaaacgccatctcatctcatctcatcacaaatgatcaaacaagctaaagggcgtctacactgtggggagaaggtcaaatcaggggtaacagccaccaaataaacttgagcgggcaggtcggatgaacattctttgacctgcgtggaaccaaacccgaatgtgacatcagccaaggccaagcgtgaaaaccaagaacgtaatcggatcgggttcggatcatccggtgggccctagttgtatagccgtgtcaagcctggcagtgaagttgagaatcacgtgagtgatgttacgttcacgaaacttgatttgttaccactagcgctcggatgacataatccgtaacagatcaacagatcggctcgttgctacatcgtcagaggtggaaatgttgatctctaggatccattttctctcgttctatctctctattttccatctggaccccgaccaacgttctttccatcattgtctggatatatctttctcttctttcttcttgtttttattgtagcacccaatttctcaatacgcttatccatatatacac

SEQ ID NO: 885 - DNA, 4127 bp, Xanthophyllomyces dendrorhous
cttatccatatatacacacatcaccaaacgtcccgtcgatgaacgattctttctcatccagctcgcagtctagaaggaacaagaaccgggcagtcaacacggccggtacctccggcacgccttccggcggtaatcatcatggcaacggcagcggaggaagaaagatgaacgccaatcatcttctcaacttctccatgccttccaggcccgcacctctcgcaccacccccaaggaggagtagaaggaccggtggtggagagggcgccaggtggcaggtgttcaacaaagagagtacgtcctctcggtcgttatattgtcttgtatatcgaagttgtgctctgatcaccttttcttcctatccctttcttttatttgcagaattcgtcaatgcctcttttcgattcatgatgaagcctaccggggactataccgcacactttgccgactcagatatcttcttcaactggccagacatccttcaaatcctcatccccccggccaggccgaccatcgttgacggggtctccttaaaatcccacgatgctgttcttccgagctgtccaatttgtctaggggtaagcttcagctatcgagaggaatgattttagttcggctcgttagtcgccagtgggtattgactgattgggtctcaatttcatgatgataatcaggacccggtcgctcctcggatgacaaagtgtggacatgtaagtctccatctgttggcacccgctcattcctaggcttcaaacgcccgtgctgatcaatttcccttctttacctcaggtttattgcttctcgtgcatccttcatttccttgccttgagcgatgagcgctttggcaagtgtcccatctggtgagtttcattctgtacccctccttgatgcttggtcagggtcatttgctgagaatcttgaaaccttatcaaacttaacatttcatcaaactctttagtaccgacaacattttttcaaaagatctcaaatgcgtatcgctcttagaccctaatctctttgcatcatccactccgactagcatctcacgacccactcattcgactactcctaacagcacttcacaaacgtttcgccttgttcaccgtccacacaacactatgctctcccttcctcactctggcacttggccctcagccgccattcatccccacgaagctccatttttctttgtaccagatgtctcggcgtttgcccgattcatgcttgcctcgcccgaatacataatttcccagctcgaccatgaccttcagaatctcgaggccgagcgcaggcagcaagcctcagcaggtgaggcagatgtcggcctcggcttcatcaatgctgctatgatgaaggtcaaagaacagatggaacgcgccgggcttgaactcgacaccgagactgttcgaagaaagattcgtaccgtggaaggcgcggtcaccaaggcgagggagtcggctcagaggatattagatagggaagaaagcatgaagataaggcagcaggccgctgaaagtcaaccgattgagtcgatctctgtcgcaccgacacattcatcggtcgagcctctgtttccatctaaagaatactccccagcatccttggacctatcaacattttcagccccgccatctgataacccttcagccatcgaatcgcccattttaacctccaacttgattccccatgcatttctctctcatcaaggacatacctggtcaacggacgcccttcccgttgattctcctacacctcttacgaaacagccttctctatccaacccctcagacacctcatcatccacctcgccaaagaaatcactccaaccgaggccaccggtgagacctcggaccggatcagcgctcctgccctcggccgaaccttcgttttacttttatcaggccgtcgatggtcaacatatctatctacacccgttggatattagagtattgttggcagagtacaagtcgtatgctagctttccacagttattggaattgacggttgaaggcgctgaagaaggaaccagtgggttttatctttcttttcatatttccatcatcatatcgtgtttatcaggtgcacttagttgaacaaatattgatgctttgtttcattcttacctcatagtgaatgaggatcttcgacgacggtgtaaatatctagctcatcttcctacaggctgcgccatcacattcattcaagtcgacctaacacgactagctagtaaatcagtgctcgctcaatttgaagctcctcttcgtcaacgtcgacagcgtcggaaggataaaggaaagaaggaagaacgtgagaagaaaaaggcagaggaaaaagaaagagaagaggaagaactccagaggttgaatttgtcaagggatcactcatttccttcctggacaccgcgagcgggggcaggaggaggaggaggaggaggaggaggagacgattttgaagaggccttggagagaagtctttgggaggcagaacatacagaaccgagacctaccaccgatcttcttcatccttctgcttcctctcccactctaacaacctcgccatcatcctcatcgacgacgacaaacaacccatcaggttggtcagggcgctcttttgcctccacaatacatacatccgaagggattcagtcttggggtcggtctcgatcgacgtacggtcaacaatcccaggtagatgaggaagaggttgctgcgctctggaaaaagtttgagtccagccaggctgccgaacgaaaatgggatggaggagcgagtgtgagtacgactagcgcgggtggtggtcccgttggagtagaaggaacacaggcagatggctctcagactggtcagagtagaggtgggaagaagggaaagaaagcaaaaggccaaaaattattgttgacgggtggcggtcgagggttttaacgttcgattcgtctccctattgtgatctttctctctcgctctgcttaaataccttgttgtactctgtttgggagtttttcgttttgtcgaaatggtttttcctcaaattcctggcctcgtgaatgttttgatgatcggttgcgtatgctgatcttccatttgatccgagcggaaatattgatgctgacatggtttccgttccatcttcaatgatctgtctctttccttcactgacggctaaccatcttcagtactttccttgtctctcttctccctcctctctcctcctttttcgatcaaacatgtccctcgagattatcagatcatacgcaacatcacacatctgtcaggatcatgagcaattcactaacgatgccatctatcgagtatagtctttcctccttcatgatacccactcttcaaatttgccagtttcaaaaatgaataaacctgtcttgtcattcttttccgtcctatattcccttaaagctcctaacggaagaactatgcccgatctcgctgaaccattatccagaaacgatactcgtcaatccgaacgaatcaatcgagctcatccctggtgtcctacgcaccttgagagagaaaattgacatgaaggacaacgagaaatgggatgaagtgtgggacgttccaagaaaggcgattgatctgatcatgagtgttcaaagagggttgaagaggtcgagaagggtagatggaaagttgacagatctaggggttagacctggtacgtgaagcgggtcaaatttggatgggtgtatgcgcaagattattgacttgacttcattgtatcttcccaatgaagactctttcgtacgatctgtctcgcccccaccctctccagttttatccaagagagcactccgggagacacccaagattggatgttttgcaacgtccaactcacaggacctctcaggtagacaaaccaagacatttcttcgggcgctagatctgattgagccgtataacaaactcgggaccgaggctttgaagttggattcggaggacgttttgtaagcaatctgctttgatggtatcttgagaggaaatgtgacgctagatatacctattccctatcttggctaatcagagtttgagcgattggttatgctgtatgtttggtatatatatataaaaaaaagagatgttaggctctcattgtcggagaaaaccgctgaccatgtc

SEQ ID NO: 886 - DNA, 48510 bp, Xanthophyllomyces dendrorhous
ctcttgagttctcttcccaaaatacctaaaagcggaaagaaaaactcgaagcgcaatccgatcttggagagcgcaaaggatcgggcgagaacgttggaggtcgtcatgaatcctatttgggctcaagagaggcatgatcagttaattcatgagaaggtgattccaacctcgtcgttcttcttcccccttatttgaggctggagccttgagcttaactttgtatccttttggcaccgcttgaaggaatccacatgttccatgtccccaccaatctttccccgtcgtttggattctgtctgttacaactctagagacaatgttgatggttcgacagtcttacctaccactcttggccagattggtgattgtattatctcgacagccaagctggccggtcttgattctccgcaggggctaggtaagatgatggaagatccgtttagtatggaagcccttgatgagttcagtaagtccaaaggcccagaagatcgccgtgtattcttcttctttgacacatgaggtatccctttacatctgattggatgaatatagtgcatgtccctcctattccgtccgatattaccttttcgcctccctcaagcgatcctgagctgggtgcaggcttcgtttggccaatcaatatgtctacggagccgcatgtcgttagagatggagaagttgatgatcttataggtacgcatgcgtttattatgtttgcatacatttaggttgatgtcagtgaattaacttttgggagtggtaaccctctttgactttagaaccacctatattccccagggctttggaattagagactcatagagatcacgatattcaaaagtatgtgcgctgtctgcattgaaatctatatctccggctgtgagtgttgagagctcatgagcatttttaactgcaacaagatggcctaaatcgctgtctgaaatcttggcaaacttcaagaaccaggacgatgaaacatctctccaagatgaattctcctctacccctactcctcgttctagaatcgtcgacaaattcaagctagatattctcggatctgatcaggacaatcgacctgcttccttggccgtttcaccttctctaacaggtcaagcctcgccaactgaggaactccacaatccaaatgaccatactgatctattcgctctgagctcggatgacctcgtgcatgagctattaggtctgcttcatgaaggagatgtgagtactctcataggctctaccgatggttggcttgaagaattcggtccgacaattggacgaggacatgatacattccccagtaggtctccattcaacatactaaatgatttctaattgagttcgtatgatattaagtatgtccatatgatttctctgaaactatgaacatacaaggtccaccattgcgtccggcgaaggactgttttcctgcagacttaccaaagactccgtcgaatttgaaggaggtggtccgtctactatctttggtgccgccggaattattaacaaagcctttagaggtagtacgattatctgggcttacttctctctctgtcgaggttagtgcattaggttttcaagcacaaaggtcatattccattcgagctagatgctgatatttgttgatggtacctatcttagttgagttggaggtgtgtgttttctacacgaccttcattgacaataagctgtgactgatcaactatgtttttataggccttttccgcatactctaaaagaagacgatgtgatagatctcaacgatctttaccgtaaagaagaccacgccggatggcagctcttaattgatttggtcaaacctctcttctcacttatatctcatcaggacaacataatcctgtctcggacagagtcgcgccctcctgaccctctctgtttgtctcaagagttgaacggtttcatttatactcggaaggaaactgaattacaaggacctgatactggtgatctagctcatcaagtctctggatatggtgcagagccggcggtcgaacctactgttcttgatactagtcggataaatcagccggtcaaccaggtgatctctctccgacacgataagcgaccccgtctgatagacaatcacaaatctcttctttcgaatgtggtcgatgatcctactccctcccagctattccgccctgtcactcctcccatttctccaaatttgctccatatcgtctcggatgattccgaagcacaagttcaagagacacctctgaagacacaaagttttcagactgatcattcctgtgcggatccggaaaacatctcattcgatgatgaggtcgatcaaaaagatttagatatgtttcctatccctgaacgacttatcaacttccagatgtctgaacggctttcctacctcagtccgttgtctcattttctttctacccggaacaaacactttacagctgtcgaacaagtgtcaactcgtacttctccaaaaaggtctgagagatctgatgaacagtcgccttcaaaccaaaatctatctgaatctgctcctgaagagatggtcaagatgccccagaacctagcggaattcgagggattttctaccgatcagactggcagaattttggatgaagaagaagtatggtatcactgcatcggaggtcagaaactgctacaaaaccgtcgtggtgagtcaatctccatcccactgtatatcctctcggaatgcaatctgatgatatattgattggaacagcctatcgttcgttggagaaaagctttatacttcctcactatcgatcacaccctactctctctcgtgaagcaaattcttcaatcagtatcggccttgacttgatccttaccactcttaccgccgctacaatctatcctcttcaaattcttccctctattctctcacagatcccaaaacttgccgaacatcttcagagccgatacgataacttgtatgttattctgaccattccggccgacagagagacggaagtttggacgcccttggtgatatcgagtatagggaaggcacgcagggcgatcgccatgcaaggtctggatctgaatatggaggaaggcttgaaagtcaaaatcggatgggtgcgcgagaatggtttgggtgacttgctaagatctctcttggaatcatcttctacctccccttcaaagatgggatgtctaggtgatagctggctcgctccttgggagtatactaacgattgcgatgaagccagttgggaagaagtgggtctctttgtccgaactatcacttgaagagtgagattttagtaaaagtcggcatcgattattcatcgtcttcccttctacattcttgaatgctccaacccggggctcacagatggaatctagtttggccagctttaatcggatgaacccgttttcggctgcttggattctagctttgatgaaccttgatgaatttctcgatatggattctctagaaagggtagattccttcggaccgttgtttggggttcgccgcatggtcagcttgaacgctatctttaagatcgcgggttctttcttttccctatcatgccgtcttgaacttcattcctgactctccgacgaacactgattccccttaggaacgacaatccgagttcattgcttcccgaagattgaccctaccaagcgaagacagtaccccgagcttgcctctttcatcgcctccatcattttccaacatgcctttcgataatcattatccatacgagaagagggtcactggtcatccacgactctactcgcattggcaagatcagaatctagaggagatgtgtgatattctggaagaagatgaatactaagagaagtatgagcagatcatccgtcagacgttgatgaagatttgtattctctagccttttttgtgaatgtgtcatcaccctgccctagatgaattcatcatggatgtatctgtactctatatcaatgtttgcaggaaattatgataaaagatacataaattgacttgaaaattctctgcataagcgctataagagattgaagaagcgattgcaaacaagaacaagacacagacatcaaaaaggagaaaacgtttgtccattaaggtcgaccgcgtcgtcttgagatggaactcgagtgggatatcgaagatgaatcagaggaggataggacggtagtagctccaaaagaccgagtggaaggggtcgttccggactaatgagaagtaagaagatcagaggaatcaggatgaaaacaagttccgagaaagtgagatagagagggagactcactcctcccagcaagcttcgttcttcctccatccttttgtctttcttttcgcccatcgatcggtttgactcggcttcaacttcttcctcgggctcatcaaactcaccatcgtcctcctcctcctcctccttcaccctcagagcttcgtcctccaaacccttcagcctactcagctctttctcttcttctctcctctcttcttcctctcttctcgctcgaacctcagtagaagaatcgtcgtctgtgttatcagaactaccgatttgatcgcctgtgatgttggacattcctttaggaagtgaatccacccattcttgctcacgtttcctagatgtcagtttgggttcaggaagaccgtcctcaaccaattttttttccccagactcgaccgactttggtctaggggatgggaacgagctgggggacagaaggaagaacgtgaggatggatacaaggaaggtagtaaagagtgaagctcctgttaatgttgttagggataagatcggatggtatgccaatatagctctgttcagacgggcagtgatgaacgtaaccgaaatgagcgaccagaaagccttttctattctctcctgggcaagacagaaaaaggaagaaagcgaatgaagcgaatgaagagaaactaacctgaccccgctgagttcacctacaatcctgatctttccgccgtgtgtaacaagttcctttctacctcctccttccgaagcccatgagtcctgtctaccgacccagactgaaacctgtctacttgatttacttttattcttcgacctacctcctgatggaacaagcacaaccccgtctaacatcttgtttgatattttcgtccttcctgaccctctaatggtgctgatgattgtccaaggcgacaacaacggaggagaagatatcaaagtcgagacttttgacgaatggattgggtttgaagaatcatcaagcaagtctagggagaccataaagttacccagctcgacattcgaccgtgtgattggtatcgtcaaatcgagaaagatagtgtacggttggttttccctgaaataattggttggtggcaaagatattgtcgagtgaggcgctttattaggtagcctatgtgaaccagattgtgatggataaaggaacatgagataggcaatcataatcgactgatcaaaggcaggaaggagaagcatggagagcgcgaggacgaacccataatatagagagaaacctgattcccatgaatccacttttccccaagtgaaccagaatatcgcatagcccattccactaattgcgactgccatcaccgccaacaatcctgccagtatgaatctcaaagcaaacatatgtgctctgggcgagacgagaaggtcgtgtgtccatgagaatggaaggaggagaaaggaaatgaatgagcttggaggcggaggtggttgagcagatagactcgctcgatctttatcaatcttgtttgatcgaagcatttcgatttttgttgagaaagtgtgtacccagaagtggatggtggtggatggatgagaaggtaagtgagcatgggattggggaacgagctatcaagatgtgcgcgtcatcactttgggtttatcacgtgtcttttgtttagcgcagactctcattctcttccttcttccatttttcctttacacgcctgtagaaactataacagtcgaggaactctgtgatacaagaagggatttgttgaaaaaaatcatatataacactcgaatttgaattggcctcgagtggtcgatagacggaataagactctagataggttgaagatttttgtaatggaattctcatatatatttcttctctcttgtaatggagagatttagtctagaccccgaaagcagcacatgaatgaaaagaaaaggatcagtatgtcgaaaccgaaagcatcaggtgaaagcaaagaacaatgagcatagacgtacaaagcaatcgagtgataatgtttgccttggtgttttggatggcggcgtggagagcgtgaacttcctccttggtaacatccgaaatatcagccataaggtaagcaatatctcctttcgagtcggacgctgacttttcgatgttgtgccttgtttgagaaagacagaaatgactcggttttcagtgaggttctgccaaggacagacgcgaaagaaacgcaaacacaagaggaaagactcactcggcaaagatctcgttcacggctcgcaacactccgggctcgtttcggtgaatgtggcacactcggatatgtctctcgtcctcggcagcgatcgctcggagatcgacctctgggaagttgacggcaccaactgtggtaccgtaggtgagatacctcgagagcgctgaagagacctctgcgccaatcattcgctgagcctcttcggtcgagccaccgatgtggggggtgaggatagtgttcggggccttctgaattctagaagagaacgtcgggttcaagttgtcgttgaatccgggtccgttcgatcctggctccttggggaacacatcgacggccgcaccggcaagtttgcctgactcgagtgccgaggcgagagcctcgaggtcgaccacagttcctctagcgttgttgatcaagtaggctccatccttcatctgggagagctcctcggcctggatcatgttctttgtctctggaagctcgggcacgtgaagcgagacaaagtccgactgtgagagaagttcagggagggtgtcgacctgtctggctgaaccaaggggcatgattggaacgacgtcgtagtagatgacctgcataccgaaagctgtaagatagaaaagattgtcagtgcattatcttaagaactagaggaaggatgaagtgtcttcggggcctcgacacagtaaaaaaaagggggggataccttcagcaaggacagaaagctgagtaccgatatgaccatatccgacgataccaagggtctttcctctgatctcccaacatcccttggagaccttgttccagactccttccctcatctctcgtgctctatcggtcaactgtctggagagacaaacgacctcggcaaggacaagctcggcgacggatcgagagtttgagaaaggcgagttgaaaacagcgacaccggcagaggcggctgccttgagggcgacctggttggttccgatgcagaagcatccaatcaccaatagctatagaaagagcgcgcaccacatcaggaccgactcagttatctatgggaaaagacaattgaaggatactggagacgatggctaaccttagtagcagccttaagaaccttctcagtgatcttcgtcttgcttcgaataccgatcgcatggtaatctcccaacttctccaatagctcctcctcagtccaagccttagtgtagtgatgaacttggtagccctgagccttgaagtaggcaaccgcatcggccgagatgttctccaacaagaggatcttgatctcttccgatcctagcggttgaagatgcctcggtgctcgatagaccgacgatgggtttgacgactgtccaggtccgccagtcgaaggtgatgtacctgggagagtgttatgggtgattccaccggcagcgaaaaacgcttggataggggaagttccagcagcgaaggggcttcgggcggaaggaggggatccgaacgaaggcgacgtcacaggcacgtttacagctcctccgtgtggtatggggatactatagcagatgaggagagaaagatgggagtgagtattccaacagtatccaagtatagtggaacaacatccactcaatctctccgagttagtctcgagaagggggaaaagggtcgaagcaaggaaacaggaacaggaatggagaggaagaaagccaagaacgaaacgaaacaaccggaaaaaaagaggtagagaattctctctcctccaaaacagaagggtaagcaggcttacctctggggaggcgaagagacagagacagagtttcgtcgtgcagaagtcatggctagggctacagaggatgtgggattttagaaggtgagaggtagatgttgatggaagagtaaacgacaagccaaacgttttttaaatccgctcaaaaaaaaggtgactcgtcgaaattcggaagagaaagagaaagaagaaaaaaagatggcgcaatttaaaattcgattgttttattttgtcatatttctcttccagccttgactcgcttgcctttccgtcctgcaccttttgattaagtacacatagaactatcgatacatcatgtttatggaggtattagagagaataggagaggatggaagaaagagatattaaaatagaatggtcgtgtatagatggacgcaaggtgatcaaaagttggtgctattgaagaacaaatgaattaatcataacagaaatagaatgggctgaatgcacacagtgcaatcagacttggtcaacccttcttcagacaaacctgggtaaggcatctcccggagcaccctctacggggacacccggtgcccaaccggcttctctcgagaacggagcgtctaccccaaatcggctccggagaggtttctcgttcgaaccgagcgtcgaaccggtcgtgcccagtggatagctgaatcgggtggtcgttcccgctgctacttttcggaagctacaagagattcatgtcatgatagatggttgagcagaaagctcttgggtctcacaaaaaacacatcacaaacagtcacactcacaacagagactctgtcctcggtaagagaaggtggttgaatcggaaatcaagaatagcggcaaagaccattcggaacgaggcaaacgctgtgcacgtcccaactgttacgtcaatcgaacacgagtcaacagtatcagtcaccatcgatcttttatgacgagagaaaaagaaggcgaggctgactaaataatccggcgaggacatcgtagtagttgtggtattcgtctatggtgagcgatccggcaatcaggcaagctcccaacagcggcgcgaaaaatacgatctgcttccagaatgcaggatggtaatcggcaaagaccttgagctgtgcattgaagtacaaagcgaggtagacaaatccagcgccagcagctgtgctgtgaccgctagggaatgactccagagcttcaagaaaaaggtaattgaggaaagagattgtaagcggggtacaccaaagcacatggctggaaatagaacaagcggatgtaccatcgttgatttcatcgtccgatccggtacagacagatcgatcaaacataatccctccaaatccagtacctgacgtagcgagctccggtgtgatatttggtttacaaactgcgaggaaatgaggctaccccgattcgaaacagagtgaagtttccgctacgtcagctcaaaattcttttgctttgtttgagatcagcaaggcgggaaggctacctactcggagaccaccgataagccatttgaggaacacttggaagacggcggcggtgatgagagactggagaagacccatagtggtcgcggtgaggtcccagaaggatcgtcttcgaatctacgaacaggattttaacgaaaacaagaagttggtgaagtttaacaaacggccagcgtctcaagcgcgagagaaaatcagacaagatacttacctgaaagatcgcaaagaacaaaaagggaacgatgaaagcaagaagcgctgccaaccagatgggaacgatctcgtgtcgaagcggataagcaaactagggtaaaaagaagtaaaaagacattgagaatgcggtcagaaggcgagcacgtgaagacacatagtagaccagaacagtatcttcctgttggcaaacacctacctgaggataaacgatctgtccgtcagtgaagtagattgggaaacttctggagggcgccggtctagcctcatagactccaagcccgacggcacccatcgcggccattgtcaactgacgagatcaagtttccagaaccgaacaaacatatcagcttctgctgtctatcactacacgggaggaagcgaggggagaaagaacaagaacgaaatcctcaccagatcaattccccagattcggatccactttccaaacgtcatcttttcgtgtcctccgagaccaccaagacccttggtggaaggttcgccaacatacgtgccttcacgcagtgtctgatgggttgactgcctagccgggtactcctgtggctgttgggtgtggactccatcgacggtggcaccattgttgaggttggcagtggtcggtagagcaacagccgggatggtctcactctgatggtggtggttcaacatgtttttgaaggacaggtgctgaggtcttacgaagtcggaggatataggaagagagagaaaagagagagggaaaggaaagggtcgatgtacagactttatacctgctcaatgcttgtcttctctctttctcctttctcttcctctatctccttcctttccctttttcctaacccgccttgcccttcccgccatacatccttgttggtcaagccccaaaaagagcatagaatagaagggcgtgaatatattatgaggtcattgccagtagcggacgcccaacaggctcagaacacgacgatccaggcaggcgacactgggcgattgagctgagggccatcacgtggattctaaaagagtcaggccgtctctatttttagatttcgtcaagccccttagtcctagtgacgtgtataatttcgactgtgcaatggtttcagtccagatgaaactctacaccttatcaaggttacatacattgttagagatgagggctggactagtgacaggagggttacgaagtgataaatacataagactcttaggtttcaggagagaagttcaggctcttggaactgggaaacaagattaacgagattactaggacaggggcaagggaatgaggataaggacaagtgaatgaatgagaagtagaagtaacaagagatacaagcttgagatctctatttacaagcggtcgagagagactgtcttatgtatagtcctcagtccctagaagcatgatacagaatatgatgaggatacgatgattcgctagggatacaaagatgcgctagagcacaaaggatgcgctggagtaggggacgaagaagaggtagaggatgaagaagaggtagaggattgggaattttcgcaccacagctcatgaacacgtgtggcccaggttatatccatgacatacgtggataaaaagcatttatgacatatgatatggacttgtcctatgcttacaccgaaaactcgcgcctcagggagccagtcgtgagacattggtggaggtgatctcccctgtcataattccttctgccagacaataccctgtgccaggtccttgggtgattccccaacaagatagaccagccccgatccaaacgccttggacgtctctgaccttgccgactaaaggccgacctctatcggacacagggaggtaacacgcttgctcggctataattgtcgctcctccctctaccgtcaggtgaggtgagagcttagcaatttggtatttgagtgtggagagtgaagtcgagtctgtttgcacctgagaagctagtaacgggagagccagagtatcgccagctccacaaatatatgccgtgccatcttaaaatgtatggattagtttgaaaagagacgagaattagtttcaagttcgtgtgtgaagagcttataagggggccaaaagagagagagagagagattgagagttcgaacctggacgaggatagatctcgggctcgcactcggttccatctttgagagtcaacgaggtaaaaatcgcatgagggctgactggaatcccctctgcaggcttaactacgaccgagtgtgctctacttcctgtgacacctagtttacctcctacctcttgtcccaacagtttcacagcaagctctccgacccacggcccggctgcaagaacaacatcctgtgtggcgatctctatcgactcgcctttggtgtgcccagaagaactgtcatcggtaaaggtggctatcaccttgttgaccctcttcgtgtctgagcagaaagagagagagctagcagacgcagtcaacacggtagcgcccgatagacggacgagagactgtgtaaggagtttcgggttgacttgagcacacgtcgcggtagtgccgatcgtctggagcttcatgtttccggtgatctcgtccgatagccaaccctcaagagctttgacggacttggccttcttgcccaggctgaagccctcgctctttgccttggccggcctcgaaagaaccgactgcaagctaacggcttcgatctttcgataaccccaatctctctcccccccgtgctctttagcaagtgcttcgtgaagcccaaaggaaagagcagaaagcggcgttgtgtcttttccgtgccaatctagagcgagaaatccgccagccttgccggaggccgcacaggcgatcgagctaggttcaaggattgtgatttttgtacgggtatgatcgaaattgggatgccgagagagatagtacgcggtggatacccccacactagtttaagatgtgaagaaaatcgaagatgttaaacttcttgtatgatagaacagagagaaggaaaaacatggtccatacattccgccgccaatgatgacaacattccgttgatttttgtcggttactatattggatgacatgaatctaatgaggcgtatgatgaaagaatgatgtaggagtgatgaatctcaaagacaatcgggtaggtgagtgattgtggcaaaaacaataatgcgatgaaaaggcaaaagggagaccttgttgggcgaattcaatgaatagaatatattgaggaggtgacgtaaatttataaatccatcggacaacaccgaaggtagttttctattgagagaagagacaaggcaacttttcaagtaaaaactagaatctcaagattagcctgttctttgggtgaggaacatacaacgacatgaataggggacgaaagatgagtatgagcgtttacagagatttaaggcaagatagaaagcaaaaagcatacgaaatggtattgaataaatgtttgattagaacacatcaagatagagctgaaaagagatagatccgaacatagaggaatatacgcaaaagatataagagaaaaaaacaacaagaaaagacacataggaagaagcagagtaagataaacagatgatcaaagtagagatacgaaggaaaaggcacacaagatgctaaatactacacggtggcctcttcgagaaattctgggcatctgtcgtcatacgttttcattgaggcctttaaatcgaggagttttgagaacaatgttgagtgccagcgttgtttgtactttggagaaattgatcctagtaggtttggcaatgtttcgtagtagactggtgtgtcttcttccgacctgctctccacctatatgagatgtagagtgaattgagaacatcagcagggtagagacaatggcaacatacaaaggatacgaacgtgaaagcctttgctgttgaggacaacgtcaacaaaacgaccttcgagtagtctgatctgagccgaggccctcaaggaggaggagaccggggaggtcaaagcgtctgtcagttgaggtcctgagtggatggtgtatgctagaatcaggccctgttccttgtcctcccccaacgaggcgtacagttctgaaggctgaaacggagattccatcagggtgcgtgcgtctatatgtgtatgtatgagtgttgtatgtgaagctggttgtctggatggtggaaagagaggatcttctgtcggagagaacacagggaacacagcgagccgagcaagagaagattctgccggaagcatcccctgatgtctcgttctttctggccgcatttttcctctctctccacaagtctctgtaaaataggataagaataacagagacctctgatcagaagaagaaaacactcaggggcttgagtcaaacggctggggcaaccggcccgaggcttgaagaggggtcgactgaccgggggaagacccatgtaggctgtgattgacagaccgtatttgtggggaagagaacggagcgttctggaattaaatttctacttgctgcgcttcatccccggggcaacatacaaagtttgtcattcctgtggagccggtcattggaatactggcggcacggtgggcagggcccaccagatgacaacctcttgtcccaaatatctcggttacaacttaaccctaacaggaattgcacctttgttacattagtataatctaacccagtctatcactatcatcatctcttacgttgaccgtttgcttgcgcgtgtgtttgtctgatattctttctgctattctatatctacacatagctcctctggccatctctctcatccgcactctcacatcatgtctcggatgctgggcaaagacccaaatggtccttccaccggatttcctctctcggcatcatccctccggacgagaagaccgtcgaacgtgacgaatggactgtcaaagaaacctcctaaatcggattcatcaggaactgatgggaaatctcacagtatgtctccctcgtccttctatcgtcctgggttattcttgccgacggcatgcacaatctcttcgagaatcatcaacgctcgttgttttctcgttacttaattccttccttccttcatgatcgtctccagatcgcaagtcgaaagcggtatccgacaaaatcaaaagacgattgtccatgagatatgccgatatcacgtcgtccatcctgaacacaaactcaaacggaccggtgccgagcgtgccgagtatacaccaacgtcagaatcatcaacctcaccggccgacacctcaaggcgcgatcgtccggaggaaaccttccatggcagagatcacagacaattggggacaacatcaagagaccgacgatcttggtcggtcgaccttcccactcgcccagattggacaaacggctgaaggagaagaagaatcagatgttctcgaccgattcgacctacttgggagaaccaacgagatgagaaaagatccgggcacccttgatattggactcatcagtcaacaaggctttgatccccaagcttgtaaggtctttgtagtagtcaattcccctgtttttattcgctgaccctttcaaatccgcctctcctttcccttttccacctagacatcaagaccaaacttgctggggccactccagaagagattggagcgttcgctaccgctctagaggcgagcaaggctgctacctcgaaggatgtgagttttgtctatatcatgttcatcgccttccaatcagacccctcttgtgctgacagctcttcgcgcgtcctgaaccatgtctcggtctttttctctactctagcttcaaagaaacgtgttcaagaagtacatgctctttcgaacttatctttttgaacttctcaactttttatgtctcgttgactgactttcgtgccactcatttttccaaagctatgccgagtttgtcacgatatcgaaggaaatcgctactctagagaacgacatgctcgagctcaaagaactgctgagcgaatggaaaggagtccctgaagctttaggtagtattggagactcagagagtcagagttcgtgtcgtctctattttatcctcgtactagtcgagtttacactaattgagctctgtctgattctgctatgtcttttgacttcgccacgtcttatgaatccacccccatcttccgacttgtctctaattcgctcctcaaagcgcgcaggccaaataactctggtctctctgtactctctagtactaacaaccgatcgtctatcgctgatcttcagtctctctaccgtcaacagctacatacactctacaccaccgtatcggggtcacaaaagtttgttccgatcgtacccggcagacacatcgtcgctgaagctgcctcgtttgtcgaactcaacccggcaacctacaagctcaaaggcgccgttcgaatctttctcctcaacgatctcatcctcattgctggcatcaaaaagagacgaattggagggaccgagggaagcttaaacggaaaaacaaccgacaaaaagagtaaatcaaaggattctactgaggatagtagggaaggcagattggtcgccgagaggtgttgggtcttggccgaggtgacagtggtggatgttaaggattctggcagtcagtatagttcttttacttctcatctcttataaaccgtcttctccatcgagaacatctcagtcctgacttcttccttcctgaccctagatctgaccaatgcaatcaagatccgtaggggcaaagaaacgctcatctttcggaccgatcagacggaagagaaacggtcattgttggtgtcgttcaggcaggtggcggaaacgctagcatccaagaagcggaaggagattgagaaggaacaggtcaaacgaaagagtctttggcagggcgatgtcagttctttcgttattctttcgtcgttctttcttgttcatattctttttacgagtcctatctctaatcactttctcttacgccattttttctactctctcctttgataatttcagatggcttcccagttggacggttctacctcgtctgtccggtctttttacaatattccggcggttccgtcccttccgggttctcggacttccattcttgatctcggtccacgtggatcatcgactgatggatcgggtaaagacatgcattgggtcgatgaattcggagatgagcttgcggtcgcaattgcccttcaagaatgggagacggctgttagcctggtcgagaaaggtcgactccatctagccactctatcttcaccgattgaccctctcccgtctctcattctccggcaaaagttcatcccacttcaaaatgcactcttcacctcactaactcataagctagcctcctcgagtctccgaaagactagcctagctacgcttgtcagttacttttatcgacttgaccaaccggaccttgcgcgctcgacctttcttgccgccaggacggatctaatcaagaagcgaattggacagatcaggtgggaaggcgatagtgtagtctacgtgaacgaacttgccgtcgtctgcttcatgggggtaaagaacactacagaatggtatctgaacgctttcagagagaacggtatggcttcaggtgagccctttgcctcttcgtaattttttccttccttggctcgccttgagctaactcttcttggaacttgaaaccatcttatcaagctctcatcaaatgggcaaaggagcaggtagaggcgttcgcttcaatgtttaaacaacaaatattttcagaggagctcgaccaaacggtgcttgatcaatcgtttgctctcgttcgtcatcagagtaaaaaagttagttaatattcaccttcttctccccgttgcctgccatctattctcctgctatcatagattcggacccaatgctgacccccctttgtacctgtctcgatcgaccgccgaaaagctcttacacgatatcggactggaccttacattcctcctccaagacattcttatcgcaccccgctcagcttcatcgcataccgagtccaaagagaccctcttggccacttcccccacatccaacaccgagccgaactctacatccaactctactttgaattcgaatccaagacagagaccagcatcaatcgtacctttagcgtctacaacatctggtctttccttgacggccgttactctacgatccggatcgacggacaaacagtcaacgactatcgtaggtaatgatagtggaagagacagagaaagagatagagaggacaggaagagcgaaaaggaaaaggccgggcagggagatgacagagaggagagcgcgttgggcgcgatactagaggacgaaggatttgcttgaacgtcttttggattcagtccagcccggctctggttagcttgtacgataattgtcgttgtgattttaactatgtctactctttgcaagaagattaataacggagagaagagatgttcatgcgattgcaatgattgatgatgaagaaatatcaagaaaaaaataaaagagaacatgggtagaagaagacttcggaaagaaataaaggaaaggaacgaaaactgaaacaaacccttttatggctacagatggatggaaggggggagggggagaagggaggaaggatgaacgaacaagaaaaaaaaaacagatatatagagaaatttcgagatggttgagatctagggagagaaaaaccaacgacagcacaatagaagagggaggaaaggttaacaataaggaagaaaaaggtagaaaagcacggcctatcatgtccatgaagaggaaacgaacactaagagtgaagatggggagaacttctatttgtagaaagtggaaatgaaaatagaaaatttaagagcatttccagtctgaagagggccagatttttcttgtaagaaagaaggaaaagagagaaagaaaaagtgcgatattgaaagaaattttgcggagaaacaagaaagaatagatgggtacaaagaaagaaaacggcccaccaatctatctaacctcgtagttaacctcatcgtttctgatgctaggttttctagagagaactgccggtcgattcgtccctgtcctcatcgagcttctcctactcacgcttctgcttccccgtcgactcaacgtggccggcgtgtttgttcccgagctcaaggcagagtctccgaagctatcactgttgaagggttttccctcggtcacagttgatagagggttcagtggagatggaagagacgggatcgacgacatagaaagacccgcaaatgcatgttgcatctgtgcggcaggtcggtggtcgggcgctccatctcgaggagaagcagccgactgaataacaacagaaatttcagccaaagaggtcttaactatgaagagtaccaagagaggctcacatctggagagtcgaatccactttgagtcaagctaaagcttccacttcggctccttgtctcgatgagcttgagagcccttgcctcgatgagcttgtcaaagtcgccctgaagttcttcttcggtcggaagagcattcttgattggctcctcctctggttcattcagaagtacaacaagaagaaacaagaacagtttcggaggacgaaggggtagatcagtcctggatcgtaagcgggttcgcttaattcctttcctacgtttcctcggcacggctattctgccgggtgccgagcgaaaggtaatcttgtgttgaatcaataaaaatgagcagtatacgcactggctcttcgagtgaactcttgttgaagtctagctgagacagctgcgacatcgaggtctcctggactgggtggctctggtgggggaggaccacggggtttcggcatcccggcttttcggataggagtttaaaccgggccggaaaaaagacagtttagggagaaaaaaaaggaggaagggcgaaaagagaaagatgttggaggaagaaagcaaggagatgaacgagacaagcgagtcaaacaaaataggagccaagacgagcaagcgaacgaagaaaagaggtagaaaaaataaagggttcaagtcagccgaattgaaagagatggtcagatctcgctaggttgagttcgccctgacgtcagatccaagatataacgaccaaggtttttctgccatctgaagagaagaagggagaatacaaaaacaaacaaacagacatacgtttctttacggtctgagtagtaggggctgtaggagcagacatcagattgaagaagatgatggttgatcgatgggtgaggtctgaagagttgttgggtttgatggcggtggatggttacaaaaccggactaaatgtatgggatgcgtgttaagtatcacgtgttctgaagcttgtgttaccaccactagctgttctttccttcaacctcttatgcttatccttccattgacatcatgctctgtttcgcatggttcatgcttcactctcttcagttctcgtggtcgcgaggctctctagcttcataacatgattatatcaaatagcaggccaaatgcgtgagataccccgatacaaaatggggacgctctcgcgcctccttggataaaaggtttgtccaagctgagatctctgttgaaacctcctatccaaagaatcttattgatgttctagtctactttagttctagagcccaagtgtcacatcgcgtgtcaaattcagtaacttggttactctaacatccccgtgctttacatccgtaaccaaagttcgatctcgacgcgtaatcttaatttctgatgtctccgtctcgcatagatcggtcgttaaacaacccaacacgtttgaggacttctcaccttcactcattccacacctatttggcactagtacacacacttatacatcatgggaattaaagggctcaccgctctcatatctgaacacggtcagtttcgttttctcctcgtgtcattgtaacatttgagaaaagttcgttcatcgagttacgttcttggttctgatccgaccagctcctcgagccatgtccgagcacggtcagtatgctttattgttgaatcgattggatattctattgaagcagggattgtgcactgagatgtacttgttttatcgttatcaaccaaccacagacatcaagacgatgttcggacgaaaggttgcgatcgacgcgagtatgaggttcgtcttttcttggcttctcactcgctctcttcattcatctgcctgaacgatttagctcaccatgtattgattctcaagaacagtctgtatcagtatgtatctaccctgatttctcaccagaaaacccaggctcatagctctctttctcatacttcctccttctcaggttcctaattgccgttcgtcaaaaggacggtgaaatgttgatgaacgagaacggagaggtcacctctcacctcatgggaacgttctacagaacgatccgaatggttgatcacggaatcaaaccgtgttatgtgtttgatggaaaacccccagagatgaagtctggcgtggtaagcctctagtatctgcttgatcgtatcttcgatttgggtactgtactgaaagcctttcacaatcatgttgcgattgcatatagctcaaaaaacggttcgagaaaagggaggaggccaaggaaggagaggccgaggccaaagagacaggttcgtccagcctgtatctatctatctttcgaataagctggcaagatatttacatatattcgtctgccttttctgctctgtcactcacttggacaaatttgttctgatataaactgatcaggtacggctgaggaggtcgcgcagctgaaccgacgacaggttcgagtttcaagagagcagaatgaggagtgtcaaaaacttctgaagctgatgggtatcccagtcgtgattgttcgttcctttcctgtattgttatcagcatatcgcttgaggtgatgattgatcaattagttatcttcacaactcgttaggcgcctggcgaagccgaggcccaatgtgctgaacttgcgcgcggaggaaaggtaaagccctgctaccttgacttctttgtgtctcttttcttgtttcgttcatcattgctaaactctccgtctggcttcaataatgatttaggtgtttggggccggttcagaagacatggacaccctgactttcaattcgcctgtccttcttcgacacttgaccttttcagaggcaaagaaagcgccgatctctgagattcatctagataaggtcctcgaaggattggatatgaaaatggaccaggtgcgctcaaccttacaattagatttcctccctctatctcttttctcttgtcgttgtgcaagtggaaggtttgtatcttgacaagaactgcttaccatcatccatggtttctatttagttcattgacctgtgcatcctcatgggttgtgattacgtcgaacccctgaaaggtgtcggaccgtcgaccgcgcttaagcttatcaaagagcatgggtccctcagagccgttgtcaagtttatcagggaccagaaagctctcagggatgccgaagaagccgaagagtctgtagtggaggaggaaccagaagaggacagtatcaaagagaaggagcatataacagacgacgaagagaagagagttatttcgacatcgagacggacaaagaacaatcggattgaatcggatgaggagggggaagagagcagcagtcctgtcaaggatgggaagaagaacagcagtcaagtcagaatttcctctgaatcagactcggaacctgattatcagttcaagcaggaagatgagggagaggaagagctctccgctgctgaatttgaaaaggacaccaacggacctgcaaaagacgaaatgaagacgaagaaatcatcggtcaagaagaagccagccgaaaaaaagggaaccggagcaaagccaaagccaaaaagtaaatcaacagggaaaggaaaagtcatcatcccggacgactggccatgggaagaggctaaggcgctgttcttgaagccggatgtaacaagagcagaggacgttgaggtatggtttaacgcttcttgttgagaattgacccttgatcgctgatccagcgtttaatctgattatatctgtttttcaggttgaatggtctgcacctgatgtcgagggcttggtcgactttttggttcgagataaaggcttcaagtatgtgatgtccttcaatgtcttctctacttcctctaatctgactcaaaggctttctaccctcgtcttctctttatgaccgtaccacctcgttgaaaaaaaagtgaggagcgagtcagaaacggagcatctaaattgcaaaagaacttgaacgccaagcaacaaggtcggcttgatgggttttttaaggttgtgtccaaagcggacgacaaaaaggggtcggttggagctggtaaacgaaaggtcagttctctagctgtttttcttcactatagtatcgtctcttaactttcttcgcgttctttcccttctctttgaatttcccaacgccccatctacctgttcggaattttcatctgaaggccgacaccaaggccgagagcggagcgaaaaagccgaagacatctgccaagaagaagtagggcagagagcccacctaatccaaagatatcttcccttgttcaggacttccgcgccgttcttaatttctccctgttctattctgtgtatcttgctccttgattgagtaacagcacggttgtacatttctctcctcgatcgatcatgtatttttctgtcttgacgtttctctaacccgagaacgaaggaactggaagattgtctgagaagaagctttaaatatccagcatataaacaacagaagaacttcttttgagatcttctttctgggtccctctctccagaaagatagagacgaagattccttctgagctacaatgaataaaatttagagacaatgtgaatacttgggaaagaagagatatagagaaatagtgaaagaaagaacagatttctcaacaaaataaacttcaaaatcaaacacggtgatgaggatttaaaagaaaaggaagagaaatctctgtaaagggcgaagagggcttggagcataatatcaaattacagtgattgaacagagtaagagggagcaagtggtaagaaggaccaaaagtgagaaaaatccaacacacggacacgaacagcagaaagagataggctagagactttgaaccctcatccaaagtctacttgctgctctcaaatcaatctccttcccgggaaattctaaacggtcaagacgtttcccgaaccaactgtctcggtcgagtcagccgccaggaggacagtcgaggccgctggttcagtagagatcgaagaaggctcagaaggagcagttgccccgttcgctccaggatgagcaatcgcaccttccaccggtccgatctttgattccaaaaacctatctaacttaactttggcaagctttcgatttccctccgaaagagctcgcctagtctgaccttcgtccactgtcaattgacgggaaaagaagtcctcggtgtcgggcacgaagaacaatttgtaggatccaatgcagaccttaatctctaatccagactctgcgatgtacccagtgcttggagaaggaggcgaagcgagtgtctgcatgtttcgctttaagaatggttgtttgactcgagcaggaagaccctcagtaggatgtgtctaaagatgaatgaaatgaagaaccgcgcgttcggctgatcagcatagggcattgtaagaaagacggtaagatatctacatacaaggataaagctggcgaggtatgccttccatttctgttcggctgtaatcgcatcgtccaaagtcaagtcgtctttacctaagagctggatcaaaagtgacttggatccatcaacctaatttgagaaaagcaaaaggtcggatcgttgtgtactccatcagaaacaggactttcatttcaatgacagtaaccgaagacttacccattcgactcggaataagttctcgtcctgaccaagcacattttctgcactcattcggtatgatatctgttgtctggcggtcgtcacttccagattacgatcgttgtatagcagcgaaagaagctcctgtgatcgtccatcacctagcaccgtttgtaccttttgttgcgacaataaaagacagacagatcagctttcacatcttgctagaggtaattgctaggcgtcagaaaggaagtacctacctgtttgacaattgcagcaataagcttgtccagcgtgaagctgacgtacgccttagtaccatacatatgtctcatgttttcctcaaatccggcctggtcaatctcgttgtcaaacaacttctcgcacagatccaacaaatgctcgtaaaattgggccggagggttggagccttccataagggcgggcgcaggacctccggcatcattcaaaccgagctcaatagcgagtgggttaaccaaagacgaaggaggttcctgtgtcgactggactttcgccacggccttcaaagtcgaaagtcggttgtacaacatctaattgatgggttacacgatacaggcataatcgtcagcatcaaaatggtggttagaagggttgaaaagaaaaatgatcgacatttgagagagaaagacagacctggaacagtcggaacatgcagtaaaatggggtgttggtgaagaagtttgcctttctcgaaggctgtctcggcaatccggatgcatccatacttcctgccggggacgaagcccgagaatctccgtattcagacgtccctggctcgtccaccgagatccatgtcttctcccccgggattgtctccgctgtcgttggagcagactgctcattggtcgcagccgcaaccaccgaagcaggcacaactgatgaaacgtcctccgaaacgttggtcatagtgacagcagaagcagcagtagcatccaccatcggtgtaagtgctgtatcgacatccatgctttggtctccttcaggagcaggggccgctgaaggagaatcacctgctgtgtgtggaacaccagactcagatggtccgatagcagtcccgttggcgacggcagcctccaaagcggttgtcacgccctccgcaagggaagtaatttgaacatccatcgcgtctggatcctccaagttatctgtcccagctggagaggcagctgaagtaggcgtcgaggtcgctgatttgcttcccgctttactggctgtcgctccaggggttactccactctgtccagaagggccggcactattattggctccattggaagcaccaaccgcgcctttgaggacctttcgacgaagatcacttgccttcttagatcgcctgtttgatccgacggacgtaccgtcatctctgtcgtcggtcgcactgcccccgtcgctaccatccagctcactgtcctccccgtccgggccctcaccactcgagccagactcacctggaatgacaaaggcagaatcgaactctgctctagggaaaagaaagaacgttgggatgaacgctcgaagaaaggattcgacacgctctcggtcggtggacgaaagtccacctggcgctcgatcgagatacgaaaagatgagtttaagtgaatcctggaggcaatccatatcgtcgatcttaaacgcgtactgatactttggtttaagactcaaggatgggtcgatcaaagcatccctcctctgaacctgctcctttcgaagtgcctcaatctcggccacaagtgatttcgtggtgatggccttcttatcattcgccttgaaggtcacgccctgatgatcgagagacttgtaaaagttcttcgcgtcaacctctcgccaaactttgttccactctcgttgggcccgtttccattcttcgtccttttgcttcagtcgagcgagcacgaccggtacagctaccgtcggattgtcgtgcaacgcgccaatgacttccaaaccggcgtcccgaccgtagatcttcttgataattcgctggtaaatactcttgctctgacctccaagtccgggttttagtcggaaaaccgatttttcatcaggcgacatgacattgatccgagcagcgatgggttcaagtaaagcaatagttcgcaagttggcctcgatatgatagtcgtactcgtgtcgctcctcttcagctcggtgaagagcctcctcatagatgttcttcttgtgggagatgaatggcgcagcgtcctccgaggcggacgtcggatgggacacccactcgtcgttcaaaacgtcccagcacatgggatctcgaccagagcatgataagttgacctcctgggtgatcgtggggatgggagtccaggtcagcatgatacttgctttcggatgactctactctgtcgaaatactcaagaggaaatatgaaggaagagaagagacaaaccgttttgggtaatcgacgataactagcaccataagccttgcaactatttagatcaactctcggccgatcaaccgccaggctgttctccattacaccatccaaccctgcacctgctccaaggataccaccactgccattcaagccatccctaccactaacgccggccaaaccacctcgtccagcttggtcatctccgacaagagatctgaattgagtccatatatcaccagcctcgccaatgaagagcgcagctcgctcgacgagcactcgagagtcgatgatatcctgaacgaacaaattgaggagcttgagaaactcgaggtaggtgttcttgtcctcgatgaactttttggctcgttcgaagaacgcgatttcgtctggcgaggcaagcgaatgagagttagaatgtccgctgacgtgagtatttggcggctggacgtgcactgggtggacgggatagtcctctggcgggggtgagggttcggccttgtgatgatgtttcggctttttggtctatattttggaatgatccataaccaggtttgtaagttgaagccattccgataggaatgtggtcgtgagcagaagtcagaacgtacccttgcagccgaagtcttaggatccttttccgccgctccggcacctcgcttttttttggcaggcacaccatcctgcgggtctttcgactttgcgccttctcccttggccgctttgtctgccttcttggccttctctcctgcccgatcagctttggcgggcctacctccgtcggccgatccagtggggacaggcacgggtgcctggacttgaggtgcggtagccgtttgggggagtgacatcgcaagatcggattgcatgccagtcatctgaccgagcaggttgccaaacaggccaccagacgattgagcaccattggaagtgtcgggcaagaactgcttgaactcatcaagcaagtcaggcgcactcttgaagaggattgtaacctgggcgtagacctgataaaaatgagaaggacacgtctaaaatatcaacagatcgttttggaattcaaaagaccgacgacagacgagggcacttacatcttgaatgggcctctgttctttctggtaggtttgaagaacctccaagaattgtttgtatgtgtctggatcctgggcataccggtttttgatcttattgacataattgatcgcgtggttgaactcaacctgaggctgtcgaaccgcttgagggggctgaactccttgaattccaccagagagcacctgagcggctcctggtgtggacactccagactgggaaggaccgagtgagtgggtctggcctagggagggaagcgactgctggtgttgttgaccgccaggagttgaagcggccgaggcagtctgtgcaggatttgacgcttgttgttgttgctgttgctgctgatttaacccagggttggaaccgaaaggtcgatcgatgccttgactatatccagagttggccaccccggccggacctcctccggcagccgacgggtgctgctgagtatgttgctgagagcctggggttgcagcagctccagcagcggctacggccgcgagtcccgcagagaattgtcctgcaatctgagacaccgttcctgtcggggtgattacagtgatgaggcctctctcgtcgccttcacctccgaggcactcgatccgatagccgggaggcaggaatgtgttaaatccctgaatcagcgatggatgaccacgaaatagagacgatactcgatcgatcacgccaggtgtgtcgatcctatgaacatcgagttgaagcaagaaaaaccagtatacaagacagaggaggaacggtgatccaaataagaaaggggacgttaagcatctatatgtatgaaaatagagacgggaaaaacgtacatctggcccttgaactctttcatcacgtccaggaatcggttgtagacatctggctggtcagaaaattggacctgaagggagaaagaaggacgagacgagcagaagaaagtaaagaaagagcaaccgagggtcaatacaggtatgagaaggaaagggaccggtgctaatcaagatggtgatatatcctgaaccacgtgtcgcacagaccaaaagctgtgcagctcgctcaggctagctcttttcactctaccctcccacggttgagacaaccggcctggttggtttccttgaagcgcttccgggaagaaacgaaggatatattgcatgtaaacagagagataaagggcaggtttgcctacttactttgacttgatcgaggtatgacagcgcatctctactagtcagtaaaagagagggcaaaagtaagagggatctgtcaataattatgtagaagagacatgaagaagaaagagtatatgtggtaggagtatgttgctggcgctcgatgatatttcgaagggacgatcagcaagcttatcgaacatcggtcgacgataggcggcatgcagcacccatccatcgatctcaacattacaaagagaaggaaaacccccctgacttccacgcgatcgatgtttgcgtttccgattgatacacatagagggatggcatggagatgtgaggggaatagggaaagaggagacagaaatgaagagaccaaagacaaggacaatgcttcgtgagtgactgacctaacgttgagaggtcgatagtttggtccagccatcgcgctggctgaaccaggggtgggagcgggggaggctccggtcgaagccgtaagagcgcccggcgcgcctggctgagttggcaaaccagagttggcgccggtgccaggcgccgagagagatgggggagctggagctgccgtggctgaagagatagctggttggatgacagaaggctcggagggagaagaggatgctgacgttgattgaccagcagctactgtttgttgggccgatgggatttgtgtaggaggaaggggaggaggcgcgggcgctgggagtagttgcgctggttgttgagatagagggttaggtggaacggatgtcgagatctgggcagagggagagtgggaagaggccgggttggtggacatcgacaagggggaaggagaagaggaaggatggatagaaggggatgatgggaaggaaagaagaaggaggaggaggaggaaggcgtagaaggcaaagtcaggcgatagacccaagggagctacttgaacgcgcagtcagggcttcccaaggcacacttgcacgcgcagctcagggcatcacgccagggttcttgctgtttcagggctagttcctggtcactcggatcagtacgcatctcttctgtgcctggtatctggtcatactatctgatgatggactcagagaatgagtaaaagatcgttggaagaaatcaagtgaacatacttcagagcgagggtcataagaagggctgcaaggggaactatgagaagggatagaaaagacagggaccgccagaacagaacgatagcaggcccaaaaaacattgggcaagactacaggcaaacattacggaagagactaggaaaagagactctgtagtattcaaggccatctctttttctcttccttcacatatcatctctctacacgtcgacagaaagacatctgccttctttctttctgtggtaagtacattcacactcaattcagaaaggctcttcttatctgacaagcacttttagtctatgccgtccattaccgaactgccagccgatgtggaacatgaggaagaaactggactaggaccaacagaaagctcgctccaagagatcttgtcttctaaccctggatcgggaccctttccgctcactgagcataccgtctggcttctctcccaatcgttcgctccctctcggccggttaagataagagccctcgggtttgtcgcactctctagattatcgactcaaacatcaaccgacccactcgtgtcgacagctactgctgccttcagcccatcaatcgagaccgctctgctcaccgcccagccaagggccttggtcgacaccctctctctcctcgccgcgctcgtccaggcatgtcctttcattggtaccgctctcctcaatagacctggcttgattgagaatctatacgatctcaccgacttatttccatcttctgctacctgcgctcctgacgatttatctgagtcgccttctcatctatcttcttcgcctccttcagcaatcagtcccgactctgttcttttaggcctgactgaacttctctcccaagcggctaactcgccgttaggcaggaaatcgatatttcgttcaactgacgctccctggactacctacctcgaaaccctatcttcccggtcgtccacctcaaacgcactgagagcatcgtccgcagctgctctcgccaaactctccagaggcaaagaagccgacaagccgagtgacgctacatcctccaccgtagacacatcaacctcgagccattcacctaaagataatgcagttcaagacgcacggctagctgcgctcatgaaatctctaatcgtatctctccctacatccgacccgtctctcgcaccgttaaaatctactctggacgcgctcgaaacccttgcctttacttccctccgtcctgcagtaaaggattttctctctgccgatcgagcctttctccaagcacttttccgacttgttcctgccgcgcctaaaccgcgcgcgttcaatgagccggcctccatcactcactccgtcggaccatcgctacattcatccgatgacaagtcctttattgtcttctatggtgtagccagtgtaattgttaacctagtttcctaccggcctgcccgctctgctgaagagactcaactcgatagactccgaaggatgacgctttccggagaaaaggcatcatcatcgactggccgggatgacaagcaggtcgaggaagaccctttggagtcggacgaagcggtgaaaatccgggcggaaagactgttgaacgaaggtgttgtcgagacgcttattgtactcggtaaagcggaatcggttgttgttagagagacagtgggaagaatctggctgggcctactgacaaaccagaaagatcgaaagagaatcttgcaacaaggtggagccaaaggtacatatattcattcttttgacttttctttcccagttgagatatactgatcaacaagtaaacccgatgtgccatgaaacgttctcgatgacaacattcagctctgatctctctgacgagttctcttactggccggtcctcgtgtggccctttgaatggatcagccctgaatacgatccaagcgttggctaaattgctcatcactgaatctcctctctcgatctttggtccgacttatttgacctcctctgccgacccgatccgaccgatcgccctccttctactcgattctgcttcgagcctgcttcaacagtttgaggctctcatggcgctgaccaaccttgcctctgttcaaccagacaacgcctatagaattggtacctttgaaacctcgtcaactggaagcgtgctgagtaagatgttggaactcatgattgaggacaatcagttggtcagacgagcgtcaacagagctcgcatgcaatctacttgcgtctgaacaattcttcaacagcttcttaaattctgctccaacctcacaaccaccatctgtcgagtctgaaccaaaaacaaaaaacaaggagagcaagccaaacggaggatcaacctatcggcttcgacttctcatggcactttcgacactgtccgatctaccgactcgatcggctgcctctggtgcacttgccatgctcacttcctcggctgatgcttgtcgtattctgatcgctcggccaaaggatgaaggtggtgctagttcagctatcagaacgatccttgatttgtttcaaccaccttgctctagtgatgacagcgacaatgacgatgatgagcaagagacagaacaaacaagattagcggagagaatgtctagaggaccagatccaggacttgtacttagagcatcagtcatcctgattcagatccttgaatctcttcctggtgaaccatctctgtcggatgcgctcaaagaggagaaggcgaagcagatcattgtagaagcaagggatgatctggaaggaatgatgtctgacggaaagcagaagatggaaacgatggaagccgttaacgcttgtatcgatgctattgatgcttatggctcatgaacattctgacgactcggctacgtttcttttgcctctcattgttctcctctctttgtatcttttccattagaataacgaaaggatatatgaatataacgccaagtagtcaaatttaagctgaaaagtcatcttgagagagattatcaaggagaaagtaggtaaaggtcggtggtgaatatatagagcagtacaagagcagtaaagagagaaagacaagacagtagaatctctctaggtaaggtttaagtcgctctacctagccctacatgatggtaagaccaccaagccgtgatgaccactgtgacggctaagataggcatgatagtcgagacgattgttgaagctgaactattcttggtatcccgtttcaaacggaacaggtgaaattgatgaaattatataaggagttctcgtcttgagatgtcataaatctaggaatttgttaagaactcactagaggtagagagaattgaagttagagatgaaaagaccttttcctttaactgaacgcagagagaacacgaaagagcaaataaaatacaacgaaaagatgtaagaacgaacgacacctaaaaatttcttgacttgaggaggagagaatcaacgaagggaagaaaagagattgaactcactaaggcttgtcggccaagcaccaactatgccaaaagggactttaccggctccgccggtggttccgatgggaacaacaattacgtctaacggtgctttgattgccgtcaacgatttcttgaaaattgaagcgaggatattcttagcggcaaatgtcgcgtcgttctttgccttgaaataagtctgtgggcccagggaagctgcacagtcgccgatggcaaagtacgtcttgccgtcaaagaagccgccgtccaatgagggaacaatctgatttgacatcaccatcaagacaaggatgaatgatcggccggcacaagattgaagccaaagaacggttgagtagtcgagctgagtgtgagaacaaaagtaaggacggaaaagagaaagccacatcataacaaacgtactctcagatgagcgtcaaccttaacgagaccatttgggtcaaggacattagcatcagccgcggcgataagcgaggtgttcgtcttggtgccggttgtgttgaagatcaggtcggcatcaattatttttcctccacccagatcaactcttcctctgccactctcgactatattagaatcgacctctgtcccgagcacaacgtgtattccagctgcctcgagctgccaatgcagcttggccgctagcttggccggcacggactttgagagcagttgtgggttgcgatggacgatggtgaccgacttttcctttgggtactgtgacgcaatctcctgatatgcgggtaaggcagacgagtagagtgtacaccaaaaacgggacgccgcaaaaatttagaacaacgagcagcgaaaatgcgacgagacatgggctcaacatgagacgttggaaacacgataaacaacgccggacttactcctgcaaactcaatccccacgctccctccaccgatgagaacgatctgtctagcggccttgatttgatcttgtaatccccggagatgatccttgccctcctcgatcgagccagagagcgagcgcataggtgcgccgtagatggagccgagcgccagcacgcaatactgccgagagcagcattcaagaagttgaaagacggaagaaataaaaggttgatgcagagaagggaccgatcgatctgggtcagcacacaaccaaaacaccaagatagaatgcgataacgtacatcgaacgcaatctcagttccaaatcctttggactcgttctccacgtctacccacagggatcgctcgctcagcttgataaccttcgtcttggtgaggacgatatgtctggtctggtgtgccggtccaaagaagctgtcgagaggcttgaaaatcttgttctcccagccttgtatggtgatgagatcgagtaagacaaggagagacgaggaaagatagagcatgagttcagattaacacttaggttgatgaacaattcagtgagaaaccggctcgttcacctggaaccacggcagctcgaagtccagcgatagcatagtacgcaaactcgttggcgtcgatcagcacgatacggtgatcagagggcagctttttggcgaggtctcgagcgagcgaagcacctgcgccggactaaacgacattgccgatataaatcaaaaggattccaaagacggtgttgcccgagaggcgagagaatggcaaagaggaaggactcgacgtgcaagattcgaaagatctgatcgagacttcacttacagctccaacgaccacgacattctttagattagactctttgcggctttgcatttgtccttatgcctgagatgaattggtgtacagagtatggtaaggattagtgctccgaatatcttagaggaactcggcgtatcgagaactctcgagtgatttgagataatgtcatgttatatagcccagtagctcagctgtgctgacaaaccgaaaaaaaattcgttcaaatcagcgctgaccggtgatggaagtctgtctggccgaattacatcttattttgctcacccctcgggcacggtgtaaccgggggcatgaccgttggcttcgtatacgcgtctaatccccggttcggccttcgcttgcttgaccgagctcgtgcctggatcgtccggttttcttctgccctatgtaattctcgtccggtcgatataaaaaacctttccgagtttctttgctttctttcccctcctatctaccttctttatcagcccgatagaacctcgagtacaggcaacacagtatctagagaaccaacttgcaagaatctttgaacgaaagacaccctatctctctttttcccatcgacgtcactttttaggtcgaatcctaaaacggatgcccctcctgtcctatcataatcaaactcatttgacttgcgttcaggtgagactacgtgcttacgtcgccgagcgtatgcatgcatgtgctgacccgtcgggcccgctgccctggttattcgtctctgacagtaccttgagccttaaagcataaacaaacacaaacctttcatcaaaacatcggtagccacgatcatggtcaaggctcatgtcatcacctggtcgtcgactccccacctgcctggatctttccatcacgacccgccggctgacgaacaagagccggatgaatacacccgggctcaggatgtccggtgcttggtcccaacagaaatcgtctggttgatgggtctggcgggcttcattttagtaggttttcttttatggttctctttttcccctcctctactcagctcagcttcaagacctgacctgacctttatttctgctcaccattaaagtcaatattagctatagtgactccgttgagatgctacattcagccttgttacaccaataaaactgtgcccatgaccccttcctactactttgctcgcaaccgtccgttttttccacagcgacctgcttctccccaccgtcgtccctcaagcgcttcaaccatgtcgtcccatagttcgacctcgactgcctcgtccactcttcttgacactccaaattctgaatcttctctccagtccatcctgatcgtatctcaccctggcccttcaaccgatcgtgaaatgcttcctccgacaaagcgagtgtctttcaaggaagatctcgttcaacaggaacttgatgtaacgtttcggatggaacggccgaaaccgcctgccgcgccggtagatgtatgggcactggcggtgatggacgatctgatagtattggaggaatcccatacagaagaattttccagagcgaatgcacagaaacgaaatcgtttgacgaagaccctctcgttctctgctgtcagttattcatctccatctttcttctctttattcactctctttgaccgattgatgaaaatagcgcgctcatttcttctcttgatctgaaacagcgctgtccaatgacaagtcagagcccacctagactaagcccaactccaagtttctcctcgaccatgtctgatccgtcgtccaactctctccatcagacgtctgaagaatccctttctcgaggtcgtcagacccgaaagaacaagttgttccgcaaacgaagtaattaaaatctcaaactagcattcattcagtcatatatcctcaccatccgtcttagacattcatgcatcatttgtgagatcaccacttgtatttatacgactatcatcgatgaggttgtgtggtctgcctggttcatctcaacctatgtcgaatctttcaacaagaacttcatcttgaacaaagtccatcaattcaaaaaccgactctatgcagactacttatatgactttagtcactagaaagcgaaagcaaccgactctatgagacaacattcagtcgactgaatatctctttcacctgccgtcccaggcgtctgatcgcctcgtgagcactctctcgctcaatctctccagctctagttgcccagaatttccatctggcctccgaccagcctccttgacctccctcccagagcactccctgtcttaacgacctgtcagcctgtccgacttcacccaaacgtctcattggttcaccagctacctcgagccagatgagggctaactcaaggtcaaaaatccattcggcaagtgtttcgtttgggccaagaggtgactcgagaggtgaagatcgaagttgccaaatgaaataactatgggtccatccaaaacagggattcaccgagagatgggagagaaggacggtgagcgatcggtatgcagtgaaagaagaggcgaagcggatatatatctcttctgcatcgagcttttgaagatcttcagatggattaacgttctgtaaaggacctaaaggataaatcaacatggaggagagcaaggaccccaaaatgttgtgacgtgacaaaccattaaacgactcccggatatgtgattcaaacaatgggagatcagcccaatcgaacttaacgccccatattgttgcctcagaagttattttttgctcagtaagagctaagagaagctcgaccgctcgtggctcgtgaccgattgcatttctcaacagagaattccacaatgaatcgtgagaggaccacagaaatgattcgacagagaagaaagtagaggatgacgaagaaagaagagtgttgaaatgagcggatatcttgttggctgtatgtggtgctgtatcagtaccttcaggacagaaataatctacaagaatcgcgttgatgatgtgcatcccaactgttggtgatcgatgcctgtatatattatacctagcaggccttaggcttggtgagagcggcctgaactgatggtggtcgatacatgcgccttttggactggggtaaatgctcatcaccaaaaccaatctgttcatttaggagaatgacactggctgagtcatcaaacgcgtcgcaccacacgcgcaacaaacctcatttatcacgtcctcatacgcgtcttcgaaccgtccgcttcctgttcgacaatacttccacgatggaaaatgaggcgtatccttcagatcagccagtgacctataggttcatctgaggatcgaatctttttttcactatacccaagcattcttctgacattctgctctttctttatttcgaacgacgaaaggcacctcctctccccccaaacacttggaccatcaaatcccctacgagtcatcgctcattgcgacgtcgatgctgcttatgcccgcaagtatcgttctcatatatcgatcaggaccaggttttccaaaaagactaaatttatactgttgaaccttacagagttcgaagctaaacgcttagacctcgatcggagtgtacccattgccgtccagcaatggtctgcactggttcgtgtacaatcattgccctttcttcatcatatgcccttcagttgaagagtttcagcttgggtctctacttcggtcaacctcacagatagctgtaaactatgccgccagggcgtttggaataactcgtcatgaaaatgtgtttgaagctaagaagaaatgtcctgagttagtatgtgttcatgtggctacgctcaaggacggagacgaagagccgggctaccatgagaagcccaatatgaataccgacaaggtttgtcttctctcgcttccagatgaatcctctttgcgcatatcaaatagataataacctctttcaatgggtaacccgctaaatcaggtgagtctagaaccatatcggcgcgagagccagaagatcatcaagttattcaatagggaggcccccagcggcgaagttggtacgtagatgttatcatcaaaaccaacctgtcaatattaggaaagcacacttatggttctgtaatatgtgaaactcggtcatcgttaagaaaaagcctccatcgacgaagcgttcctggatctgactgtccctatccgtaccgtccttcttgagaaatatcccttcctttgtgctgtaccccccgattcacctcttggtttggatacgccccttccaccggcaccgactctgaaatggaaggagagaccatgggggatcgtacctgtgcagacagagctaggtaaggatgcttcagatgctgagacgcactcagaagcggaagccgacaaaagttgggcggacgttgccctctgggaaggaggagagatgcttgacagaatgagggaaacaattgagctcgaattgggctatacgacatcagcggtacaaaaatcgatccatcatctctgtttagtttgtctcctcggagactaacgtgaaaacatgctttctttttcctaccaatcttggaattagggagtcgctcataataaagtcttagcaaaattgtgttctgctttcaaaaagccaagggcacaagtgagtccattgctgagaacctcttcgtcagatgacttgcacctaacctggtggtttcttccacagaccattcttcgtacttctgccgtttctcaatttctaagacctatgaactttcaaaagatccggaacttgggagggaaactaggtgaagtaatcggtaggtcgctcctaatgtattttctccactctgatctactctcagatcatagacttaagccaacatggtgcgcatgcttatatttgtgaatgtaaattcctttagctgaaacatatggagcggctaccgtcgaggatcttctgtgcgtattgcttccttgaggacttctctgctctttatgcgttaaagcaattaaagacgttgataccacccatttgtcactatctatgtaacaaccaggaagatagaccttggcgatatgagaaagactttaggggaggactcgggttggatatacaatatcttgaggggaatcgactacagcgaaggtatggttaacatatctgtttcggtcgtttttgatctttttctaagtgctccgtttccgataactttgaattgacaccaacggtatacgatagtcaaagctaaatcactcccaaagtccatgatggcatccaagaacttgcgtccgtatctaacaaatatggagcatggatcaagctggttgcgcgtactctccgtagagctgataggcagattgaaagaagcgagagaactagctgggctcgatggcggggatggagccggaggagtatggccaaggacacttgttttttcttggagagagggtatggttaatcaatgttgatttgttatttctcgaacatgaatactgttagctgaacagccgtcctactttcatatgccttcaaacgtatacctagctggaagcgcctccaaatccaaacagatcccctttccttatcacagtccgctctcagcctccggtcccattctaacgttatcaatcaaacttttgtccgaagttcttaggcctaatctccgtctcacctctgatcgcaaacaagtccaaatcaacaatcttgccttaggatttactcaattagagagacttgagactggtcagagaggcatccagggtttttttgctatgcctatccaggagactggaagcagaactggagagaagcgacgaatgtcaaatgagaacgaagaggatcggagtaaacgacctggatctggctggttccaaaaggccccgatgggctacaaagctcatttgggagctccaccatcgacctcatcatccttagcatcctcctcttctctttcaacagcaacagacccctatctatcaattacaactccgctcgatagcgctgctgtcgacaaaattataagaccaggaccgtctgttcttgcagatcttagtcaccgctcgaccctttcctcatcttcttcttcttattctttcccatccgtgccgcgaccttcgacaaaacctatatctgcgtctgcctctgaccctggctcttcatgctcgctatcttgttccttctgggtgtgccctgaatgcaaaggacggatatcgctcgctcgagagatcatgattgatttcgatccagaggatgaagcaagggagagtgagcggatcaagtcggagcatgccgattggcatgttgctttgaaactccaggccgagttcgaaggcaatctgccccatcagaacggtacagatgttggcaaagatgaaaaatcaatcatagaaagagaaggaaccgggttcggacggatgggaccaaagggactgccgaaggtagtaacagcatcatcagacccggatatgtcgaagaggaagtctggagaagttagtaagccgagtcggaagggaagcggggatcacgatcggagctcaacaggatcagagatcagaggcaaaggtggattagggaaatggctgattaagaagtgatcttttgaacgaacgggatgacaactttggtcccgggactttggacttttcgaaagatggcctatgctgagtctgtgtagatggaatttcgaatttactcgaattatataaataataggcattcatctacatggtttttgaattgattgtatacagccagttctatctctttgtcaacgacggtaaatgggctcggtcccattctccctctaaacccatgggtccttgtctggcgcaccacggaggtctgtaggacgagtcaccctgccaatattgtcggcatctgagagtgtaaccagtggggactgatgaagaggtgaatcgtattttatttcagagaaagaccaaatggattcaaggtgtgatcaatgatggtcaaaagtcaaatatcaggatagaatagagacaaaaaggcgaatccgtacaatgataacccctccacccacgattgtggccatcccagaggcgaagcatcccgtctacctttcgtgtgtttgttaaatgagtcctagcgaatgcaaagcctagcattgcttttcgctgcaactcttcttcatcctgaagagcatctttgaggactcggttgatgtgctattcatgatcagagcgcgaagtccagatatcagatctatgcgcgcaagttacgttctcattaggaacaaaacttacttctatcgaccagtcttgtttcaactgcgtagataaacacgaaaatggttgaaatcgtaagagttgagacatcgtaagaccaaaaaattgacaaaagcagagggtaaagcagacctcgatcataaattcacagatatcttcctctttgtctgtaggataatcccctgctactacacacccactcatgaacgcctgcgcatatttccgaatcatcttccgctccagcgatgagtcaaacttttaatgatataggaaatcaacatgctagaatgtcaaaattggtaaaaaccacgaaagtaaggacttacgatacaaattcgagtctccctcaacgctgtagcaaatgcttctcgggttttttcatggtttttgagcagcggagatttatcttcataccattcagggggctcctcaggggttttagtaggaagttcgtatcctaaaatcaagaagtgagaccaaaggttgagcggtcaatttcaaataaaggattgttgaatgttcgactgaaggaattataaagaagaggaaccaggaagaaccaaccaggatgctcgaaccaggcgatgtcagttgacgatccgtatccttttcgcgcattagtgacagtagtccgaattggatacaaacttccatcgaagccactgatgaggatagacggtgattgaagagttggagtgagcgcgcaacgagctctattatcatcatcagcaagaagctgagggcatgcagatgagatatgacatacaatccttgcacgtcgacctttttgtcctcccatttctcgaccgggtaaaagctagaaattcaacccatgaagcaatcagtaacaaatcgtccactcaatcctcacaagtcgcgtacacagatgaataatcagatatgtaacttactcccaccgatttgctgaatcaggggaatgcccaaacaggtgcatttctattcggttttatcagatttgagtaagttcaatctcaaacatatgaaacttaatagcggacgagagtgatgatagtgtttcaaacaacgaacgcatgccagggaacctcttattgattctctcagggtgtaacatatccatctacgatttttgtacttgatcagaaaataagaactagatcgactgaacttggtttggaccatagacttacgagttcatgtgggtatttcaccaccgttatctgcgtttcattatcgaaggttttgaacatgagtgaaaattagatcagatagtttggggtatgatcacggtgagaggccgactcaactcacgttgagttggcgagcatacctggagcaatttgagaccaaacagttcccagatcatcagatactgcacatttagcgaaagctcaaatccagagattgattgcataccacttgtttatactagatgcaatcaatgtatcagtagtaaaacagagcgaagtttagcttgggctcgcgttttgtccaaagattacccacaaaacataccaatcatcagcatgctttttgtatgataatcaacgcgaaaccctcaaaagtcagcaacaagcttatgtttatgttagtatgatgaagaggaatgagggtttacgcaatctcctaattgtctacgcgcgtcgagtaaatgtggaagatttaccgtaaataaactgacgaatctatttcgatgctaatcgtcataccgcgagaaagactgagaactcactgggcaaatatagttccacatcccgggtgatctagtcttgggtcatcaactttactaatttacgcagagggttaatatgatcagactctgcgataactttcgagctgatgactcagcttgactcacaagatatcgctgatagtccagaccaagtcgtagtatccacatccgacctctcctaggacttttgtctcttccggtccgtcccgtttttgcctcttctgaaccgcatgctccatatgagacggtatggccgtatcggaacgctcgataagaagccttcttttcgctaagttctctgaaagcatgagggaagagtcccatcctttccagcccggtccccaggcgtcttgataagagggcgtgatcagatcgtgcgaaagagtcagatagtacaaaccatgagcggagagagataaggttgaagtgaaaagaagctcaccagtttctagatcaggatgagcgagcgctgcagaaatgagctcgggtgtatgtgtattcattcgagtaatataatcctgaaagtctaaaacatatttgaaaagagaacaagtagaaagaattcaacgatacgtccaatccaacaagatagcatcgagactgttgtatcatactaacctatcaaggccagaactctaatcttaccatcctttcccctgcctcgacgtttgatgtcgcgcattccggctccctcgcctgccttccaatcccagggactgacgtcttgtcctccagaccaccaccagcttccatcctttcgttcaagatctctccaatacgcaggatttgctctgagtgccccagcaggaacatcaaactgtgccaggtcgatgtctctccgaagctctacacgattcgaccaggcacgaacaatgtcccacaggacgaaaagagtcatgataaagaacgagaggagcgacaacctgacggcgatatgttgaggagacgacgaagctcggagattaaatattgatgagcgacgagggaacagtgatttcctatcagaacgcgtttcgaagagcgagtcatacgacgaatgtgcaagaggtaaaggcccagacgccttgtgcttatcaaagaggatcatggcttcctgaagacaaggtcaacctgttgagaaactaatcaaatgaaggtgtccttgatcagacggatggactcggtcatttctcacctacagatcgaattaaagaagaacggaagctcacatgtcagacgatggatgactgaaggaaaggtaagaaaatcttgcagactgaatcccccatccttctcaatcaatgatagctatctgacagtcattactgtttgcccggcacaagatcggagggcatgaatgaggacgctgcaattaggcacagtcttcagtatttcactgtgccggaagtttgatacaaacgcgccaagaggaagaaggatgatcaaaacaattctccgcgtcaaagcaaagtctgttgccccgcatgtaccaggttagacgtcaccggcgatattaactgtatacattgattatccgaacagctgtcaaggatctgaccgagtagtataccttgtatgcaaaaagcatggtgagaataatcccaaccaatggtgatcgatacatggcccttttggactcgggtgtcctcagaccacgaaccaccaaggtcccatggatcatgggttgagtttctgctagccttaatgccagcctcactagcaacagtgtcaaagcccagcattcttgctccttcgttcttttcctggtgcagggcaaggtgcagcatgttgcgtgatacgttcaaatctctgttccaccaagtctgagagcatgtatagagcacagtgagcaattgacacataatcttgaggcacgcaacacacatcacttactcggcagacgctgcgacactccttgatcgcccacactttgctccttccagagaactcgccatggcacttcgagcacaccctcgatgtccgaaacttccagactttgcggacctaaagcaacggaaattccctcagcgtggcatacatcatcttcacagggccagaagcatgcccatgagaagacgacgagaaggcgccgtcgccgaaggccaggaaggtgcgtggacgtcctgctgacagacggagcgccacctggtggtacgcttgctcgcggctgatgtgtgcgtcccagcggagacgtctccaccgtcgagcggcgaagaacgtcgcgagcgaagagtaggactgagagtgtatgacgagagcagcgcgaagatcatcaacactgtcagatctgaacgaaggaagatctggagaaagacatcggagaaagaagccgaatcaagacaccgagatgggcaaggtagtctgcaaggtcagtaaggctgtctatacagtcagcttgaacgtgagtgtgaacgtgagaggcactcaccacggagagtggttgacactttcggatggttcttcatccacagccgctgtttccgagcgtctcggattatccccgtaaggtgcttccatgacttcagagagagcgaccactgcgtgccgtgctcagccagaccgccgttgtccagagacatgtcgagtccttttgcggtcgtcgatagcagcgtccgacgacctgggttcagccccacgacctcgtcctctggccgcacaccccacggcacacactctgctcggtgacgatccttgtcttcgccctcccatctccatccgtagtcgtcgatgccagatcaagacgacatgggtctcagcattctggcagacacaccgatgccgtccgtactaagggacatgtcgaaatgtcgctttctggtcttgactttggatacataaaacgactgcctccatcaagcgtcagagtcatcccggaagaactcctaaatcaccccgcggatataccccacatccgcgtcctccaatttgagctgggtccagagattgtagagagccatggtgtctacaaagacataggacgaccggtggtacgagagcggcaggagcgagaacaggcgcaggccatgcccccggcaacgagtagtccgtcttgcagccgcatcttgggggccatgttcctcgaagatggtcagtatccggtacagagggcggagatagaaacaccacgaggccttgatggccttgcctgtcagaggcaaacctccgaagatgtcatcagtgaggaattcgaccaacactcggagatgagcctccatcaccgtgcgctggtcaagaaggaggagtttgagaagccagggcggggccaccaaggatacggcagcttgtactgattcctcctctgtatcattttctctttcttctctctcttcttcctctcggacaggaggggacagttgctcccagagttgatgggagagggcagtgcgctgagaacgaacagatggatcagataggtcagccattgctgcagcctttgttcagatatctcctcagatgactcgtcttccttacctgactgttactgatccggctctggatcgcttctccgacgtttttctccagccaccaagagacgagccgagaagcccggcgcggcatgttcagggtgacatggttctggcaggccgtggtccacgacttggctttggcagcaaccatgctgctcaggaatctacgataatggcaagttggtcagtcttcgttcgcagccagctgcatcactgtcatcaccaaagagatcacttacttggagtgtgtgaactggtgctcagcagggaaagaggtgtcccggatgtggttgatcccttcgttcagtgttggcgccccttggtgc

SEQ ID NO: 887 - DNA, 21128 bp, Xanthophyllomyces dendrorhous
gtcaaatgttatctttcctagctgggtaacggccgactcgatcgggccagccagtggctcaaagacgagtaaagaaccaaagcctatcttcaccgtccgtgacaccatagggaccgctgacttggcgcggatctctaccctctggcgagggatgtaaaacgggcagaggtggttagatctccttgagtgcccaacctgacggcaggctgagcacgtggtggtagtagtaatagtagtggtagccgcaagggaagactttgccaaggcctgagccgtcctcttgcgcttcatatcgaacacaagaggagcggcactcctcaaggcaactgatgagtgttctgatacgaaggagtgttctgatgttagggtgtgaaagagtgcatatgagtctcctgatatggaagattgctctaatcatctcgagttcgttatgtcttataagctgttgggattgatgtctgcttgttcgcagaaaatctcctttgaccggtttccctttaaccagttcgactgtctgtcggtcatgatgaacgacctggtgaaggctctaccgtccatagacaaagagacaaaggaacaaagacaaagacgaagagacagagaagatatgcttgatcgagccacgtgcagctaacgtcagcggtgttcatccggacgtacacaacacgatcatcaaagtagtcgagtcgactgacgctcttgcagttgtgctgaatccaagcatatgtatagtcttagctcaacgcatacttgtacacttggcttgctaaacttatctcttcttcggtcggatttgctacctcagttgcttcaagtcgcatattcctcgcaaaggtgttgtatcatgagattgctactatcgagtctataaaaagcaatacatatatgcgtaaagcacggtgagaataatctcaaccagtggtgatcggtacatggcccttttggagttgggtgccctcagaccacagaccacagactccccatcggtcatgagcttagtttgtgctagcctcagcctcagcctcagtcttatcctcagcctcagccgtcacggcattctcagcatcagcatcgctagcgacagcgtcaaagcccggcatcctcgcccccttgctcttctcctagtgcagggcttggtggagtatgttgcgcggcgcattgacgtctctattccgccaagtctgagagtaagtagagagtaagtagagggtaagtagagagtgagtagaaagaatgatgagcactcgacacatcatcctgaaacataccacctgtgatgtctctacagctcacaaataaagacatgtacagacagagaaagacagagaaagacagagaaagaaacagaaggagaggaagaaacagaaaaagacaatgacgaagtcaaaagtcctttcgataagggtgatctgtttagacaagccgtcaggtcgtcgggagaggcgacaccggacaacgagatgaacttgaaggttcaacacctcctatcgtgtgtcgacctataccaaacgtagccgattgacgggatttggtgcctctttttccgtttaaacataagaactgatgatcgttcttggtatttttctgccattcttgcccactacacctggcgaatctctgtacgaacacgacagagaggagcaatgcgcaacatctgtctccttcgaggacctcctcgctctggcaggtgtcaatcgttcatctcataatcgatgctcagccatgatccattcagaccaaagttttcatcaaaatccatcaggttgatcttgatcatcaggcaatccccccatcataccctcggctactccatccggctcgccgatgaataacgtaaacaccgaagcaccggcgatcgtcccgaaaaatggcgcgacgactgaccgtcacatgaaaccggcaaggacactgagaaaacctatgctagtcaaacagatcacaggggaaaataaaaacttaccaggaatccacctgacagtagcccaagacaaaacaaaccatatacagcacttaattttgaagacaaggatcaaaccagatgatagtttgacactcaccagtacgaattgccgttgatgtttttggctgtgaacacttcggaaccatatacgaagtaggtgaagatcctaggggccagatctcgagctgatttcaaatcaaaagaaaatttcagtaaacttaaccatcttcagggaatccaaaaatgatcgataacacttacctgcgttgatgccgtatcctaagagctcgcaaacatcacatgagtactcactcgtatgactatcaaccacacttgaactcacctgtttgataccctaagcttgttccgatcaagattaagagtataaacactgcaaagtgaccagacagagccaagacctcattcctcttcgaggtgataacaaaaattccgaacatgagaagagctgttgatagaagcacaaagagtccgatgcaacatgagatttcacgctagtattcgaaagaacaagaaacgacctgcctgaagcaaggaactctgagaagaaattggaccaaagggtagagtttggaagagggtactgtgtgtagaaaaagacaatgatgaggcccggttgttgtgtaaaaactgatgagctgacactcactgtacagaagatcccagcagttgggcctagcccgttgctgaggacttcacctccaggcacggttcttgagccatgttcgtatacatcgatttgatgctatcgagatatatatgagaaggcgttcagtaaacgctccaacagagtgtaaatgacacactcacggaatagcccgcataaaccaaggcggcaccagcgaatcctccaagcatctggctcagaatatatcctggaagcttgcgaagagggaaccgctggccgttccgagtgaagagagcaaagcagagcgagacctgatggcgcacaaatcatcaacatatgttgagttctactgatataaagcgcgcagattatgacccataaaagagcttacagcaggattcaaatgtgccccggaaatagagcctgcagtcaaacttcctaacataacccccttgatcaccgggaagattaaccccaaatgagaatattcaagagtttttcatcctgttagtttcatcgtctctgaatcagcagcttgaatctgaagaaacatactccagcccctgtgggatcacaatgaggcagagttgaaagtgctctgtcagtgtcttctcgctcgatgaggttcagaatggatcaggggtcagtagtcaggaacaaggcaccgacaggcaatattgatacccagccatgatccgttcagaccacggctcaaaaggtattgagcaactactccatctccaacaaagaccagaatagccgttctaaaaagaagcttctggaatgaggtttgttcttcagatgtggacctaatttatagcgaaactcaccctatgaactcggcgagaggctgtctgtagatgtgcctgaaacgagcaagtctgtccgagaaggaggacttaggataggaagtggatgaagactgggtgtaaagaagtggttgacgttcaagatttgacattttgatggtctttcgagaaagtacaaagagggtcagagtcaaccgttttgtactgctccttattgaacaagtatgaagggtgagaagagtcagaaattggagatgaacgagaattgggaaaaaatggttttctatgacggcatgaacaaacaataaccctaacgaacatagtccccgtcaacattcctaacaattctggacggcgtgtatgaatgagcatgactggcatccttcttcatcagacacgatttgtctattcttctcgcagctatcaaaccctagagtatcagcatccgggaattatgaaaaacatatggtcgtcctccatgttgggttccgatgttggcacatcatctgatgatgaagacgatgacattgagaacgacatgatcattgactcaaacaataaccattcgaacaaatctcagttgtccaaagagcaggcggaactacaccagattgacttgtccagaagggaggagaccggaatagagttgaaagagaatccttggtacgccccgatttcattctaattcataaacaaacaaaaaacccgtctagtagatgtgaacaagtctagcgcatatactcatcttccaaacctctcttcattcgctctttgcaaatgatattcaggacaaaggccgtttcaaactatgtcacacgagaaagcaaagatggcctttctgtgagtgtgtacttgacattgagaaccaatttgtccagccccaatgttcgaacccattcattcttacaacgattccgaaatctaccatgtcagtcgagtatgtcgcaaacaggctctgataaagacttacagaacgctcctctgtctgccaagaaggactctgagaaaagtcgatccgtcatccagatttacaatctaaatccttcctggtcgttctctgaaaaaactgcatctcttgaggcaacctcgattgcctctccgatacaagagaagacgcatgcatctatctcggaagttacctcaacaactagtgatacgcgctcataggttagtaattgtggaagacaaggcaatgaaagaaagaagaacaaaaagaagaacaacagtgaaagttcaactaaaaaggtcgtatttggcaaaatacgtgagtgtgtttaattgtaatcattcaagataggtggctcactggaatagacttctatcctctcgctcccagcccgaaacgtgcaaccaacgtcggcatttcctatcgtccaaggactgtacaaccaaggtcatgcgaagcgattctcaaagccacaggcagtccgtccacccagaaaaaacaaactaaatcgaacgaactttgctatttcaagaactacaagtatggcagagcgtgatgcccaaattcaagtagtgtctgatctctctgatgactcgatagaggagtcattctctctccattccagcaagaggaactatatcgacctaaccaacttgatgtcctcatcacctcccattggctgttcttcgccttgctctccggcgcctgttccggttcagaatagccgggatgttcagattgaaaagactattttgagcaacaaaaaaaaagatatcagagggcggaggattgataggacatcattcaagagatagtagatctttaaggaaagacaaacatgacatgtatgaggattattggaatgtaggaagcaatcaggaaatggtagctccacgccgctctttaactcattcagatgccgcagcaactgaccgtcctagaagttagttcacgctcattaatcctttgtagtctttgtaaatgtttgacacttttaatctttagagaagcgttcagcctttgtaccccttcgaccaagcccatccgtcgaacgtaaacccagagcttcgccttcacggacctttccgtctcagccccagtcttttctgtccgttcagctcgaaacctcgccgacatcaccgaaaataatttcgtcttccccctgcacacgacaagcgttattgagaattagtcaatcagacaaagtgtcaaaatcttctgataagtctccagtaaaactccagtatctttcaacagttagcgagagggtcccggcggatgattatacgtcgtttgtaacatcatctggacatcaccaggaagcgtggtcagcgcctccaggcacaaagtcatccagaaagaagcataactttctaacagacgcaacatcgagcgaaggtcgacgggattttgccagcatgccggaaccggtcaagacgatgagcatagccggaagaaaaatcactctatgggaaccccctctgctgtctccatcctcatagattgtaatgttatgaaaagactgggatcaagagagtatatcaatgaagctgatggcgccaacaaagataaccgtgagagatctttaaggaaagctgatataagtggacgtatctgtgagtatacgcctcatttctagtatagagctgcaccatggagacaggtgtgtgttgcctatcgtcagtggagatcagtatctatgtatggtgttcaattttgtcaactctcgctcaaaaatagaaagcaagatatgaagttctttatgagtttactatctctatcgatgatggcagttcttcctggactaatatcccgatgtctttcttgatcttctccagacgcgcgttccaattgtctatcttcttctcccctttgctctcttcgcatcttccacctactgttcctacatgttcattcggaatatcaattccgtgttcctttgaatgttcttcggcctctaagtctctaccaaccaggtgctccatccggacgactgcaagctctttggagatctctttgagctcctttatttggttatctctgatggagtctgacagagcagccataggtggcaactttgatcgaagtcctgggggtggattaagcatggcaagaagagcggatgtctgagctttgagacctccgaactggcgagcaaggggggcagccaaagcgaaaccgtcatcgaatcctggttgaagagtagatagtttgccttccggaataccttctctgtaaccgtcctaggggtaatagagtacatatagatccatcgatgagaagaagaacgaaaagagcgtaccatagacgaaaacatacattggtaaacttttcatccattgatgcccactctttgtcggccatgctcagattggttccgctcatagacattgaagtcatgtccacagctgtatcatcaagccagtcatcctggtcgtcaattatatccgaggtgtggctaggcgaaagagacatgatgatgagtgttgagctgaatacaggagagaaagaacatgagtaatatgaaacgtagacgaaaaaggtcaaatgcggggccccaaagaatcgaggagttgaacaagccgatggtaaccgttagagagtgatcgttaaagatgatcgatcagacatgagtagaccatactgagatcggatggagaccaaggaggatgcctctcacctctaccatcatcactagtcttcttcccttggtgtcccatatctgtttgactttgcacaagacatcatgccacctctctcatacttagtgatgaccgcatcagatgcggccgagtacaacgcccaggacccaaattacatcagacatagttcgctcaatcaattgttggaggaaagagcatcgtcttgtccgaatagcatcgccgccgcatttgccgctcattcagcaggaaagaacgaatggggatgggatacctggagtaagattttttatgcacttagagtatacagtaaacacgctgattgtcgtcgagttcattagcttttgactccttgagaagggagtccctcatcctcgccaaccatttggcttcagatcttcatatccccgttcgaacatctgacaaagcacaagatagaatggttatcgctctactctgtccgagtactgcagactttatgttgaccgtgtgcgcttgttggcaacttggactaggagtcttgctacttgcgtatgtgacatgttctttttctccttccattccatctcgttttgcctaagcagcacacgtacaagaataaccagtactgactaagcctctactggtcgtttagtcctcaaaatacaccacaagccatatcgtacctgtgtcgtgttactcagtccacccatctgctatatcattcttcgatgactgctctcgcgcaaaatgcctctctagactatgagtcgttgaaagagatcgcacctacactagtacaaatccctcaaagagagagttggatctcaagacgagaactcttttcaagagagcaggccaagtcatgtctgagctatgaggatgaggcagatacggttgccatcatctttcatacctcaggttcgtcgggtgtacctaaagtgagcaggttcatattcttgtggtcgctaaacgtgtactaatcgccgccttcaattaaaccacagcccatttatcaaaaccatcgtttgtggaccgagcctttaccttgtgtccctggcgaacccgctttcacgaccacacccctctttcatgggtatgtttgctaagtaacccagaacacatatcaattcttgctaaccagaaagacctttgtttgattcctcgatacacaaaaagtggcatgtcggacttcttccggtcgatcaatagcaagagcgcgctttatttctttccttcatcgctgccagttacatcatccaacctcgtgcaagccgtttccgccagaggtattctaaacaaaccaacgtcattcctctcagtaccatatataatccaactcttgaaggaaaccgaggatggattgaaattactccaagagtttgaattagtgtcaactggaggatcaccaatgcctaaagagattggggatagtctagtcaaccagggtgttcgtctggtcagccgatatggctccagtgaatgtggatgtacgtgtttgttatactggcgctagtgacctcaaatctatgtagctaacagttttagttgtcctgattcaatagtcctcatgtcgtcccacagagactacgggatagacaaagagtggagctacttgcgcacaaatgatgctgctcttaaatgtctcatcttggagcctcacgatcatgagagtttctcattaattgtaaaatccggttggccgagcaaagttagtgtgcatccgcatatcttccataaccgcatcaacacgtctcagctgctcatctttgtctctgtactagtgtgtttcgaatcaagcagatggctcttacatcacgggggatattttcattaaacatcccaccatcgagcacgcttggcttctctcaggacgaagtgatgacgttatagtcatggtgagtggctcatcttattactgatgatgactgagacatttacgttgaactggtacatcacatgttttcccaggtcaatggagagaaagcctcaccagttcccctcgaggaatccctatgtacaagtcctttgatagcagaagcggttctctttggagcaaaccgtagtgctatcggcgctttgatagtgccctcctctgaagcctctgcggttaccctgaccgacctcctccctttcctcgccaacaccaatcgtttagcaccttcacactcacaaatttctccagagcttgttcttatccttctcaccgacgtcaagttccccagagctagcaaaggaagcttgcaacggggaatgacgtatcaattatttgagaaggagattgaacgagcctacagaagctttgagagtggagaagaggagtccgataacgaggatgggaagtggaaggagggaaccgatttactggcctttgtcaaaaaagttattgaagcctcatgtggggtatctaatagtcaagaaaacggctttggattcgatgaggacttgtttgcagccggtgtaaactcacttcagtctactagaatccggaattcactacaaaaggttcataacacagccctcttctttatgccatgaatctcattcaatctgtagaaggtgctgacattccagttgatgttttgtctgtcttagaaactacccctcaagggacaaaagctatcgtcaaatatagttttcgagtgttctacaatcagaaggtctgttcgtctttaatcacgatgaacaacttcaatcatgatacttatcaatcagaaagccttttgtagactcacggatcataccaagagattactcggagaagaaactggagacgaaggcccgtccctggacgagagagagctggagtacatgcaagtattaattgataagctcggggcttttgaaacgccgagcaaggacgatagcggctgtatcagacaaggagagcatgttgtaagaatctgtccttgatgtacatccaaccctaggccattgaattctcctctttctaacatttcgatgtcgctattctctcttagatcttgacaggatctactggatccttgggggcccatcttttggcccaactcttgcctctgaaatctatcacacttataacccttctcctacgtgcggaatccatcccacatgccttcgatagagtcaaggcatctctgtccgctcgaaaattgtctttctcaatagcagattggaagaaagtgagatgtttgccagctgacttgagcaagtctgacctgggtgtcggtcatcagacgtggtctgaaatggcgcgcgagacaacactcgtcttgcatgcggcctggagcgttaattttgtaggaagattacagggctttgttcctcatctagaaggtcagttgcttttgctaaggctgttgaaattatctctcgaaacgtgcactgatgaacctatggtgctgtttgaatcaccaaggtctctcgaacctgataaaaaccatcactcagcctacgtcacaactaaactcccgactttacttctgctcatccactgcttctatcctaaaccaagacttggcgtatcctttgttggaagaagtttctctgaacaacgaagatgctgtccatatgggatatggttcgtacaatatccggattaagttgtgcatcgaccaatgacgatttctgatatcttggtgattttagcccgttcaaaattagtagctgaacgtatatgtctctcggcgtccaagacctgcctgcctgattcccgaattggaatcttgaggctaggtcaactttgtgctgacacgcaaaaagggatctggaacgagaccgaaggatggcctttgttgtttgccagcatggaagtggacggcaagctaccaggtttgaaagaggtctgttctgcacttgttcacagccatcttcatttgaattgcatcttcctgacatgaattgattttgttgtggtatctgcgcttgaatgaattcctagaatcctgcttggctcccagttgataaatctgctgcttcaattctcgacattgttcttcttgattcttcctcggagcctctagataaacctctgacgtaccatatcgtggctacgaatttgtcaactgcattcagctccatattgggttggttcaagaaggccggattatctttcgatgtggtagatcctcaggaatgggtccgaggactgaaagaggcggaagagcaaggaggaagacaagattgcttgaagctgttagacctgtgggataaggcggttggtccaaacatcatctgtctctgttgttattggtgaatattctgactgagatactctccgccttccataattcacagtacaatcatcccagtggtggaattgaccccactcttttcccaaatttcgatgtcagcaacgctgcgcgctattctcaaacaatccgaaaaagcgagcctatctcagaagagttggtgcttaagatggtcgatgcatgggttcagagtggatttctacgcaaatcagcttctgcttagagcaaatggaggggaaaagatggcttgttataattagttctctacatatgaacatgtgaaaacttcggattgcactgtatttctccacaagagcttgcttacatgatattgatgagcagagacgagaaaaggtcaagatttgaaccgggataagataaaacagaattcgccaagtacagttcggaaacgaatgagacatataaaatgaaagacacaagacactatacaaaccataatgaaggtgatataaagagattgaggtcaatttgcatgtcggacggtctgctcgtagatcaaccatggcgaccgccaacgtacaaagagaaagaaagatgaacgtaaagccataggaagaaaaaccaatagaaacccctcgtaacaaatgcgatgaataagaagcgactctgccgtgtgttttctgctgggacaacaagattaaaaagagaagagataggagaaaaatgaaaagtcaattgtacaaaaacaaagtcctgttttgtatctgtgttttcaaaatttggttctttctcttctttttcttaaccaaggaactctccaatggtagcgttgacctcgttccagaagttttcaacataaccctccgggtagccgttcttgtcccatccgagagagaaccagagtcggccggcgaaagtatagcagaacatcagcattcctccaggtcgctgtcggacaccgaaagtcaagtcggaagagtgaatcatcgtgtacgtggtgtagttagagatggcatccaagtttccgaggaaggatagacccataagagcgatttggggcgctttgccagtagccggagccggtttgggggccggcaccgaagcagcagcagttgcggacgtggcgtccgtctttgcgtcattcccgttcccctgaacggttttttccaatccgactttgagtttctcaacgccctcggctatagcatctaccactccaccttcggcctctttagccttggcagcagtagcggctgcgacagcatcatcatgcttggcccaaccaatcgcttgcctctcccgagcagttgacatagccaaagctcgggtgacgaggaacttagacttgaccgctcggagtgtctgggccttggttgattgacatcggagccagaacgtttttgcgtcagggatggaagggatgaggaacgacggaagggtaacattgaagtagccaacacataggtggaagaaggaggatgcagttggcttagggggtcgaagtgctccacgaagattaatcgcagagtagaacatcaagggaagctcgttgttggcatcctgccttcgagcccaagcgatattgaccagtgcaaaagccgcatgggcgatcgtcaccccttgagatttgcatttttgaagagcaacagcagtggtcttggggtcataaaccctggtgtctacaaacgtccgtctggtgttgctagtctggaccttgggaaaagcttggccaccctacgaaacacccaaaggatagacaaaacacgaagaaaaagaaagacgtaagataaagagaatcaaatcggtccattctcaacgaaacgataaattggacgaactatttgcctggcctgattgttcatgaactcgacttggccaatagcgtgctggaacttaccccacgatcggggaatagccaaccggcgctcagtgctgactgggataggattggcctgtacaaaccaaagaacacgagcaagatgggtcatggtggatcatcggagggttaaggttgatagtcaaaggtttggtcaatggaacgaaccttgacgagaaccctagcatcgatctcggtctgaacaagagctcctaaatcttcatcggtcatgtcgttggcgattagggtcaagaattcattagcgatgacggcgaaactaacgccgtcgccaaggaagtgaccggcaaagaacatgaactcgaaatgcttgttttctccagtcactccgactggattggccgggttggggaagatatctcgaggatctttctcgccttctttaggagcgggaggagtagagatcgatatcttagcaagcaatttatcagagagagttcgaggtccatttaagaaggcatcaacaagttctaatatccagagtagaaagaggaatgatgtcagatgtcggatggaactcaagaagagacaccccgtgcaagtcacattgagaacggactacttaccatctttagtcttgtcaacagggaacgcggcggatgcctttgctcccacaatggcttcagcggtggtacgaggaagttcgtggctgcccgtgaaagagttatcgacaacgagccataaagaatcagttcatgccgttgatacacgagcgggagcgcagcataattcttccggctgcctcgcttcatattaaccggggcaaacctgtcgattatgacattatgtacaaagaagcgagacgtacacaaagtagatatcgttcagagcgcgttggtcgacgacggatccgaggagaggatgtcggattcgaagaagtgcccacacaaggagcacacgggatggaacgaatcgggcgggaggcgcatacagccggagatgaagatacctgggaacagtggaaagaggaaacggaaaatccaattgtcaactcaaattccatgaacttgctggcggctcggcaagaagggaaaatgcagaagatattgttcgaaaggaaagcgctatcccgctagaattatgatagcaatgatactcgatatcaaagttacaccgttgacgatgataacaacggcaagcgggaacgcaactcgacgaggcgaaacaatatgaaagctggagctgggaacatacatatcgttgactccctcagctcgtgatggcaagtagtagctgacctcagcctgtccaagctttcgttcccagagaagcttatcaggctcgtctctaatgatctgactgaaacctgcagactcgagtcctggagagggaggaggatttgcgttctgttcgggcaacccaagaagggaagctgtgacgacgtcggaagccgttctggcgtgggtgtagctgctcatggctatgaaaagaagggcgggtgagaggtataggtgataggaggacgaaggaaggaacggaggaacaggatgaaagaagaaggaaagacgacgaaaggtgtgagggtgcaagggtgtgggagtaagaggggaggaacggaaatcaagagagattggggggatccagggcgaggcacaaaaatcgcggataaaaaccgggaggaacaagagacaagaaacagatcggcaggctaggacgcgcctgttcgtaaacatgtgcactcaggctctagaccgcggacggtcacgcgtctgggacgcgacactggataaactctaaaatcggcctaagtgccctgttgttcggttgggaagctacgtctgtcggcggaagatgactgatttatcacttcctaaccgctttctgattcatcgactatgaaaagacccatggattggttccaattaccagaagggaaggagaaaccaacgagatgatagaaaacttgaggaaatataaaagaattttggaatagaaagaaaaagatgatgagaagaaaagggaagcagatagagtatatagaatcagacaagtagattccgtagtaagctgtattgtcaagatgatagaacaaaaagatagaaggaaaacgaaggatgacggttatctaggcaccacctcccatagctctgaggacacacgtcgttcaaatgacaaggtacttgtccgtcaccaacactgattcctgagagaacgcaatctgctcgcccgaaccaaccaaagtggcgctctcgaccgagacgtcggacagactaccccctccggcgacgaacccaacttgaactgggaaaacctcgtcgacgtcctccactccaccgacaaatacctcgagcgtccccgacggcgcgtcttcatcaaccgtctcggtgaaccactccaacgcgttcgaccgcgagttgtacgaccacgagcccgtgtgggatgatacctttggctcagcaccctcgctgtatccgcaatgattacagaggtgcgcagttgggtgagtacatatgttacatcgatcctcctgtgaaagacaatgaagaagagtcgaactcacggaagcggtattgagatgacgacattccggaggaccaaatgcttggcttcgagctcaaattcgatgttgatgtcacaaccatcatttgaagggctaggccaacagttgactggtttcagtttcatcattgggcaagagaatcacacaagaagtcagtagttaccacttgacaaccaagagggagaaccacgatataaggaggaaaaaaactcactggccagaggaacgaccgcttcgtttgctccttccaacttccatttcacaacccccaaagccttaccaacgggaaaatctctcgccggatccttcatggcgaccactcttcttgctccgcctgacccaaacttggccacctgggggtgctgcttgaactggatctcggacgcgaacgcagcggagctggtcggactcgccaaattcaactcgagcttcgccaacgacgggtctgtaaccaacaagtttagactacctcgtagatcgagatgtgaaatcccgccgtctcgatggagggaaagtgatagattttcggagatcgagatgtgaacgctaagaagcccaattgagaaggatgtcattattgatggacatcccttctagccgatttatacagatcgaaaaattctagaaagaagaaaggagacctacctctcttggtcgaccttgtccaagactccgatatccggccctgcaggtgattcagtctggtaggcctccgctggagaaggtgatcctctcatcggctcatcctcttgaacctcgcttgcaagcgcactcaacagatccgcctgcttaggcttcttgccaagtttcataccagagttctggaacgctggtttcgagacactggccggggaagatgttctgttcgacccgaccatccaacagatcgccggtcaaaggataagcatgttacaacatataagtcagagcggaaaggagaaacacgagacgcacctagaaattgcgggcggctcatatcgggactgttggggaacaggcgaataagtcgatcctcccccggctccaaaaccgccagaatgaccacctccattcacacctcccgttgctcggttcatcctagcagtttcgcgacgttgcatttcgagctgcttagcccgtcgcttcatctcctctttaacctctgcttctttattctaaagtcagtgattcatcacacaagatcagagaagtttaaatcagtcaaaaccgaaaatccaagtagccgtatgcagatgcaggtgttaagatacgaactcgggcaatgatctcttggaccttttcttcatgactttctgcctccagaacggctcttacttgctgcacgttgacgttctctctataaccaagtgagacgatttcatcaaacgcggcgattagatcaaatgcatgatggattattgttggctcatcaactgaagatcggaggagatccgaaacacatcggacgagcagagagagtgtcgagatatcctgtacggagaaagggatcaaatttgaagcaaaagtgacatcaatttgatgccttgttgagagatggcatgtaaacaggatgaaccaagaaggatgagaggatgtgacaaacctgaaggatgttactgctcttggtggtaactatcagcagatataaatcctccaaaggctgatagacgtaacggacttcaggggtctcgatagtagtatgttggcttccagttggaatgagcttgggaaacgaggcgaggagaccttcaattcgggaccggggcatctcgagaaactgtcgagagatgatcgctgttagaatcaattgcacatgccgatggatcagttcgactatgacgacacatatactcaaacttcgttgatctcaagaaaatagagcaagaggaatgaggcacaaaagatgatggaaacaagacagatacgtacgcttcccagatttggtgacaacggaagcggcgaggacgacctgtgatgaaatagcgagaaagtcaggggggaaaagaagagaaccaaagagaacgaacatagctggacctatacaagatgaaaaagatcttcatagcctaaggaaagaataggaacactaaccatagcttgcagacaattgattcggttgatagaactgaaaagaaaaaagagtgaaagatgttgttggttgggcagaagaagaaggcgaggtcgggatggaagatggggggacgccaggagggggagggattgtagtcgaattgatagagaaaacgactgcgcatttgtagtcttgtttgaattttcaatagtgacactttgtagtcttttcctctctttcttctcatcactcttcatcatttacccacacccacacccacacacactctctctgatcaatcatgtcgtccatctttggaggaaagtctgctaatggttcagcttctcagcctggtgagtcaaatgcttctgagttcttatagttcaccatatagccatctaggtcttctcgctgatcgactgacggtggtgccgaatcaatttgtagacatgcaagctcgaaaggcagaaattatggaacaggtcaaagcggaactacagctagctaacgctcaagagttaataaacgtttgtttcacaatatcgagcttcaatatattaagctgaattagagggcagaaataatactaaccgattatcggcgacgggtttgtaataatatacagaaaatgaacgagaaggtataaccaaaaacgggtcatccttctagtcttctggtctctctatatgttgtcgctgagatcaacgtttttgaccgatgttagtgctaccaaaagtgtgttcccaaacctggggctatgctgactaagtccgaggaggtatgtttctggtttctgagtcctgccggctggtcactgctgtcctcagtttcttgactatccatttatctttccgtcttgcattcagacttgtttgctgtcgtgtatggaccgatatatggaagtaaggcgcaaactgttctttcttttttatccttgatggtgttcccggctttgaccgtgattgacccaattgtcgtgatattatcttccaggcttgtaagttctcctatttagctcctgagcatccgcttgatgacttgacagcaaagcaggatgagagttaggattgtgaaagagggctgatgacgatctgaaaaccgatgttattcaaccgttgaatgaaaacacactttcatctgttctagttaacgtgttcgttctttcaatcttcaatatcgtattagccaactcttcaaatcttttgaagccgtttcctgactcacgttggtttttggctatatcgctgcatctgcacctgaactacaatcatgttcagtgtctctcgaagctacgtcgctcgattatccaaggagcgagggcagcttggctctgccgggggtggcatgctcggcggagatccaacgatgtctgggtcgaacttgtaaatgaagtatgaaagataaaagatcgaaataagaacgagactctcgaagacaaccagagcttattggcacttacaagattcggcaaaggtcactttttaaccactccaatctttatgagacattctatcgttggtgcgcgcatgtcaccaacaaatcttgtagtcagaagcacagatgatgtcggtaaacaaagatgcaaaaaatatccaagggtagatggatcttactcaagtaaatcaatctagattttcatctaaaactctacgagcagaggaggaaagttatatggcgaaaaagaaggtgcacagacgaagatgatgctcgcttaactttggaatatttcgcctaggtctgcgttcattaatatcttccgccctgcgcctccttcgctttctcattcatccacttcttcatcaagcagtccattcccacctatcttcatctcctctcagtcattctagcccctggaaagaaaagtctaaatcgatccttggactcttgctttctgcttactcgtgccatctagacttaaatcgattggtcgataattcaaccatgtcactcctcactagatgggcgaaaatgggcggcaaagatgcagcctcggcttctctatcaccttcggtaccgggcgaaacaggtgaatggggtagagacgagcatctctatagctctgattcagatgagagattctacggaatggaaaacgttcgtcttatcttttcaacttgaatggctgtcaatcagcagatgtgtcttctttgtcctttcaatatcaccttctcgctccccattccgcgtggtatcatcaattggacccacttttgatgggggttttcgttcgctgagaatacattctcggccatttaatgagcacactgcatcctttggaccaacatctagtgtacttttgcaatgcaacgagtaccctggaatggtcatcacaaatttcctgattgttgaaactcataaacattgattgattgttaacactcttttgtcttttctgcacggcccttcggacctccgtatatacatcgaacttctgaatcaactagtttggaaacacctggcaagcattggctttcccttttaagctttgatgggctcttggaatcaggctgatttttctcttgattttttttgctttcaaaaagttatgccaacgcaatcctccaatcattgtatcactgtcaacctttccgagattgcgtcaacacctacccatctttgactactccctacatccccagctcatctgccacgtctctttcttatccttctatcataacaccgagtccagaaccgctcggaaggtctgcagcatctattcctccccttcagtcttctccagtaacggtcaatgtatcatcttcatccgccaataaatcccggtggtcagccaccctttcgaaacgaaacataacccctactgatcctccggccttagcttctcccacttctttacatgtcgatccgctctcgatgtctcaagctgggcatctcagtcagccgcgaacgaatgttcccccaccaagcttgtttgttgccctacagtcattattcagacaaatcgctaccatgcctatcgaatatggttcgagtgctgcggatctcagtactagcatcagtacaactggaagtacgggtcaagccgctggaaatcttctaggtgtagctggtaacggcaacggaacgacaggatcgggcccgggagatatgggaacaggggtcgtcgctccggctaccttcatggggaagcttaaaatggagaacgagatgtttaggggaacgatgcagcaggtcagtctcgaatctttatcaggctaatcagagataaacatctcgcgagtgtagtcgaatcaagtcgtggtgggtgatacggagaaggctgaagattgttgtttgaccttctgggcccttaggacgcacatgaatttctgaactatctattgaacaaaattggagaagacctagaagaagatcataaagagaggaagtcggcgaatgaagtgagcttagggttagggttagggttagggttagggttagggttagggttagggttagggttagggttagggttagggttagggttagggttaggg

SEQ ID NO: 888 - DNA, 1047 bp, Xanthophyllomyces dendrorhous
gacttgacaatacaagagagatgaacgaatgacttacggcaataaccctccttgccttcctaggaggcaccttcccagatcgtctgctagctttctaactttgagctcatccctaccaaatgtctcatcacagatggtgcagttcgctttgaagcctgtttgagcccacccttggccgaccgcaggcatcgtcatcgccgtgtttgttttaggatccactagacggaactcatttggccgcggaagggtcacccaaggaacgatgttgatgtttccacagaaggcgcaattgactggtagcgtgtctgagagcgaggtgctcaccggtgagcttgcaggaaggcccgaggtcagagaggagaatgagtttgactgatcctctgtgagattgaagacatatgatgtggggtcgatctgacgagcggctaggtgaacaggaaatgccttgatcgtccgaaggtctagacgacaactgtgatcggctcggtagatccgaggattgagacagtctggtccagacaacaaagcgcgtggttgatgtttgatacatgagtttccacataaacatattggaccatattcttccaggcaagactcacatgcatgccatacgagtagtacatccaacggaggcagtctatccacctccagctcgccggtcgagctagcatcacctttggcccgaacggactccatcgcattccaccagacctcgaaccggttcacggctcgtttgacaaagattgcaagcttgaactcatcgttcggctcgaccgaggtatcggtaagcgaatagtctgttggaacagagactacctcgtccttcagcttggcaaacgcgccgagaaggagcagataatctacggtctcggagatcgagatgagtggggcagatttgaagtcatggattggaaagaagctcgggagtgagttgtcctgaatagatgtaaaacgagaatagtatgtaagcaacattcaaaagggaaagccacaggttcaagaagcgtcatacatcacttctgtagggaggtgcatcaggcccgttgg

SEQ ID NO: 889 - DNA, 541 bp, Xanthophyllomyces dendrorhous
agactgagcctcggcgtcatccaggggatcagtagggatcaacgggacaatcccatccttcttatgaccacgttgagcgaagcatacggcatgccgaccgaagcgaaactggcccatgcgcaaagaaagtatatgcagacaaagtgcctgcctggaaaggcagtcgagtacctagacgagctggactcacaccgaaagactttgcggacgctcggaaaggatatctccgacggcgaccatatccagacgatactagacggactgaaggacggaacgtacgagaatgcaagagtcgctctgatggactcgtgggacttgacgctgcccaacgtccggtttggcctgacgtttatgacgaaactccatgctatcgagaagcaagtacccgttgcgctcgtcgcccgagtcagggaggaggagccgaggatcgagcgagcttactatccgaacacatatttgaacacatacccgaacacacatccgaacacataccctcgacaggtctccaaccaccggcaatgttaccactgccagcagtatg

SEQ ID NO: 890 - DNA, 412 bp, Xanthophyllomyces dendrorhous
gagcttgcctatccgacacagagggcggctatgacatctctttacaactcgctttggtactctggtagtatcgtggcagcctggttcgttccctgactctcatcacacaccatgcgcacgtcgcagtcgctcacactgtctggctctgtttctgtctcttcgctccccttccctttctcctctcttccctttctcctttcttcccttcctccttctcgtcccctcaacccgatacaggacgacgttcggaacgttccggatcaacaactcgatgtcctggcggatcccctccatccttcaagccacgccttccgtcatccaggtctgcctgatctactttgttcccgagagtccccgatggctcgtctcgaaaggtcgacacgccgacgctcagcgggtcttggctcggtac

SEQ ID NO: 891 - DNA, 337 bp, Xanthophyllomyces dendrorhous
gtagacccattcttgcaacagtcttttggtactgctcaactctctcttggttatatcttgactcttccttggtatctcttcgctcttgcttgtgtttgcttgtgtttgcttggcctaacatctcaaatgacatatatacaaggtagtcgttagctatctccccttttctcccccaagcttggaacctgtcagggatcagaccgagtagtatatgcttgtatgcatttgcataccatcttaacaatacgtatttattaccctctgtatttttcacacttcgatacctgtatgcatcctttccgtcttgcaccccttcgggcttgcatacatgccgagc

SEQ ID NO: 892 - DNA, 495 bp, Xanthophyllomyces dendrorhous
ccaaccaagtcgcaacaatcggttgccgggcccttccgccctcacagaacctcgttaactcctcatagttcccttcagcaatctcctcatatccctctgcaatattgcatgatcccttccctcttgagagctcaagcgtgctgagtaccgtccccactcagcccccttgcctgcgcccctaacactcgcgccctttcctgcttgcattcatgcctaggcgacgaggagtcgcaaagtacttggtcgctttccttttctatattgttctctttctcttctctctcaagtccgagtcctgtcatcctcattcgaggttgtttgatcggtgattcttgcaatgtctctatctctgccgcgcctgtgaagatccaagagcctgagttttgagacaacttgtgatgatagaactctccacctagtcaagtcgcaacaaaacagtcgcccggctcttccgcccttttacagatgcccgttccggtataccgagccttctgt

SEQ ID NO: 893 - DNA, 841 bp, Xanthophyllomyces dendrorhous
atccagccaccatccacgtcttctcgtagacagtgaacatctcaatgatcttggagatgtcgttcagtctgggagatgcgaagaaaggaaacaaatcagtggacacaaagtggaagcaacatcatcagaagcgacggtatcagcggcggcagcggcggcggcggcgacagagacagcgatggagccatgcgaagagagaaaagaagtcagggtctcgacacacgcccaacagagaggggacacgaaaccaaggcatggaatcagcagaccacgtacatgcctctagggtcgaacgagctcgacgaccgcttcccgccccacaggttgctgcatcagcccaggccaagaacaaggcagacacgcaacgagacacaaaagcgagtgagcacatgcccggtcagcacacacagccagacaagacagcactcacacagccagaacagtgccgaactggaaagccaccctgatctgttgcggcagcagtcgacagcagcagccgacagacaacgacagagtggaaaagcatgagaagagcaaagcatggaaaaggagaagcacgggaaaagagaagcgtcagcgtcggcgcatgcaggcaagcaagcaggccagccagtcagccagtcagccagaagcaatctagccagccagccagccagcctgatggtctgatggtctgatggtctgatggcctgatggccagatcgtcgacgtacacatagcacatccagattgtctctgatgccgcgcttcgagagcgcatggagcgcgttcgcacccgccctggccgcgttgctgcagactgtcgagtcggaagaacagagagggaaggcagagagggagc

SEQ ID NO: 894 - DNA, 559 bp, Xanthophyllomyces dendrorhous
gatttagcacccttctttacgccagcgcatccagcattcaagtgcttgccaggcagagtcgagcactccatcgttaaaagcagtagaagaaggcgacaaccacagataaaatacagcgccgtcctgactctgatcaacaggccagatcgtgtccggctgagagtatacgatacagatcaagagtgaagatcattcgttgtcgatcagcaaaagctcgctgaagaacagaggtagtaagaggaacaaagctgagtctctcagcacagccggctagccacacagtcaaccacaaagcgggtcaatcgtcaggaccactgcccgatggcggcgatgatgtgaacaagaagcaaccactgcgatcatggcgagagccagacggcccgacaagtggagcgccgtcgacctgaacgaatcccctcagctcaggtgggtggccgagaaagagcggcagaacagaggagcatggtctcagcgcgcgttgcgcgatcaagtgggagaaggaacgtgatgatagtgttctgaatggcggtttggcttgacggttgaagctctggagcca

SEQ ID NO: 895 - DNA, 465 bp, Xanthophyllomyces dendrorhous
ctctgctctgtccgtctagttgccaaagccatacagcgttcggccctgtcgcttgagtgcgtacaccacgtccagtgctgtcaccgtctttcgcttcgagtgctcggtgtaggtgaccgagtctcggatgacatctggcaaggatgaggcaaggatgaggcaacagatcgaggggtagtcagcatcagcagtactactagcagcagcaacagcaacagcagccacgacggcaacagcaacaacaacagcgacgaccagcagaccaagaaaaagagaacaagaccactcactctcaaggaacagcttgagcacaccccgggtctcctcgtagatgagcccagagatccgcttgactcctcctcgtcgggcaagtcgtcggatcgccggcttggtgatcccctggatgttgtcacggaggatcttgcggtgtcgcttggcgccgccctttccgagtccctgtacgtc

SEQ ID NO: 896 - DNA, 815 bp, Xanthophyllomyces dendrorhous
gattccggaaccagaatgtggacctttgacggcaacgtaaatgaagttggagacgctggcaggggccctgggaagagttctcttttctcctttaccgcttaccaccctgaaatcggattatccggagctagggtccaatggtgggtagagcccggtcaatttttgacgggtccggtgcgttcctgacagtccttgaaaatccaacggaacgtataactttcacgtctggtcgtactcataaccgcagcaggtctccaaggtgaacagcctctagtttgatagaacaatgtagataaagggaagtcggcaaaatagatccgtaacttcgggataaggattggctctaagggttgggtacgtcgggccgttgtctgcagccccggaccgcggacggcactatcccgggcaaccgggacggagctgactgtggaccaggtgaacgacctcggctgcctcctcacgggggcgtctggcgtacgattaacaaccgacttagaactggtacggacaaggggaatctgactgtctaattaaaacatagcattgcgatggccagaaagtggtgttgacgcaatgtgatttctgcccagtgctctgaatgtcaaagtgaagaaattcaaccaagcgcgggtaaacggcgggagtaactatgactctcttaaggtagccaaatgcctcgtcatctaattagtgacgcgcatgaatggattaacgagattcccactgtccctatctactatctagcgaaaccacagccaagggaacgggcttggcagaatcagcggggaaagaagaccctgttgagcttgactcta

SEQ ID NO: 897 - DNA, 2338 bp, Xanthophyllomyces dendrorhous
  misc_feature (1262)..(1271): n is a, c, g, or t
  misc_feature (1625)..(1634): n is a, c, g, or t
ggtgaagatgattgccgcgttcagatcatggccagagagcgaatatgtgatctgtattgaaagatgacatatgcgtttgtcgtatcagcagcagatctcagtagctcatctcattcagtcgacgactcacgaatgacaacaccgcggcaaagacaggaatgaacgccatgacagcactcattatagctagccggtccgaatataagtggtcagatctactggtcagcatgacacaatcgcttctctgaggtcttcttccgtcactttcgaatcctagtcgacaggagcacaccaagcgcaacatacctcgcatcaaacagttcttctttagttcttccatctcgtcttgtcgatagtccgagatccgactgccaaagtattcttcgtaggccatgaacttgatgactcggatgcccgagaggatctcctgcagcaacctaactcgagagtcgacgatcttcatttgccgttgtcgagttccaatcattcgcgagaagagccacgcttggaagggtatcccgatgacaagcaccgcaaagcctacaagggccgagtacccgatagtgtgcagcaggatgataagtctgtgacgtgtttgacaaagagaagcatgtcggtcaggctgataaactacaatggaacggtatgggtatcggatgaaacgcaagacacacatacccgacaatgacctgcgcaggttggagatagagctcatgggtgagaagggcagcataatccatgaatgaggcatcggacgagatgtgcgtgacgagctttccattggtatgcaccattctggcttctccggacagccgaacggactttcttgagacgaccgagatgaccgctgctcggagcatgaacctgaaagcgaatggagatgtaagccggtgtgtgagtctatcagaaggcttggtctttgttctgagaactgtgtcagatgctgaaggttcacctacccagtgatcaaccctctctgaagaaacatattcatgaacagactagaaacctgctgcatgaggtagagcgcaaagcttatcccgatcccatagcccacagacttcggtacggacaccgtttctccagtttctcgatgcgagtattcgtacgactcggtgatgtagttcaagatcatccgtgataccaaaggagaagtcgacgttaaggcgatccaacacactccaagcattcccccggtccagaacctgtacatgtgttcatagaaacaaatcacaccaagatcaacacagccataataaggnnnnnnnnnnagctcaacaactccgaaagtctgacacgtacctccacatcactgttctgtgtattgccagcagcaaattttgatcatagatctttccatcctcctcgattttctccggatgcgtccgctctttctcgtcatcgtcatctgtcttcttcctcttgctagtctttccagtcttacccaacttgacttgttttcctgtaagctcgtcttccacatccacgccttctccagactccacatcctttaactccattcctgtaggcttcttgtcagtcacgtcccgtttagtggcagggccagttgacgagggtcgtagatgttggggtcgtcgactcggaggaacacgtccatagaagtnnnnnnnnnngtcgagttgctttgaactcgtcggtgagctccctgttgggaaacaaatgaagaaaagagtggccagtgagcatcactcgatcgagttctcaagacatacatcgtcatgtcagcagacgacttcgaacgactgaaacacgctgcctcaccagaaatcatcaatctcgaactataccccaggtcatagagcaatcagtcagacagagcagtcttccatggttatgcaactcaacaagggactcacaggtctcgaaacaccgacctattgagagaagcaagatcacgtcatccagtcagtataccccacgtatatgacaagccataacaagcgatgacaagccatgagaacctgacggagacctactcgtagtaaaggagtcaaccatgagaacagaacccaagaaaagaagttgacatggttctgagggatctctttcccttctgcgaaccctgccggtcgaggtttgatcttgaaaccaagaaagctctgttgggcgacttcggaaatttcgcctctctcggctttgtccgaagttccctgggtcgcactcttgccaggcgacatgatcgatagaaaattgagcagacagagaagcaagcagacgtctatggatctgtttcagtgaagtcgggtctaactgacaaagctgaatcgaaagaccaccgggaatgatgagtgttggttgccacaacgaagaacaagac

SEQ ID NO: 898 - DNA, 745 bp, Xanthophyllomyces dendrorhous
aaaatgaagagacagatcacaaaagccttgtaggagtttcactgagatagaaggataaaaatggacttttcgttctggcacgcgttcgaagccacgtcctcattgatacctcaaaaacgcatacataccacccagctgtctcagtgaggacggatcgtgaaaccagggaaatagaggaaaacgagttagaaagcctatagcttttcggagagagaccctgggaacactgcgcagaaagaaacggagggtgttgcctgatagaaagggggattaacaaattacagataatagaatgtcaagactgctgaacacccaacatccaacaagcgatctctcgcaagctgccgttgttgcatgcaagcgccgaccttcacaacaagatcgtatagtatagtggttagtacttccgcttgtggttcttcaaccgaaacgcaaagtcgcggacgacgggtgttcaattcaccctacggtcagattttttggtgtcctgttcttgcgccctttcgtttctgcttttcttgctcaacatattcactccatccgagcagtgttcacaggcagacactgaggcaaaaaagtgtatgaccacacatttgtgcccggacacatagggagacgccgaacgacacgaagacatagtgactcagtggcacggtgatacagaagcacaaagctactgaaagatatcgatacaaggatagaaggatacagagatacacacacacacacacacactcacacacac

SEQ ID NO: 899 - DNA, 1256 bp, Xanthophyllomyces dendrorhous
cacacacacacacacacatgtagacgccgtccacctcgactggcgacatggccgggcggacgacaaacgctcgctgtgatctggatgagagtgtccacagacagtcaagctgtctgactcaggccgtccgacgcaggctcatcaggctgatggatcgagataggcatcgaaagcctcccgagtgagcacgacaccccctatggagacggccagacacatcctgtcagccatggccggtatgcagaggagcttacacaagagtctcgaggcagcaggcactcacagtgttgcagcgtctgcctcaggatgggtgcgatctcgggatcatcccatgcatcgtcatgttgggagtgggatgcggctgtcgacaaggccaggtgttgtatgagtaccaagaacagacatgtcaagttgtggaacaaaccagacgaccagcagaccggtggatcagcgtgagaggagatggatatcagacaagtaggtcgtgttggtctacctaccttttctcaccagactcgtcttgaaccggcctctggggcctgcgcacccattccatcggcctatctgacgcacgtcatcggcggtccgacgtcctaggaagaaacggcagtaccactaagatgttcagcgaggcaaccattggggtcatcagcatgtactaaaggcaaaacgcgatgtactggaagaaagacgcgatgcacatcgggagcagttgggctcacctgaaaccagccacgagggtcttgaggtcggatccatctgttatagacgtgacatgacatggcatagcatgacaaggcaaaactcagctcaccttccgacaacgaacacaaagaaagcaggaggactgacccttgcttttcccagtcttctattgactgtgatgctttcacgccgtacttgtttacttctggacggtatgtttgcgaacaaagaagctggtcagctgtcacaacaagtgagccgtccggtcgaatcagttgaaatcaggacgaatcagatcgggtcacatcatcagatcgcaaatataaacacacgtcagatcacatactatacacactgccatatctatgatgcttgctttctcaccatcgaggccttcataccattcgtccggaagcgagtcgtagtccgccggtacggttcgccgaaggacggatgagtagaactctctttgtagaatagaggaaagcttgagacagacatcgaccaaagcacggtagtctgagtagtacagaacttacctccagtaagat

SEQ ID NO: 900 - DNA, 312 bp, Xanthophyllomyces dendrorhous
acccggatcactcctcccagtagaccaggccgtcagaaagagaacgagaccacccaagacacaccttgaactggaagttcttgagaacgttggccgctccgacagcagactcgtacctcgatccggccttgaggacaagggtgagcgaagcggtggacgagccgttctggacggaggcgagcttgaccttgggagaaagctcagagacggtcgcgatggaccttcgtccgagggaggacgcgaccttggcggaaaccgatctagactgggcaaacatggagagattgagagaggaggatgagaggatgaatg

SEQ ID NO: 901 - DNA, 665 bp, Xanthophyllomyces dendrorhous
ctcccacatccttcgcccttcgtgcagcgtcacacttcccagcccaaacgcaagcaccgtaccaaagtcccggagactcaacgcctgcgtctggaagaccccctgcaggaaaggcagatagatcaacccgagctgggcaaggaacgagatcgagcatgtcaagaagagcatcttgttctggacaagtcggcagctcaggcccctgttctggatagcagatgccaggtcaaggaacacaaacgtcgtgaacgtctggagagacagtccgtcgagcacaagatccggatggggtgtgtcagtagataggatcatgatgcacactcagatacactgtcccgccaaccagaccacaaactgaccatagtctgatcccgtcgagatagtcgcccgtcctgggtttcctgaaggaacatgtacagcgtcccgaccacgatgatcgccgccgagaagaacaccctggcaaacagtcgcttgctcagaatcggcgcgttccgaggtcgaggaggtcgcttcatgatcgccgggtccaccgggtcgacgcccagagcctgggccggaggacctagagccagccagccaacaacacagacaccaagacccagcggtaagcagtccgtcagcgctggaagaacaggtgcacgaacaaatgcaagaatagatgcaag

SEQ ID NO: 902 - DNA, 3780 bp, Xanthophyllomyces dendrorhous
gactttggccgggtttcacgtcctgaccgggcatcacccgggcatactcaggaatgctcgggcggggctagatagcttgaactcacgctgggaagatcggatcatccttgtcggaactgctcgaacctctatcaagcctttaaagtctcttctcatcagtgtccatcgttcttcatgtttccttttcctcatctcccatctttgtctcctctctctcttgcaagaccgacgacacttcatcaccaggtaagtgctcaccgttcctcggccgtctgagagtcctctattttgcatcacgtcagtccagtgactgagcccatctttcaggaaactcaacggcaaacatgtccatagccatcagatctcttgcccgactgactcgaccctccgatctccgcacaatccttgctagaacgatgagcaccgaactgaagaaacctcttgagctctactcggcgagcacaccgaacggccagaaggccactgtgttcttggaggaactgaagcagatctacccagctttcgactatcatgtgaacgagatcgatatccagaagaatgaacagaaggaggagtggttcctgaagatcaaccccaacgggcggatccccgctttggtcgatcctaacaggggggaccatgctgtgtgggagtccgccgccatactgctgtatctagagaagcagtaagtccggcagacacaccttctttcctcttgtttctctttctttctcttctgtctccttcgcgctctcaagtgcagacctgacgcatgtttctttttgtatcttctttcgcctatagctatgacccagaccacaagttctcattcggcgactcggctgatgaggataacttcagaagtgagatcctccagtggatgttgtacgttcttccttctgtctctcgctttgctgggcgcagatggaggagaaagtgagagacatcctgatcactcgggatctcatcactccgtctcgctttctcgaacagtttcgtccacggagggatcggaccgatgcaaggccaggcggttttcttctcgaaatatgcgcccgagcagatcccatatgtgtgtatctctctatgttctctctacggagtttcagcctgtcgagtatagtaggtgttgacgcactgatctctcgaaacaggccatcaagaggtaccaagatgagaccaaacgactgtactcggtgctcgataccaggctccggaacagagactatctggtcggtccgggaagaggtaagtactcgatcgcagacgcaaacgcgcttccctgggtgttttggtcaccgttcgcggggatcgatcatgtggagattccgacgggagtgaaggcatggctggacaggaacctggagagagagccgacgatgagggggctcaaggtcgggccgaacacgtcctcagagtgagtttttttgtgcctagccttccaggggttcatctttctgtgtccttgttcgtgtgatgcgtgtgtgacgaacatatatggacgaatgtgtggacgaggatctaacttctgtcttcacttccggcttcgacctgactgttcgcatggggcattgacagtatgatcgaacagatcaagaagtatggggcgcttcctccgagcacgaagtgaacgatttgactatttggtagattttgcggcctggtgttactttgtgacattggtcgatgattgcccttcggtccaactgtaggatgtgaggggactgtatagaatcagagggtatattatgagttttctggtatacatattggactgtcttgtctcagaggttatcttgacagacaacttacctcgtggctttttccgtcagtgcgtttttagcttgacaactcatgtctttcttctcatctcttccgagttcattccctcaccttggcttccaatcattgcctgttgtccttcaacatatatccccgcacccaatattttctttgctattctcctcttttctctttcttttctcatctctaaccatgttaccttattgttgacaaacccccgctctttgatctccagtaacaagtcatgacactctgagagaaaaggcgctatgtgcgtgtagtcactgaagaggcaaaggtacatcaatcatgaacgtcatgaatgccgctagtaataaagacaactgtgtgagagacattcaagacagggactattgcccacaggagagagaatagtagaaagattcgagaggcggatgctagcttatagaaggacgtttgtagatacaagaaaaaaaacggtggtggcggccgaaagagtagaatacacaagagtgttcgacggatcttattacagcgtgatatgattgaaagggacttgagctatcaacagtacatcgcgccacacacagtcatggcagccgtagccaaactgttgtctttgaacacgattctaccctcacatccctcgccaaggcagcaattcgagcgtccacatagacagggcgcacgctgcatttctttccagtgctaatgtggtgtcatccgacccagaatacacaatagtcaacacaatagaagaggagagggcaaataaagagtaggactaacgaaatcgtgagggtaacattctgaacccataccccaaccagccaacggatgatgtggagctcctaccttggtacatccccattgtccgaggctgtgcgaagtgcggtgataaaagagatctggatcatagtccttgcttgtcctacgaaacagtcgcggagagaagaggatgagacgcgaacaaagtgagcgctttgggtcgttgaacgaagcgagagaaaaggagaaaagaaggacatggaagattcgtacctgttcgatgaaagcttgtcgacggattttttagcccaggccttctccgctgctttggtgtgttgaattctatattccagcaataaaccaagacagtcaaaagaagaatgtcaaaaaaacgacttggtctatcttgttttgtactatgcactcattgagaatatatgaaacacagagatcccaacctgttttgttcccgactttctcgattcgcgatacatgccttgtttgctaccaaccatatggagttatgcgtcgaggcttgggtggcatccctatactcctcgtccaccgatttgacagattcagacggcgccgacggcttttctcgactccagaaatgggttgaccgaggtgcctcctatccaattgtgagccaaaggcaaagcatcccatttccagtcagaccctgaatactttggatggtgtagaacagaaggacacaacagtgttgtcttgaaaagatctaagtttacgaacaaggacggcagtggaacttcaatgatcaagaaagcaactgtaagttcaaatgtgaccacccgaagcgatcggctgacaatgcactcactaaagttcgttgtatcgacctgagatagcattgccgaatgatcgatcagtctttctctccacttgttatcttgactgtacatgtatagaggaagtgcttactctcccaggcctcagccgtgccaatgaaggcctcttctagtgaagcttcatccaccttgtccgggtgattaagaaagttggtcaacagtcgagaagtgtcatctctgtaagactcgatcttcaactggtgggcatgccagatcaagtcgatgtcgagcgcttgattcaatgatattgacacagatgagaatgttattccagacatggcaagaaaaattcatggaaggaaccaaagtagcgtacttgggcagtgaagaacactcgtgtctcgagaaaccaaatcca

SEQ ID NO: 903 - DNA, 332 bp, Xanthophyllomyces dendrorhous
cttcggcttgtctctgtgcttgctcaactttctcgtccaccactttccatataagccttctcagcttcccatctcctttcttcacctcaggcatcaccagaaccccattctgatgtacaaaaccttctgttacattctgcacttcaacaaaatgcttctaggctgactcatctgctggtccatagagtcatcgtgtgcttggcttggacatcagtctgaaacccatattttaccagcgtcatcatatcacgcccaagaccggttcgttttgttcgttttgttcgttttgttctagcattctccgtttcttgtcatattccgtcagcgttgtt

SEQ ID NO: 904 - DNA, 1394 bp, Xanthophyllomyces dendrorhous; identical to SEQ ID NO: 657

SEQ ID NO: 905 - DNA, 1156 bp, Xanthophyllomyces dendrorhous
ccctactcaccataagcctcgaacagatcggccacgacagaatgggtcggccgactcaagtcccgctgggagccgtgcgcccgaaggttcttctgtagaccgtaagctaagaagaacgatgcaggcataaaatatgtcatcgtcagtcttgtcattctgacaaccacacttcgtccgcccgggatggacagtagagccagaccctgttgtctttcacccaccattcgagatgtatgccaacgtcggcacattcatcaccagagactgcagacaaggcgataacgtagtatagatgacccatcgatcagttcgctgcggccgtctcgtcatcgacacattcatcttgccaggtcacgtacatgcttgagcagctgttgagatcaaacccggttgtgacaagccaggcaagtccagaaagtcagccagagagcgaaaagacatgggataaacagtataggatatgaaacaaccagagacagaacagacgacaagagctcgacaggaagaagaaaagatcaggaaagagagacgcagaacaaagagaaaggcagaaaagagagaaaggcagagaaaagaactggaagagaaacagaaagaaggcagagaaaacacagactgaccgtcatggcccctgctctcaagtgagggtagtggtcccatatcattatcgtgatcgctgtcgaaagaatgccatcccccaggaactcaagacgctcgtagtccgtcccgctgtactccggctcatcctccaccggccgtttcggatatccatagaacgaggtatgtgtccgggcggtgtcgaacaaagccggcgagcacgtaggtagacgcggtaggctctcggccgagatcgatcgcagagcatccataaacggcttcttctgcgtcagctccaggctcgtcaggttcagcaccaaaggcatctcgcagaaagaccggatcggagacttgctcggaaggataaaatggccgcagactgggcgagagcaggaagagaatgagtcgggtgtgagggcgtagatcgatctgtatgagccgtggcggcagaatgactgatgacgctgggagcacagatagaaactcggccatgtggacagaagatatcggaagcgtgatctaatgataaacgagacactagcgatctattcccccatct
